United States Patent Application Publication US 2006/0134663 A1 - sequence listing, part 63

SEQ ID NO: 159757 - DNA, 1000 bp, Homo Sapiens
tttattgtttgttaaagtttattgaaataaagaatcatttaaatcttcatagagtgaaagctgaaattcttaacaggccaagtattcaaaggaaaaaaaaatactgtttttaaaataaaacttgagtagaaaatgcagattagaaaatttttaatagttgatttgaaatgtattcattcactcattacattgtgttgcagaaatacctgtctttcaccatgcttggttcttcatacttacaatacagtttgtaagtggaggttaggagtagctgagcaatctggtagagagcagcatgtggcacacagagttgacaaactgacagttggaactcctgactttctccattgcttcctcagaagcaaaatccttcaccatgtgatataaagtagaatgaaactcagtttcttctttaagtgcttcagaaaatgcctcactctcttccttgatcttcagtctttgtgctctgtcaccactaaacattaaaagggcccaattaggattctcagtacattcttcagtaaggtgttccctcaccttaaatacgacttttgtagaattacatagtaggttccacttgctccaaccaaatgcaaaagcagaacttagtagggccatctgtcgataagctttcacttctaccaaaggaaccttattgtttataataacataaaaatgagagtgtctagtaggaaagatattcagtccagcttctttcaaagcaataatgaaaggaataggagtcatccaggttccttccaaaatagagatgtgtttcttgtcttttagtttgattgaagataacatgcagaggttttccttaatttgtatttgaatctcagtaaatactgtagtcacagttaaaagtactttatttacatcaagtggtcttagttcccatgactggtacggcatgttaatatgagcatcttgaatcaaggtaacagggccaaaggtgtccaggctgaatgttacaagtctttcttttggtttgtaggat

SEQ ID NO: 159758 - DNA, 1000 bp, Homo Sapiens
tttttttttttttttttttttttttttttttttttttttttttttttttttctccctcctgaacaggcatttaatagtcttatttcagttggaagcaatagttggaaaataagttacaggaacagaccaaaaaaaaaaaaattaaagtgcttcaggctgcaaacgtaaacataaggggcaggaggctacctggccctgtccccaacccctgagacaggaaggtcactgtcaggggcccttagccatcaccaccctctaatctcagccctgcgggagggagggagggaatgtcagaggtgggaaagaactcaacgggaatgaggaagagactttgtaaactcagaaccagggtaaagggccggggacaagggagctctgggaacccttgccctggcctaggggtggggccagccccccccacaggaactcggggaatactggtggcttagtcccagccatgcccgcccacttcacagcttcttcccccatccctcatcagcagacacaagacaggcagctctgccaggcctcttcacccccgtctgggaggcatcccaggggaggcacagcccaggagcagggatcccctctgggggcgttgggtctctggagtgtaagagggaacagagctggcacggtgctacttgacgggttccaccaccaggaccttgcactcgcgcttggcaatcttgtccagagacaacacagccttgtccgggggcaggtagagggggcggccaacaggagaggccacagggggcgtgatggctctgcgctccatcacactgcccgacctcatgaggtggcttcgggaaggctgctggtgggagaaggactgggagcggcccaggctagcctgatgcctctccaccaagtcccggacagcagggctgctggggctgctcttgcgggagaggggccgggcctcgggtggagggtgggacacgctggcggtgaactgcagcttcagtttcatgtgctggcttagctcgaagagccc

SEQ ID NO: 159759 - DNA, 1000 bp, Homo Sapiens
ctaatttaattctttatcattcaagtagagagacaggcattttccaaagcaaacccaaccctcgtgattatttctagccagggtgaagctaaggaaggtagcagtaggtggtaggatcagcaccttggttccaggcatcacgccagtcattttatttccatcatcatccttgtgaagaaatggaagtctggagaggtgaaatgatgaaggcaatctggccacaaatcttccttctggatcctgctcttcagggcatgcatctcccatgctgaaggttaaaatgggggtcatttgccaacaaatttgggagtccgcttctccctgaaggctgccatgccctctagccggtcccgggttggaatattctgggcatagcacatcccttcaatggccatcccagatgcaatgtccacctccgttcctcggttaatggctactttgcccagccgcacggcaatgggggcctggggcaggatctcctgggccagtgctcgtgcccgctggtaggcggcgtccccctcctcgttctgggccacagcgtgattcaccagccccagtacgtgggcctcagttccactcagtcgtcggcccgtgaagatgagctccttcgccagggccacccccagacaacggggcagcctctgagtccctcctgcccccgggaggagccctcgcgtggtctcaatcagtcccatgactgccgaggaagcgatgtcattcatcaggccccggagtcgctggacaaacacccccacctctgcttcactcatctgttcccgctccttcaggtctgcacctgcacagaacgcgcccttcactccacttctgaagagcaggacacgcacttgccggtcctcccgcagctgggccagagtttccagcagctcactgacgaagacattccccaaggcattgcgggcagaaggtctgttcatcagaatctcagtgatcccttggtccggacccgccagggcgcgcacttggatctctgagcccccgg

SEQ ID NO: 159760 - DNA, 1000 bp, Homo Sapiens
gtgggtaacatcttgatttaatttacaaataaaaagccaaaaccctcaatgcaaaggaaaactgcagtttacacttattctggagatcatttttaaccacagaaaatgtgcccctgtagcatgtttttaaatggcaagtgctatgattgcccagacatccataaactgcttgtatggagtaagaaattcataaatgaagaaagatttgttttctgtcttgtttctcctaggtcacgaacaggatatttcccacaaaatgttttgacctgaaaggaagtatgattccagtacttctggtcttaactcttctgaattacactgcaagctgaacttcgggtaacttcagccacattttcttttatcaccattttccatgtagtttggcttaaagccctcttgctgtcgcctcagttcctcctgttctctgtgtcggatcatttcttcctcacgccgccgatgctcctcttcatgtcttagttgtatttgcttccgtttttgcaactcttggtttctgagttcttccaagcgtctgagttcttcttgacgcctcattagatcttgcctcattagcattaattggtgttcatgcctagctgcttccatttctgcctccagtttctctttggcttctctgatgtttctatcaacctgctcacgctgctgcttttccatttcatcaagagccttccatcgagatgcatactcaaattcaaatgtcccaggttgagcaaaacgtggtggttgttctctttccttatgatattgttgagttttctgcatcagcttctctggcaagccatcttcatcatcaaactgctccatgggttccacaatgactggacgaggggtcgttgttagcaagaatgccccatcaccacatctttccagagcctttcgtgcaggaggttttgctgcaaactctacaaaaccttttcctgtagctctaccgcgatcatccacaaccacaacagctttctctactggaccaaactgagaaaat

SEQ ID NO: 159761 - DNA, 1000 bp, Homo Sapiens
ggcaaatagctaattttatttttttcacatattaaaacccactaaaaataaccatttttctaactaaccacaataaaaattagtgagaagagtactgctgctttacatttctccaaatctcttcaatgtctgatgacagacgaaagctggaatcttgtatctgcttttgcattcagcctattacaatatcacaccagatagcctcttgaaaactcctctgcatactcatgaaaaaatgagtgaaaaagataaatgatggctgggcgttgtggctcatacctgtaatcccagcactttgggaggctgagatgggcagatcacttgagctcaggagttccagaccagcctggccaacatggtgaaaccccgtctccactaaaaatacaaaaattagccaggtgtggtggtgggtgcctataatcccagctactcgggaagctgaggtaggagaattgcttgaacccaggtggcggaggctgcaatgagctgagatcgtgccactgcactccaatgtgggcaacagagcaagactccttctcaaataaaaaaaaggaaaagctataaatagtgaaataatgtcttagtgttataaaaacagctttgacctagaatacccttgaaaggctcttgaggcccccccagaccacactttgacaaccactgctctagacgaatctcttcatatatatgaatctcttcatataaggaccctggacctcagaaagagtaagtgagaaactcaacatcacagcctattaatagcatgatacagatattagatggtttgtctcacttctcttggtttagattctcaattggaaacctgggaaatacaccctaatgacctgtcctattccctgtaagttgcaaaaattgtcacaatatattaccctctccccaacatttctttaataaaagaggtaatcaacaaatttggtaaattttgcaacagccatactctgtttgaacctaaactacaatatttgaattcaggtctcta

SEQ ID NO: 159762 - DNA, 1000 bp, Homo Sapiens
tttttttttttttttttttgtttctagtttagtttatttctagttcaaaaataatctgtaattgctgtaagaaatgtcaaccacttacctaggatgtttgacaattgggatgaagtctacatatactaagtaatggcaagacaattattttattgctcaaaagaaagtcaaaaaaaattccatattccctttggggaaaattggcaggatttcaagtatgacctttaagaatcaggaaaagactaacttatgctttaggattaaaacaatcaaataattaaattagttcaattttctaacatagtctctatcttcagttaaagtgcatcattgcatgttatacattactaaaattacacagtgcataattgttaccatgtgactatttaattcagggtcaactgtctaaaggtctcaggtgtcacattaaggttataatctagatgaattgaacaagaaagaaaagatttcttcattagccaatttgtttatgattcaattcctactcttgctaatgatttctttaccttcctatggaaaatataagattctagatctctgtataagatggtttgctttagcttgagatccatcagtgagaattatccatgggcaatgtccagaaatcacattattgctcatagaccttgtagccttgatataatggagaactgtacactgtcttccctaggaagctaggatggttgtttctgatattgggacctattgtacacttggccaaaccagtgcccaaatatgtcccaagatttttacctaagactttcctcagtatccactggtcgtctggaagaataaacttctgagtggtggcaactcatgatccctcctctgttggtacagaggtaaatgcatctttgttgcacaatttacaatctttttaaggaaaaaacatgattttgatcattgaactgcatgttcttgtaaacttttagtgttatgatgcaagatctaattattatcaaatatagtgacacttgtt

SEQ ID NO: 159763 - DNA, 1000 bp, Homo Sapiens
gcaaaaaaaatcttttattggcatgaaaataatgttgtaaatggcaccaaatattccacttaaatgcatatacagtattagagtcaaaaactattttatccctctttgctgtttttcccccttctgcccactttcctgggtgttgggggggcccgctgacaacagtcacaaatccagcgacctgatggaatagcaccaaggcccacacaaaaagtatgataacctctgtcacacatatcacagaacatcatttcttcttcatggtggggttgtccacatataatgcatgttttacattccatacactgccatgggtaggtcttaatcatagaaacaagctccattgtcatatccaggcaagaaggatggccactattctcacattgggagcagtgtataagtgattcagcctttcctttcttgttggactccttacccttcagacaaattccacatatagcatttggaatgacctttggcttgtacccaggaactgacttggacagtacagaacgtttgggaccatcttttcttggagtggcagctttgtcttttgatttctgtcttccctggaaagagtcctcctggctgtcaggagggctttccccttcagatacattgccagaggagctgtccgaagtgcctttatttttccgtttctcatcacctcgaccatcttcgccatcatctgaatcaccatcactgtctagagcagggagctcaggatccagagggggctcatacagggctgtgtttaatggcagataccgcagctcatctggtgagtacctcttataatattcctggaactgtccggggatgagagccactgggtaagaactgacctttgttcgctctgttggcaaaactttgtacttcccttgaggtacctggataacatgtgtctgcaagtcaaaataagctcttctttcttccatgcgttcccggtttaagttgctattaaattctgctgcttttttggcagctttcttaatatact

SEQ ID NO: 159764 - DNA, 1000 bp, Homo Sapiens
ttttttttttttttttttttccatggaaaaacatctggatttcatttggtagtttaaaggtttttgaaaatgttgatatacacaagctgtacttggagctggataacagacataggagctggatgacagacatacttttattcttttatttttgagatggagtttcactgtcacccaggctggagtgcaatggagcgatcttggctcactgcaatcctgcttgggtgacagagcgagactttgtctcaaaaaaaattcttttaattaaaaaaaaaaaaaaagctttactacttcctgtggagttcataaaaagttcttccctttgttttagtcatccagagtaaagtcatagggctcaaagtctttccggaagcggcgagccagggtctcctcgtcttccttgctgatctgacactgcctccagtcagacttatcaggaacattaaggatggcttcactggccaggacctcccttccaaactgcaaaggaaaattctttttaattctgtggaaaagcttttctcctgtgtcaagttcaacataaaaatatgctgctcctggctgtgcaatctgcttgatgtcagagtgctctgggatttccaacagctctatctgctgctcctgtgcctgggtaatgaaggcatctttaatgtcatcagtagtagagcagctgattgggacaggaatgacctgtagctggaggtgatggctcttataatttctctcaaatacaacacaccatttccctcgactcttaaagaaccgtctcagagtggccttatacttctccacctcttctaccacctctgctgaaagctccaccactgactggtagtgtccaataggcaggatgaggacatggtcatcagataagcctcctttggccagggcaaggtagcaatgtgtgccgatgttgaccaccaaatgtttttccacttcagggctagcaaggcaaaaccagcagggtcctggaggctgaggaggtttgcgaggctgcttt

SEQ ID NO: 159765 - DNA, 1000 bp, Homo Sapiens
acatgtctctgcctctgttttcagtgtggctttggacaggaatatatgaataaatcactgccatacaggttttccaatacacaagtgctagaaaatacacacaattccccaatgcgtaagttgtgctaatgtctttccaagttctgggttgggaagtggagggtggcagcgtttgtttgtgcgcaaccgtccagtcctgttcacagcgaggatttggagtcctccagggtctcatcatgggagtgatttgtcagcggacgcctctgccctgtctggcttcaggtccagggaagctttgaagcagtcaagccttgtctttgtaccccatgtgtcctgtctttgttgagtcactcagagatcactcctggacctctggggttggagttccagtgatggcttatggcggcccactcactatggtgggctgagtggaagctccttaaccatgtccccagagacactgaggtgctcgctcttttaatgtcctcgtttgttgccgtaagttctttgctaggtttcattttggcatttggcaaatcagcctggaagtctggccccatgacggcaatcactccctccccaccctcctgaagctagaggaagatttgctcagatccattaattaaagcaggaattggtgtgacaatgagctgcatggtttagggagtctttgggagccttggaagtcctgaaggacagacaatcttgtactaagaagtcacaggtgccctggctgcccttgctgcccctcggcctctttgacacaggggccccacctcctctgtagtgggttccatcgctggagctggagatcagcgttagctgtaaaatgagatggctgagcagatgtgccacctctgactatggttggaactgaacccttgcaatcacgtaagcctttagcagctctcaagcttgctctcagccctctcagccctcagagggaacacagccatggctataagcaagaggatgagtaaggcctgggcgctgcccagag

SEQ ID NO: 159766 - DNA, 1000 bp, Homo Sapiens
aatattttattatagtccacgtataaagataattttcatgagggttacatgatggatagctagcaaaagaaatatgctagcacagggtggtaactgccaactaagcatgcactgaaccaacagactacttcagtaagtccttgattattgccagcttttctataatgttcaggttctcaaaggtcactgaattttataattatctccaaacaattttcttcatggtcatttaagctttgtctaaacagctgggtgtgttgccaagcgacatcaccatctcctctgcttaattctgcttccaaaataacttcagtggcaccagaaaaatcagcataggagtgaagactgttatcgcctgtcagttctacttgtgctgtatcagatcgcaatttccattctactgttccagtctgaaaagtttgactacttgttctaatagaaatgctatctacttttaggccaactgacccacactcaaacttccaggaaatataagcaaaagatgatccttcctttcgggccaaatataccatgtgccagtctgtttcaacttttctgaatatagattccattttccacacgccattctcccatccagaaatggtttgattgttatttgaaactcgaacataacgatctttcacaatattgtaacaaaggtggagctgtttagaaatcttctcattttcacagggaataaacaaggtttcttttctctgtagacccatttcacctcgggctactctccaagccactgacccagatattcttcccccaagttctccaggtttaggggttttgggagatataaattcaacaagctccacaattatcctctggagaagttctttccttctgttttctgacaaaaacagttgcctctgcttattaagcccattaatagtgtctcgaagtaatgcttctttaaccttagttcttctggcaatcacctcttcatgtttgcaggaatatcgccaagtgacatcaactacctcatctt

SEQ ID NO: 159767 - DNA, 1000 bp, Homo Sapiens
ttttttttttttttttttttttttttttttcaacatttaattagttttttatttctgtgtatacgaagcagtctaagaaagaatgttatctctagagacaaatattgaggaccccagaaaaattataaagatttttaaaaatccttaggaataatccgttgtaattcatcctgagaaaataatactctttgcactttacccttcatactcagcatatcatctgtcctatatagtcttcaattatataatagaaaatgttttctaccagttctctccaaaagctgaaattacttttttcccctccctcagttagtttttcctcttcaactccaaacaaactggtgtctatacataaatcctagatccaagattccaattcaagaaagaccatccaggacccacaatttatatatattctagctaccactaatttctgtagtgctacctgtagcacatgatatgagagaagtcgcttggagatttgaccgttgctttttgttctttccaaactctatcaccaatattttcccatatagtttgtatccatttactagatgcaatgcttgccatgctatctccttattgggaaaggtgataaaggcctggcccctcattcgtccagtcatcattcggaattgaattggaggtccttttttctcctggaaccgagcgaacaatgacacaagatctctttcagtcacccgagggctaaggttcttcaggtataataccttgtttggttcccctggattatatgaagaaaacataggaatttttcggatctcttcctctgacaaacgatttctctggatttcatcttctgggacaaattctattggctgcgtcagcttcttaggcccagtccaacactgctcaggtgaaaaatcaataacatttgccacatggagactggggcctttaccctgtgctgcctgttttcccttgtcctggagtaatgatgggctctcagctgtgccactatcacccactgatgtagctg

SEQ ID NO: 159768 - DNA, 1000 bp, Homo Sapiens
tttttttttttttttttaaattacaacttacattaaaggcagattctttattggctgaatgtgctgtagtagatatttaaaatatcacaaacattcatgattgcagtttttaaacttagctcacagttgagttagatacaacagttaacatacttaggaaagacaattcttaacagctttatcaagcacatttgtgaaagattaaactttcatttccagttaccatgatgtccccccatacaccaaatgaaccaacacatttatttattttaaataatggaaactgtacatggctacactgtgctctaaaattacttgcattaatgaggacattaattttagcatttaaaaaaagagatttaaaaataaccatagaaaaacttgaaaaccctgacaagccgactacaaagagaattcctctctgaaaattttcagatgcgacggtatgagggagttgggtgggccgctgactctgagagaagtcccggtgacctgaacctattccagtgaagccagtcagcagtgaatgtggggcaagtgcatgcggctggtctacagctcccattgcctggtgaccaaggagcatcctgaagtttcagagaagagactgtgtgacagcagcattgttccagctactgagcaagatccttcagcaggtaagaagtggcagagacagtcacctgctgaaggagcgggcagggagttggccgtccacgcggagcctggcctttccgttaggggaccctgaagtctgcgaccgccccgccaacacctcagagtgtaacacagtgcccgttacacattcacactccatcacagataacacacagggcctcagggactgcaacacgtgcatgtgtagtgacgcacgacaaattaagagtgagtgagaatgaaagctcatgcttagccctgtgaaaaataaaaatcagatagcaaaacgcaaagttaaatcacagacacctggaccacaaataatctaccccagttgtaatatgta

SEQ ID NO: 159769 - DNA, 1000 bp, Homo Sapiens
gacacagggtctcactctgttgtccagactggagtggagtggtgtgatcttggctcactgcaaccttcacctccaggatgcacataattctcgtgctctagcttcctgagtagctggggctataggcacatgccaccacgcctggataatttttatttttatttttggtagagacggggtttcaccatgttggccaggctggtctcaaacgtctgacctcaagtgttttgcccgcctcagcctcccaaagtgctgggattacaggcgtgagccactgtgccaggcctttttttttttttttttttttttgaggcagggtctggctctgttgcccaggatggaatacagtggcacaatctcagctcactgcaacctctacctccggggcccaaaccatcctcccacctcagcctcacaagtagctgggactacaggcgcacaacatcacacctggctaatttttttgatttttggtagagacggagttttcatcatgttgcccaggctggtctcaaactcctgagctcaagtcatccacctgccttggcctcctaaagtcctgggattacaggcgtgagccatggtgcccggccctagcatttttttaatgatctcttatcccacaagaatggtcaagtcatttagcattaaatgaatagagtacacagtggtttacaatattataaacattataagcgccccataaaatattattgttataaatactcaactgctttattctcagtgattattccatttatttttacataatgtaaatgtagctagcaggtttaaaaaaaaaaacttttactagaagctgatatatatctcttaacgtcactacccatttaatttttttttttttttttttgagacagggtctcttgctctgtcacccaggctggagtggcagtgttgcaatctcggctcactgcaacctccgcctcccaggttcaagtaactgggaccacaggcgcgtgacaccacacccggccaattc

SEQ ID NO: 159770 - DNA, 1000 bp, Homo Sapiens
ttttttttttttttttttttttttctagaaacaaagaatcaggctttatttttgttattttgaatacaggtattgtattgtagacatctgttagtctcataattcagtatggccaacacacagaaattaaaagtagaaacaaaatgagggcacacttgctcctgtccttggcttggcccctccaacctccaaaagaactgtcctccccattgtcatatcctttccctgctacgaaagacaaaacaaaatgatgccccaaagaaaagtcccagaggctctctcccagcagtcagtgggatgaagcaagacactgttaccttgggtaggatggagaagccaccaggtccataccacagaggccacagtgggatggagaagccaccaggtccataccacggaggccacgtgtgccaccagtggagccaaaccctggccatggctggcaaaactcaccaccaggcgagaccagagcatattatctaccagtaatccccgaggtccaacgccattcaagtcaggcagccctgaggcaagcaggaggagccctgtcctctgggggtgctgcttccagaggaggcccaaggacagtctcttcagagaggggctcacccgggaaagggggttcctgaggaggcgtgcaaaggtcaagggacccacccttgccacctgtcccagggcttactgctgactccactgtcctgggagtgctggaatctccacaccacttaaaatgaaaaaggaaatcagaaataataaggcattagacgtttgattcttttatttccatatgcaatgtaatgtttaggcacgctgcttgggatgctacttctaaaaaaattgttggccatttttcagaatatccttttggttttaaatactggtcaggaaaaacaaatgatgtaaaaatacgtgaataattttctattacagaaatgaaaaactgatttgcatctaaaagtgcaagaggtgaagtaatttaaccctttcaccagacgatatg

SEQ ID NO: 159771 - DNA, 1000 bp, Homo Sapiens
ttttttttttttttttttaagtttgggagctctttttattacactgagaaatctcagaaacgtacaaagcccatgaaagtagatgcatttcagaaaataagataaaacatttgcatacatacatattaatgacattttagttttgaattaaaaatattcatgattttgcattgaagcatcctgcctgtgaattaagtacattctgaaatactgggaaaagatttcatatatcctgtacttgaacctaaattcctataaatggctgagttatattctctttctagagattaagttcacaatttgatttgtagactaatggttttattgattcaaagtatctttaaagagcagaaataggaaacaagcatacaccacacacacccctttagtttaagtgatatatcagatcaaagttgaattaatataataatctttagtgcttttaattgtattgtttgttttcagtagaccaatgaaaatacatagatccaactgcagaagaggttaggtaatgccggaatgattctctatcatatcggtgttttatttccaattatacagataaataagtgatgttgaaatccatgctatttctatcctcaaaataagataaatgtatggttacattctagcatctcatcaagagtcatcatgaaacaataatatatttactacttttgcaaaataatatataatagactcccacaggctataaagtttacttaattaattttggtaatgtggcactttacaatggcttttgggtcatatcatactctgttgctgctactactaataataataaaataacagtaaatgtaaagaagaaaccaaaagaaaataaattagatcacttgatagttctaaatattgttttggtttatccttgaactggaaatcaattctacatgatttggaaagaaaacaaacacatctttataattcagagtgtgtattttgaaggtgtaatatgatttatccaatgccagtgtgggtttgt

SEQ ID NO: 159772 - DNA, 1000 bp, Homo Sapiens
atcttaaatacaatcaaaacttcatgtttaatagggattcatctgtttcccatactttttacatgttcagttcagacagaactcatggaagaaaagacttttctgtgagatagaacagaccatctgcttgaccggatggctctgagggacagccaaactcccaatggccaaagggctgtgaggaagggcaacacgtatcagaagaattttcagcaagggctgaaacacagtaaggttagccacaaaatggaatgagagaagccctaacccaatgggagtttgcctaattttaatgaacccaaactctaacattgtactggaaaagcagcattaaaatccagcctgattatcacaatttacagaatttctcaccagaggcccacaggtgaaaaggctgcttactctaaagcccttagaaccgtattgtgaactgcgcatgcgagggatctaggttgcgtgctccttatgagactctaatgcctgatgatctgaggtggaagtttcatcctccaccaccaccccgtccatggaaaaactgtgttccacaaaactggtccctggtgccaaaaaggttagggactgctgctttagaatataagaaacaactcaagcagccaacgggtctggagttaacacttccagccctcccctttgtacacactcaacacttcttgctgaactggccgttaataaccacttgtgaaatccctccccacacctgcacttaggcgtttgtctcttcctaccttcctttactgagtagtggcaaaataataggagagtggaagatggtgatgggcaatgaagagggacctatttctgaagaggagatgttttaaagatattttatttttcaataccagtaatgactgaaaattaaagaattaaagcaggaagcaaaacaaaaacaaacaagaaacccaaaacttgcaacctaaactctccgggaaaaaaaaaattgctataaatgttaaaagacttaaagagaacattgacaatg

SEQ ID NO: 159773 - DNA, 1000 bp, Homo Sapiens
cttaagacaatgatttttattacctttagtctaccacatttgtcactataaatatacttattgaaaaaaaaccatactatttaaataagaattcagttcatgaaagtttacaaaatacaaccaatgtactctgacttgtggttatatcttaactatctcaactgtacttttctggtatggccagaccttttgcaaatattaccatggtattttaattttatgatataaaacagtagcaatttattaagttttccattataaaaattaatatggcaattctcaaaatactgaaaaaactgttttatgaaagcagtacccacatcactgcaacgtatttcctttctcttagaaaacatcttcaaaaggcacattttaattactagtgtttatatctaaagatagtagtttgagttttgaatttccagtcaattttccattatctcaaaattgagctaatggagggttggaagaggtaggagaacgcaggtttccaatgaactccctcagggcagcagaatcctcattcatctcgtccatgaggaccaaaaggaagatataagggaaaaaggaatggcagatctgttttgcatcctaatttaaccttctacacaaaatacttcattaaaagcaaataaacaaacacaagatagtaagcttagaaaacaaaaggcctagaccacaaattacccagttaagcccaagtggtgacattggttttaagcctcaagaaaatgaaacttctgcttctgtaaaatcacatcttcatcaattgaatttaaatcacttagtgcattaacaatgttacaaattccaataatgtcagacatatggatgatattcaaaataaagtacaaaaatacatttcaaaatcaaatataaatgactttatggttatctgccatgctcccctttaatttggcctgatagtctacatttgactgtaattataataacatctgtaatttcaagtacaatagtacaatcataataattttgaaga

SEQ ID NO: 159774 - DNA, 1000 bp, Homo Sapiens
tttttttttttttttttttgagataattgaaaagttttattataaacaacataagcaaaaaattcaatgcagtgggggcagaagtgtgtggatgacctgccaaacaataagtattcaaagtgttgagtgagggaggtgaggttgcaactatctttctctagaaaagaagagaactgggtattcatcaaattggttaaattgaggttcgtcaaagagtttctacagatacagctgaatatactaaacattgctctattatctgttgaattgctgtatttcactttttcagcatttggggatcattatttaattgaatttgtagagatcgattttccagacaggtctctgttcttcaatgaacaaatgataagaaacaatttgactccttatatgacaatggaattaaataaattgacactcatctaggaataattctacaatcatctccatctctaagattacctactgcaaacaaagaattgatctttctttctcaaaaaccacatgggtaagatgatcattgtgactctgaatgcaagaataagtgagtggaagctacaaggggagattatctgccaacatagaaagaatctagaagaaaagattttattacaggtaacatgacatagcttggagccatctttttggtctcttgcatacattttctctgcatgtctaaggaagaattcacaaggtagcaagcaccaatactttctgctttggagtttcacaaattgaaaatttgtccctctcttgttaagtcaatcaaacatctaccaatggccaatggtggtccttagttacgagtgcctgagagacagaaactagagcactcgactatgctaaataagtaagtatggggcaaggttgccagagaatatgcagaaaatacaaacagattttcattaagtttaatcttccgcgaacagacgtaacaaaataaaggaagcaatctgtaacgctgtcatgattaattcaagtatcccatccttactctcca

SEQ ID NO: 159775 - DNA, 1000 bp, Homo Sapiens
ttttttttttttttttttttaaaatgagtatatatttgtctaataagcagaaaaatacaaataaaaacaaatcattagtagagcgtttctcataattactttaaaatgtcttagcataatgaatggtgcatacgctacaatttatccatccttatttatttattgagtcggggtctcgctctgttacccaggctggagtgcagtggcgccatttcagctcacagcagcctctacccaggctcaagcgatcctcctacctcagcctcccgagtagctgggactacaggcgtgcgccaccaggcccggctatatttttttctatttttggtagagacggggtttcatcatgttggccaggctggtcccgaacgcctgagctcaaccgatccgcccgcctcagcctcccaacgtgctgggattataggcatgagccaccacgcccggcctatccatccttattcatattatgtaggaatcagagctctccataatgtccactattataaatgaacagcataattcccttggtcataacttccattccaaattcttgctcagctctcggccccgtgtgacacctgggggtaagaaccaactacgtatgcgctcagaaactcacctggggtctcctggctgccgtgactgagtaccaggggcctaggcagagggagcaaccgagagaagagaaggcaagaccaggcccagccccttcatcggccctcgccagatcactctctctcaaggggtcaggattcagactttcgtgtttctctccaaatctgaagtttacaaaagtagccgagctgctcatcagggatatgcaagtctgctttctgcagcagagaacagaagtgaaagggagaagggatgagcaagaaagtctctggatttcaggagaaggaagacagccccaagggcaggagaaacacttgtgaagggtccattgaagagacagagagggggcagctctggcctctctgctgccacttccctcattcga

SEQ ID NO: 159776 - DNA, 1000 bp, Homo Sapiens
tttttttttttttttttccgggtctacacacagtgactttattactctatggatgctggtgaactgccctccccaaccagcttcacgggggcaggcatctctgtccatcccatgcctttgggtcacagggggcagcaagaccaagaagaccacagccaggccctgggttcagcttcagagccatcacccgctgcctcccccaacccccaatctcctgagggaggagaattcctagggacaagacccagacccctttccttcagcctctgcttcaccaagggggcctggcctgcgcccgagctcctcctggcctgcccctcaggggtcccaggtcctcacctctgctcttcaggcaggaaaagggcagggagagaggaatggaggagggagagggaggctgggccgcaggagagagaagaggggggaaggaggagacattagggagaggccccttcacacagagagagaggccgagaaatcagggagaaggggggggctgaggtgagacctgagaaggaaagtgaaatttgggggaaaaggagttggaaaggaataggaaggcgttgggaagttcagacaagggaggcgcaggtggaggaggacgatgggagggaaggaggagaggaagaggccaagtggcgctgggagagagcaggtaccgcccgggggcagcaccaagggcgggagatggcgctggccgggaggcggctaacccaagggccagggcgggaaggggcctccaccatccgggcccggagctaccgccccctgcgcgctggccgctgcccggccgtggatgcgctggtggcgcagcacgtgctcgcggcgcccgaagcccttgccacactcccagcaggcaaagggccgcgctcccgagtgcgtcttgcggtggcgcaccaggtgctcgcgccagtagaaggtcttgccacactcgcagcacgcgtggggcttctcacgggcgggcagagggcgcagcgcgggcccggggctgccggggctg

SEQ ID NO: 159777 - DNA, 1000 bp, Homo Sapiens
gagacagagtcttgctctgttgcccaggctggagtgcagtggcatgatcttggctcactgcaacctctgcctcctgagttccagcgatctcctgcctcagcctcccgagtagctgggattacaggtgtgcaccagcatgcctggctaatttttgtatttttagtagagatggagtttcaccatgttggccaggctgttctcaaactcctgatctcaggtgatctgcccgtctcagcctcccaaagtgctgggattacaggcgtaagccactgcgcctggcccaatgtgtggttgttattagctatgccctttaccgaactccttttcttgacctcctatacctacacctgttgtaaagaaacaaatacaaaacaggatttcagcaaaacactaaaagaagagcgttctagttttttaaaaaatttaattttcttgtggcacataacaatgaactctggtgtcaccagcctattgtataattaacttctcgtcttttgttccttatgaatttacatatttaattatctttccatttaatttcccatggttttgctacgttgactaaactctgtaatgagaaagtcttttaatttaatagactttgcaggtcatgtgtaaccagctttggaaatcattttaggattactgagtgctgtttcataatgctgtatatttttcctgccaggatttggagtacctaggttatttgtccaccagaacaatggctgtaaaggagaaaattgagcagtggtcagaagctgctgagaagatgcggtaaaacaggttacataaaaaacaatgctggtttgaaataacctatgcgcttttgtcaagggatttcgcattagtgcatttagtccaagtcagggccaattcagaggatgtggctgaaggcaccgttttggccttttttgtttcttttgagagctctgcatacattcccacttttcctgtcaaagtggacaaaatggagagtctcatgagtggaggggcattctga

SEQ ID NO: 159778 - DNA, 1000 bp, Homo Sapiens
tttttgaatacgcaagtatttattacgcccttgaaccaatggctttgacatgttgtaaacaggaacactgaaagaccctcatcttgacccaggccatagaccaccaggtcatgaggatccctctttttttgaaaacccaggccagacatgcttgatcccttgcacagggaggccctctggtccctctggaatgaagcattcatggaaggcccatctttctgggttttccagtctggttagtgggcagttgttcacccgcagaacacaggggtctgtgcacacttgagtcttgggcctgaggactgaccatgccaggggacttccattccagggagaccccttcagggtaaggagagctgagcatttgcttgcatctcgctgtcagctggaatgagcgcagctgggaggttgcaaagagcccatggctgggttttggcactggctttgtaataactctagggcgaacactggcagcatctttgaagggctagaaagaaggtggaatgttaaccatcagctgtgaagggagtacccctgatttgtgctatttcttcttcaactgtctcaggagtgttctgttaatatgactggaatatctgccttgcacggaatgggcatggacgtggctcactggcatcttgggagggatgaggcccgagtgtgctctgctctctgtccccaagtgaaactttaggcctttcctccatggcccccagccctcctgcactctcttctcatcttcaaaggctctgaagcaccaatgtccttgtgtcctcccttctagatgaggtgcaccaggagggtagagcaggctgagcccagtgttaagcccaagcacacataaaaggacatcaccactcccgtggcctcagccagctccctgggcacaatcttaggcccgtagaggagggccagggtgctgaggtagccgttgctgagccccagcagggagctgaggagtgcggggtacacatcggactggaagaccacagtcttcagg

SEQ ID NO: 159779 - DNA, 1000 bp, Homo Sapiens
gcggtttccaaacttttgtatttttagcagcagaagccatcctccaaacaaaaccgtatgcaaaacctcagctacaaaacagatcagtgggctgcttgcccgtgtggggcatgggctgggccccgagctctccctccagcacccagtacttcttccacaaggccctatgtgagctcagtttaaaaccccagggccttggcaggggtcaggtgggcgggagcagggggtggaccttgtagcactggagctaaagcagccagataaggtgggctagttcttaagacctctggagggtgtggctagtctctgagacctggacaacttcattctccaccagggcctggcccccatccccattgagctgtctcatgcgcaggttaatggagccgtaggtcttcctggagcccttgccggggacgaaggtcctccggcggtacagctcgcccttgcacagggagaccatgagcagcaccgacaagagcatgccgcccaccgtgagcagcccgaggcctgcgatgatgcacctgtccaggtgggagcctaggcgggcgtagtacatctccagtcgttccatctcccgcgctgtcactgtgtccggattgactcgagcctcacgggggatggcgtatgctgtcaccaccagaagaatcccactcaccaggaaaacgagggcggaaacaaagccataatccaccgggcggctcacgggctccagggctggcccctcctctgaatgaagggacagatcatcccgctgggatcggggcagtgaggagacacccccagggggactgggtgagctgcccagtctcgtgttcccagggttctggaaatgggtctcatgctcctctgaggagaagcaggcattctccacaccctccctggttggggccactgggcccaggggagctgatctccttggggcttggggaccattgctcagtgtcttcagttccagaccagggggagatgccattgggaaggagggccccagctcatc

SEQ ID NO: 159780 - DNA, 1000 bp, Homo Sapiens
ttttttttttttttttttgggtgttttattatttatttacttgacaggtaacatcgatttggtcctacaagacaccatgctataggcttagctacttgctgttgcacaagagaactttcctgaactctcaggaagcccttgcatggcctatcgaggacagctcagtcactgaagggaaaaattccataccaaagaagagagaaaaattccataccaaagaacagacttcccccagggaacctccgtcctacagcccttcagggccatcacactcacacacatcagccatcatcaaaatagtggccatgctgggaagaacaggagtcctgaactagaaggtggtcttcaaaccatggcgtaccgatttatgtatattacagatagataaattaagaggtctacatgaataaaaaatctctcaaaggggaacgaattccattctgtcatgccaggtgtttgtcagaaccttgaaaacgaaggtggttttcagtggagcttgtattaaaaatagaaggtatttatacacaggccctgctcctctcatggccatgaaatcctctggtgttgtcaggacccctgggcaacctcagcacccctacgggtagcccatctgcagtctgcatcttccgggagagcaggggactcgtaccggggcttttctcctgggtccccatctcggcttggcgacgcctccggacccaggggctgccagagggagtgacgctgctgtcagaggaataatccatacacttgcggaagatctcagggctggtgctgcagttcagtctaccttcctccgccagtggggactttctggaaacgcctttgcgttgggccaaggggctgctccaaggacttgtgcacggggaggcatttggactcagaaagagattctggtggccagacgggctgagcttgttggtggccgcgtgccgtcggcccgccataggggatgtggggttgctctcggggtcagaggagctgttggcagaagactcat

SEQ ID NO: 159781 - DNA, 1000 bp, Homo Sapiens
aaatggtcaaactagaaccaggatttaatgtgaaaaattaaactgattctttattcacaaatttataataccactctactgcagtctttgactccaagatattttaaatcatatttggtcgctgaggaagacataagttatagtatgcatccttgttccaaaaatctgggcccttccatccgcaccagcccttttccaaaataacttgcaggtcttcagcaccggtataatgtggatctagaatcagaaactttatctgccctgtaatctcattccatgcaactcctagtattgtgtgggccaaaactcctcccccgatcataactggagttccttcactttggaaatgattagccagttcccgtccttgagaggcaatttctgaaccttggctgacaaacaggatttttgacgttataccgatcaattggtttagtaccagctgcacctcaatagatccaatccattgccgcgatccgacaaatgttgctggtttgtccccggcatcgactagagcctgctgaatttctctgtgtgttggaatggacctctctgtgtatccctgatgtttgaaccaagagcagatagtctgcagagatcgataagcacagccccagccattgtcatctatgcgatcctgcatataatgatgatagccatatatgccctggaccacataaatcataccagtctccatgttaggtggattaaggtaagtatgtggatttctaatgtaaccatctttgtatggctcatctggaaagtgataagcattagaccttttgaaatagggtctgtcgtgaggcagattgaaaagaccatgtaactccttcctataggcctgcagctggccatctggtattcctgaaggatatgaaattgttacaagattttttttccctggtaataaaaagtgcagtggttcagggaccacaatagatgttcctttcatatatttcaaaatacatttttccatgtcagttagttgattatgaattgc

SEQ ID NO: 159782 - DNA, 1000 bp, Homo Sapiens
cagaaggaaatcatttccaataaaactcaaaatttctattaacatttaaattataaaccaaacattggcaacccacatatatatatacacacacacacacatatgtttgctatggacaaatgaagactgtgaggtcatactttcaaatacaactttggaattagtcacaaaaaatcaacatatattctcagaaattgtaccatttcctttggtctacaatccacgctataggaggtttaatataatattaaataatgtaccatttaccctaaaagtaggttctagaaaactgactattaggattgaataacaaggctttaatggctcaattttcttatgattatacaaacatataaatcttgaaaaggtaacgccatttagtaaaatccataaaaataacagttttgccacagtgcagagaaaagttcattcagtttgattccccatgccctcgacaagcagctttctgattagagctggaagacacaggctgggtgcagtggcgaccccgtagtcccagctactggggaggctgaggtggaaggatcacttgagcccaggagtttccgaacagtctgggcaacataccaagaccctgtctctttttttaaacttggaagacataaagtctatacattctacactgaatcatgaatatactacggagagtttgtagaaagtaaactttaaaatcccacactccaacatcatatatgtccataagcaggatttgcaattcacttcatactggaggtaagcaccccagctggggtcctcttgccgcagtggtcaggccgtcagagctgaggcctttcactgcaacaagggaagtagtcttcggtccgaaacaggacgggggcttcgtagccggcttgctgtggcctcgagggagcagacttgctaaagagcgagggcacgttcatcgtgtgcaggagcttcttgaacgccctggggaaggtgcccagctcggcctcggccttggtgacctgctcctccatcc

SEQ ID NO: 159783 - DNA, 1000 bp, Homo Sapiens
tttttttttttttttttttcttttacatccttatattttcttttcttttctttttttttgagacggagtctcgctctgccaccatgcccggcctcacaaagtattttctaaaatataatttgctatagagttcacagatgagcacttttcacattaggtgatatgcaaacaaatcactattggctcagcaggaaacagactttttgtacactctagttaacatgaagttttccaataaaacaaatgacagcgggagggggtagtgaggaattcaactctgtaatgtccacctagaatccaagtaggaaaaaaataaagctattgaaataatttagtaatatcctataggtcaccagtgatttccataaaatgctgcacagatacaaagtcttgagtatgttacttagtagctaaaaagagagccttgtgtgaggcacagctgacttggaacattaaagagcctggcttccctttctgctttccattctcccaacagaaaaaaaggtcttcaaagaattggccagtcttacagctcaccttggggtgtagatgactctccactgtggtgctaggcaattttattgaacaggtggccactggtggtgatggctgaaccactcattaaacaaattgctctaaatggcctcagtatcaaggtgtgctttctgtacccttaatctgactttaatcctgcagaacctcagtcttaccatgtttaacagcattgccatgtacgatatgcctttatcctacactgtatatatactctttatgcagaagtatatctaactgaaaagtataaaaatataatggtggaaaacaaatgaattaaaaaatgtatcacggccgatagcccaggtaactgcaggtgaaatgtagccagaagtcagaatcttggggcaaaatcaagtatagtcttatgggctgtgccttcaaatggtttagttctataccctcttaaggcagaatcaaagttctcttaatgttttggcaagtgttt

SEQ ID NO: 159784 - DNA, 1000 bp, Homo Sapiens
acagactatttgtttattatgaaactaactggtaaagcagagtaaatcccattctatattatagcactacaaacatccttagtcattccttcatttgttcattcattcattcatgcattcagtgagtatttcttaagctcctacagtgtaccaggaggcactctgttcattgtggcattacaaagataaagattaaggcacgtactctgccctcaaggagctcccaatctaattgtgcagagagatgtgaaaatgaagcatgaaactccatcgtgaggagcgccgagaacaaaagtctgctcgaagtgaggcagaagtatggattcattccaccacaggtcccatgggaaaggtatgtggcatttctcctcctcttcagaataatgaatgcttgacatagctttcatcactgcctttcagttccagtgttacaagggggatccccagcactacagtgagtcgcagtgaacccagaaatgattagcattctctttattcatttatttatttatttatttttgagacagggtctcactctgttgcccagactggagtgcattggcatggctcactgcagcctccacctcctgggctcaggtgattctcccacctcagcctcccaagtaactaggactacaggcacaccaccgcacttggctaatttttgtatttttgttgtagagatgggattttgccatgtttcccagtctggtctcgaagtcccaggctcaagcaatcctcctgcctaggcctcccaaagtgctgggaatacaggtgtgagccaccacagccagccagcattcttaatgttttcttacaaaggtgtatctctgtcaaactcttccattcacttaaagaaaaccatttatgatgcgtcttaaagaaagcatgcttacatttgccttttattgccagatttctctacttggctttattaaagggcccaaatggcagcggtaggggtgtcggacatgttctaataacatatgctaaacacata

SEQ ID NO: 159785 - DNA, 1000 bp, Homo Sapiens
ttcatatccacaaatcatattttattagctgtgcaataccaccttccattcatggcctgtgttttaattaaatttcataaactaccagtacaaatcaatacaatgcattttttaacacaccaacagcttgaatgttcttgaagcttttaaacaatgagtttactgtgagcaaacagaagcaaggactcaaagagataattagctcatgcatctggtgctggctaataattttcacatgaatgaagaaaccactctatgttaactgtatttatttttaaaaaatagtttgaaatggtaataaaatgcaattttcagaagcatcttggtgattgagtagaactgcttaatttaaaaaataattcagttacttccacctggcctggggtggataacatgtagcaaaaacttccatcccactagattctggcagatggattgatctttcacaatatatatatatatatatatatttttctccatttcttcttatggaagccagaagccaggaggagcaccctgttttgaaaagagattgtttggttcacacggtatactttggtttatttaaacaggtaagaaagcggtccctacttctgaggagaaaatgtggtttctgacttttaggtacatcacgatatcaccagtctgaatgagtttccttttctgtaaagcagaaagtgtcattttcttttcctccagtgttcagttgctcctcttcgaaaatactcttcagagaaagtatctgtacgtctgtattagtacaaaccattccttccctatgtctcaatgcctgacattcagtgcctgacagaatcagcatttggcatgtccttggatatggcatcaatttgatgctttgaactgaaagttctcataatgcatctcaaagtatcttcttaaaaaatataaaaatgtaggccaacttgtgctctcttgtaaggcttgcaaagtggtaattaaataagcagactataactcacaagggaaaaaaagtgcattt

SEQ ID NO: 159786 - DNA, 1000 bp, Homo Sapiens
ttttttttgacactacaatctgctatttatttgacaaagtcagtttccagagagaatctaggcaaccatatagttttgaaggactagatgaaacctcaagtctcacaccagtcagctgttaacatccaatcaaggaagtcatttggactttccatactataccttctcttggtagtaaaattgtatgcaattgttgccaatgactacatacaactgtatcctatttgtgctactttcctcactgtggccagcagagggctcacaagctttatttccacagctgctgatccagtgacaaattcatgaaggaaataaatcataggcatgctagcttatgcgtcatagaaaacgtttttacaaactactacgtccactgccctgaagaaactagtcttggttcccccttagtgtaatgtgttttgaaatggtatagaaagtaaaaataaattaataatacaatattatacacttatttgacaagacagggtttacaaaaattttggcaaatatgaaaaaaaaattatcctagtctgttaaacacttttgctatctcaattgtttaaattaccagattagtgattgtgtcaatttacacatgaggaggtggtattttaagggctcaacaaagcggcatttgacacaaaggtaatttctttgaagggggataaagaataaagatattattatcttcattattacagttcgagaagtggttgtcctgataagaattcatcccacacaaatattaacaccagcagtaagcagcaaattgtggcgaggagaggctagagggaaaagttagaagaaaagcaaagaaaagacgaagagacaagagacatgattccaataagctttaaatcaataggcaaacacttctcatttatgatccatcttgctacaggtggttatgtgagaagacacagtgtcgccaaagctgacctagtatttaggtccctagagggattgctgatctgctaagagaaataattaaaaaaaaaaa

SEQ ID NO: 159787 - DNA, 1000 bp, Homo Sapiens
ttttttttttttttttataagtataatgtagaggtttattgtttaaatgaattcactctcaaaatgtgatctgtcaagtccagtagagcttcaaggtaaaatgaaaatttttaaatgtgatctggttatctgcttactgagatactatgtttctaaagttaaagcccaaaataatgaaaatttttccactagaatctcagggaaaaaaagtctaatcttgatatgggtttggtctctggatccggttttagcttcatgaaatttgattacagtttctctctctttaagctataccagttgggggtgagtgaagaaatacccataacctaaagcaatcttgagcctcctaatagcatgtttatggtggagcgctgattaaataagctgtaatttcaaagttaaaaaaaaaatagtctctagattctaacactgaaaagcagtgtatatggctgacattttctcactccacagaaatcaattagcttttgctgttttttacattcatagagaaccagttaaattttcatatcctgttaaactatatcagtatgccttttctaagcaaccattgaaacttccagcaccagcggccaggtactgtggctcagatctgcaatcccagcactttgggaggccacagcaggtggaccgcttgagcccaggagtttgaaaccagcatagacaaagtggtgaaactccatctctacaaaaaacacacacacaaaaaattagctgggcatggtggcatatgcctgtagtcctagctactagggaggctgaggcagggtcaaagctgaagtgagccgtgattgcaccactgcactcctggctgggtgacagagcaagactctgtcaaaaaaggaaaagaaaaaaagaaacttccagcaccactaaatttgccaaataaatttgactgatgccaaaactgaagctgccaatgtaatgaaatgttaaggtggccataggacagtccttttaataaaagcttccatgtaaaacc

SEQ ID NO: 159788 - DNA, 1000 bp, Homo Sapiens
aatgtggagaaatttttattactttgaatgttttagaatgcaggtagaagagacccggagctcaaatagcttaaataagtaggaaatctattggctaatacaactggaaatgcggagatagggcaggctgcagggctggtggctcagggctcagggggccccaactctctgtgctgctctgaggcactgccttcaatctcaggttggcagcacaaagctgctgagagtcccagtgtcacgcccagaccccacaatgccagggaggaagacaggttctatctaaggagagatcttccatccccacctctgcggacttttactcacttctcagggacctgcatgggatctcaggcccattcctgaagcagttgttggcagacagagtggaatagtgtttacagcaggcaggcagccttggagtggaggcacacagctccaagtctatcaggaagaaggggaaatgggagctgcacagacagcaagcagcatgctccatagaccacgaggatctgagtctgaattggtgattattagaacaatgactccatggggtgatacattagaagtgctccagggtccagagatttaaatgtaatgaaagatgaacagaaaaataatgaaaaaaagtatgctgcacaacaatagaaaaacaaaaatctcataatgcaaaagcatcaagtgtttgactctgaggagcgccttgtatgcccagttactctcgttctccctcagctcttgcttgtgcttctccacctgccattccactttggcctggtactgcctgtagtcttcctggcaggccccagctccagttctttggagcagctgggcatccaagaagaggtcattgctgtggaaggagccctctcgctccctccccagcctctcaatcacagccaggagctctgcctgctgctgcctctgctcctccacagagccccagttgttgaaggcacagtaccttctctcacactcccgcaccaggtctttcaggctgcag

SEQ ID NO: 159789 - DNA, 1000 bp, Homo Sapiens
cctttttttttttttttttataaagaaaagaggtttaattggctcacggtccagtagatggtacaggaagcacagcagcttttgcttctagggaggcctcaggaaacttacaatcatgttagaaggcgaaggagaagcaggcacatcttatatggccagagcaggagggagacagaggggaggcaccacacactttgaagcaaccagatgtgatgaggactcaatatcaggagaacagcactgagcgggtggtgctaaaccgtttgtgaggactctgccccataatcccatcgcctcccaccagggggcttacatttcaacatgagactcggtgaggacacagatccaaaccacatcaatagtgctttcatgcttttgattatcttttgtaactatgttattgaactataatttacataccatacaattcaccaacgtaaagtgtgtaattcaatggtcttaagcatattcagagttgtgtgaccatcgctacagtcaattttaggacatttttatcactgcaaaagaaagacctcaatcttcccattcctcccatcccgaagcaaccactaatctacttcctctatatggagatttgcttattctggacattttaaataagtggaataaccagtgaagatgggggctaggtagtaaataccgcagcttccctgtcacccggtggttacattctacatgttccttagtggacgtgagcccccgctgtacactaactgaacccaagtcccttgtttagagtcggaggaacccaactaggacactcagaatggggaatttctctttcaccttcgtcccaaatgtgtctcgtgaaccatcccttgcaaattttttttcttgtgatgcagtctcactctgtcgcccaggctggagtgcagcggcgcaatctccattcactgcaaactctgcctccctggttcaagtgattctcctgcctcagcctcccgagtagctgggattacaggtgcgcgccaccacgcct

SEQ ID NO: 159790 - DNA, 1000 bp, Homo Sapiens
caaaggcaaataaaataagtttattgggatgtaaccccatcataaattgaggagcatccatacgggcaagctataaaatctggaaaatttaaatcaaattaaattctgcttttaaaaaggtgccttaagttaaccaagcattttgataacacattcaaatttaatatataaaaatagatgtatcctggaagatataatgaagaacataccatgtgtataaattcagaatacgctttttacacaaagaactacaaaaagttacaaagacagccttcaggaaccacacttaggaaaagtgagccgagcagccttcacgcaaagcctccttcaaagaagtctcacaaagactccagaaccagccgagtccgtcctcggggctccgtgtactttcaacacaccgtggacaggggaggaaatgggttctgcttgctgaccaccagcttctgatgctgatgcgatatgtagcctttgacgtgtcccatgtatatcaagttagccagaatacactgaacttcgtcaatgtccacgtcctccacctgcatgaacttcaaggcaaccagaaaagcatccagagacagctggtgtgttttcagtaacaaatacactttcttaaagaggttcctgtaggtgatgatcttcagcttctccagggtgaggaagattccgcagcgaatgaagaaggcctcgtgcttcgccagcgcctcgtgcagcagcagcaggttgccctcgctcacagctctggttacttccgcaaactgcatcaggtgatactttttcaggagctccacagtgggcatgtgacccaatagcatttttactggaagcaaatagatcagaatcatccttttgttcttctgactagaacggtgacaatgctcaaaggcaaatgacaggtactcctcagcttgcttaaaatcgctgtcaaacatagccttgcgtccaacgtagtatttgtatgttactctctgtgcagtgctgtaatcgtctttcaggtttgagc

SEQ ID NO: 159791 - DNA, 1000 bp, Homo Sapiens
ttttttttttttttttcaaacccatattttattggctttattacacacttcaatatttacaaagttaaagttaaatgaaaagtctctattgtattaaaaaaaataactacagcccaaattaaagtgccctggggcaaatacatatcaatcaactaagaatcagtgactgcatcaggaaccaggcagtactctgtgttacaacaaagcagtttatttgtgatcagtgtttgagactctatacatccttcacaaatttaattttacataatctgatacgtctcttaaaacttaaactttgaactgctagacttttatttccctagaacagaagggctggtataagttattttccagaaatgaggtaccgttttcacagaactggtttcttttttttttcaagttttagagaactaaatttgcatttgttaaaatcaaaaagtaggaaagatgttctttacaaataattttgatcaagtatgtgttcaaagaaagcaggataaaaaggctttttctctaacattctgtgttgtactgtattgttgttcaataggaattagcttctgtcatttgctaaaagaatgagtagtggggaacaggatatgttggaaatttcataacgggtaacagaaccattctcttgggtaaaccataggcaggggcagctgtgctgtaaccatatggtgttccatagcctggagctatgtagccaggagcagctgtcgccccaacaaaagctccccttgttagagttcctcttcctctgccccgaacagcttggactgctgcagacacagctgtattcacaacgccctttgcctgagggataatcttctttttcttattatttgccgcattgggtccagaaaacagtttctccaaggcagctaaagctgcactcgcctttgccactttcttatttggacctgcgcctctgaatttctgtccatctacttctacctccattacaaagcgcttgtcatggcttccaccagtctctgag

SEQ ID NO: 159792 - DNA, 1000 bp, Homo Sapiens
ttttttttttttttttttttttttttttttttttttttttttttcttatggattctttattgaatcacaaacaactcagggcatcaggccccagcagctgcattagaacccatctgggattgtgaggggactggagagggaggggggagaagacccgctctccctagcttttcactatatagagtaaaaacatcagaaatcaccccaagagaaaggacataccaaatgcccaccagaagggccagggactgcaagccaccctgagcgcaggagggtgtggtgaagggtggtatggccccgaaatttgtgtgtgtcccccactccccctgcaaattcacattggaattctcacccccaaggtgacagtattaggaggtggggcctttggagctgattgggtcatgggggcggaaccctcatgaacagggttggagtccttataaaagaggcaggaaggagcttgcttgtttgtgcttctaccattgaggatacagcgagaaggcaccatctatggatcgggaaacagccctcagcggagtccgaatctgctggcctcttgatcttgggcgtcccagccccccaggactgtgagcaatacgtttctgttgtttgtaagccacccggcctacggcattttgatataggagctcgctggactaacagtggggccaagcaggctctgtcagccacaacctcagggaagaatgtaaaggttggtgtcttaccatcacaaggcaagcggctcagaaccagctgtaacacctcccttgcagagatctaggggcgccagacacagctggggtggaaggctcctagtctggacccttgctccatcagccccacctggggaggaaggcttctggggaggtagaactgggagaagagagaagcagctccttggctctgctttcagaaggctgttacctgggccaggtgctgggagaccagagggacaggtgccactcagggccagaggagccacgcaggacaatgtgatgtt

SEQ ID NO: 159793 - DNA, 1000 bp, Homo Sapiens
tttttttttttttttttggttctaagatatatttagtgtaataatctctcaaataaaaaacttcatcttaaatgaatagacagatattagagcaatgtggtaacgactaccctccaagttgagaaaatgaagatcatcaggtaaagttcttgctttcagggacgtctcagagaattctaccatgaagtcttcatctcttgagttcaaagaaaaggtagaaacagggctcaatgtagagatgttttcttctggtgatgtcacctgcaagaagtcaatctgcatacacgtgctaggtaactctggtgtctctgtcataaagttttcatactcagtgctatctggaaactgaccgcatcctagctgtgagctgtgtcctctgaccattacaccactagtagctgatccttttacttgatgtccttgaaactcaacaggcttagggtcacaggtttttctctctatttgtttaggaataacagcttgaaaagcagtctcttctttacttcccgaggaagagaactgcacagactgaagtggttcacttagttcaacttcatcttcttttagtatctgttgagaatccttgtgcagatgaggagactttggtgaaactactgtaataaatggtttcctcacttcaggagggctatctggctcatacgtctgttgagttccttgctgaaagacagtatttttctttttcaatatttccaagctgtctaaagcagtactgtgttcacatagcgactttaaaatagaaatggtatttactaatccagaaagttctgaagaatttctaggattccagtattgtttgccttctctggcagtttcaacctcaacatggtcagggggtggacttctaatctttcccaaatcttcaggttcagatatatgtgcttctgtgtctttggaaataagatgcttttttcccagtgggtaaaacaaagaattggaaatgtgggtatttgatttatcaagtgcaatacattcatagtga

SEQ ID NO: 159794 - DNA, 861 bp, Homo Sapiens
tttttttttttaacctttatttacaaagaacacaactcctcttgacacaaacacacacacatttcaaggaggagcccattaagaacaacaacagactggcgagaatgacggggccttattgaacactgtcaataaggaacactggtctgtgtaccccagactaggggtcactgcaaacattttctcagatatgacttttcacctccaagacaggaaaagagatcttgacgtggaggcccgcccacctacaaggcagaaagctccacactcaatcttcagcatcgtcaaactgtcctgtttcaaagaccatcttggaataatagggtatcagtggaggcggatggtgccagctggggtcatagatcatgtctccttgtggggcacagcacacccaaggtttaagctcttgagaaatgctctcctggatgtcgtcagcatcatatggattcccttgatctgctttcaactccgagtcccagtcctcattaaaaagatcgccaggctgttccttgggtggacagtttgtcccttctgacagctcccaggtattcagttctccatcagagtcctcctcatccatggcaaagccttcctcttcagaatgggtgccctcaccccgggcaggactgtcattaggaatgctctgtgttccacgggctagtcgatccatagccttctcagtctctctctcctgaccggagtggtcagctgtagcaaagccagcctccgggctggggggcgccccccgcgcgctaggcagcggcgggccccgagacggctccgcggccccctgcgcctgggccccggcggcctgaaggtccatgccctgcggcccgcggctggtcgccctggacgccgtgg

SEQ ID NO: 159795 - DNA, 1000 bp, Homo Sapiens
tttttcttggatgtgggcaaaccttgttttaattgcaaacaacttaatttacagcacattcaataatgaaccaacaggagagttgctgactttgtaacatatgaatatataaaaatcccttgcaattcaggtagtcaaggtaaaaagcgcatacaaggaaggcaatcctcatttttctgaaaatgtttacattttaaaaggtgactagacatacttggaagttcaaagcagtaggatgtagcttgcagggaaaagaaaacccttttccatgttgttaggcagaagtatatcaaatatatcccaattccacttgataaagtcagttggatgacctccttgaaccaatctagggcagaacacttagtaaaagcgggccctgggtggggatgtgaatccaggagaagaggggcaccagatcccatgcagcgccaaacacatccattccaccctctaacacatacgaggcatgtcaccccatgtccctggacacaagatccacaagaacagtcagcagatggtcactgctcccacggcctggtgctttctaatggtcttaattcaggccatggagaaaatcctttaccaccaaacacaaactgtcattgaacttcagtcataaaggatgttgtgggggaaattcttgtaacacatacataaggacttctatttacctaattagaacaatgattacacaattgacattcctgtttccataaggttttgttctctatgctggaatggctgaagaaaaagttgtctatttttggttttattttacattttcaaaagagagggaacagagagaaaaatgcccaactttggggcccagcaggtacaaaagcagacttctaggtccatcagatttgggggaagtttcaatgcctagggaaggttagtgaagcccattatatccccaatcgtacaggaagaattctacagttaatctatcacagtgttccagcaaagcatatgttgaaaactacagttttcaatctaacat

SEQ ID NO: 159796 - DNA, 1000 bp, Homo Sapiens
tttttttttttttttcttttttttttttttttttttttttttttttttttttgaaaagttttccaataatttaatcaatgcaaatatacacatatacacattctctacatcaatagtattcaacagtttttatcaaaaggagaaaattttgattttataaaggcagtggaaataaaaaacagtaattattaagttttgctcaaggaccatctagaaggaaaatttagtgacacatctgaaataagcaactgatggccagcctagccttattaagtaacacatattcaaattgtagatctccccctcctatcttccaccccatagctaagaaaggaaacccaggtatagaactaattgaactctattagccaggggcaatcgaacccagtgccaatagagagatggactcccaattagtcttcaaatggaacaaagtcataacactggttttctttcgatgttggacgtatgggtgatacgtttctaaatttatagtttccaaattttctgtaatgagatatattactctcataatacaaagaaagctccaactaatcaaaaattatatatatgttagttcactgttttaaatgcccaaccaccatttaagaataacttttaagtgtctttgtaagttcttcctctcttcctattctgatgttgagaaggggtctattttccagagaaagttaagcaggacttgacaatttgggagtttgggtcagatttgcttggagtttgtaaaaattatactgggaggagttccacaatctccctgatggctagaaacagtaatatttactaggttcttactgtgtctacgccaatgttctgggcacagcagggaaaaataaacagtagtagagatggcctctgtttatgaagagcccaactaataatcaagggcataaaagacataaaaataacaattacaaaggtacatactgatacagtggaaaccagaagtcagtgtgcaagaaaacatgacagtatttggagc

SEQ ID NO: 159797 - DNA, 1000 bp, Homo Sapiens
tttttttttttttttttttttttttttttttttttttttttttttttttttttttttttttttttttttttttttttttttttttttttttttttttttttaaaaggagaaacacgtttattgagcgcatatgtgccagatagtgtacaaatacatactcaaaacgtatcaatcctcagaacaaccttgtgaaataggtattatccccatttacacataaagaatcccttttctgacattgtacattatctcttgaatttttctattggcattaactttcacttatttacttttatcctccctatgatatttttagtagttataaaccagaaaagcatatttccatttaataaatattaatttaataaaataagtttcacagtatatcaacagatgattgaaaattagaagctgctatccttccatatcagattacattcttttctagcccttgttaaagactgagctactaagccttcttgcttggtttctacatttcctatttattgtgcacacacacacacacacacacagaattcttttcactgttctaacattgactctctaggcttagtctccttagtctaatcggaactaggaagctagcttaatgaacaatacatgttgaatgttcttaatcatgaaatgactcctccaccttctaattaaacgtagtaacaaacagaatttacctgtctcagaatcagataaaaggggaccatctttcttttatctatacctaaggtgaaactcagaggtttttccgttatagttctcctccaaccccacatgtagggctcaggactgaagaactttgtgtcctaccaccttttcttgaaggaggtgttggtccatatctgtaatcctgagcaagaagaaccttaaattttctttcccttcaactcttttattggatttctattccttcatttcattccaaattttcatctagataaaaatgtggttccagaggaaactagcctcggacgggagggatgag

SEQ ID NO: 159798 - DNA, 1000 bp, Homo Sapiens
ggaattcagattttttatttttggctcttaggaagtagtcagcaaatactgtataatccctagtagggaaccatgtcataaaatatattgacatttctgcaacaaagaatcacactaaaaggaacacatcataattacccatagcttcctatcagtgtaagttcaggtcaggtttggtttcaaatgggttatgaaaatacttttggttttcagagcattgggactttggaaatgaggacctggatcatcctttattagggagaaatagccccaggagccacgtctcagcaattccatggaaacacaggtttctttgccctcaaaattccgttcctaccttctttgtcttccttcccccaaagaaactggacaaaaaaggtcagaactgtatttgttattcatacatttgcgttgatttaaatacattacgtacaatttctacattggattagaagaatgacacagggggcagcaacactctcgcagcccagcctccattccctgacactggaggcagggcctatggctggcagagggacggtgttccatgagtgccactcagaagcctcccccggcattctgggcccctggctcttccagagtccacattcaaggcaacctgagcacaggcttgagggagagtggagaaaggccaggaaaggatgcccacactcttgcctgccaggcccaggaccagctctctcctacactggacccaatttccttctgatcacagagctggtctggatcaagacaatgtggagatctggtgtggaggctgtggccaggtgaggcagccgggctccctgttagacccccaggctctcttgagcaccagatgggcactttaccaacaggtttgggtaaaaatgtctacagagagctatgcacacctgggtccccttctggctcctacagtcaaggggcaagtgttctctcgaacattgttcccaaggccagtgtccgagtcagctgcatgtgattgtcggggctgggattg

SEQ ID NO: 159799 - DNA, 1000 bp, Homo Sapiens
aaattaaccctcctaaagggaataagcttgcggccgcagttttttttttttttttttgaaagaaywtktattgaggtaccttttattggtataagaacgtaagttccagattaaccatgtcattgtttcattttcaccatggattttttttcacaaactcctttgaaattaaacagacttatatgtaaatgtctttctacattaaaactacttcccaacccacaaagaccccacttactactaatttctggggaatttcgtttactcgttttatctaatattaaaaaatcaacattttgccagcagttaaaaagacaaccttaaagttctcaaattactttccaccaaacccggaaaagaaaaccacccatatccaaaactttaaagcaataaaaatttctattttccaaaaaagtatttacagactgaaattcaaactctacattgccatcaatgtaattatacaagtgcatacaaagccctggaaaagaggaagtatttcattacaaaatatttatgatcaagaaaatattgcttgcctttaaataaagtggcagaaaataaatatgcttaaagatggccattttcacaagtaaacaaaaaagtacacatgtaagaaacaaagtgaaaatgcttgagcttcaaaatgactctagcagtgtttgcacaaatttgttttaaagcgaggtcttctgaagacttcctctgtttagttataaaaatacaaaaagaggctttagagaaggatttcaccaagccgaatgtgcgatgcacacagccatcagaccaagactgcactagcaacttccacctattgttgtgagcaaaaccgtacaccaaataatctaaaaaaattttcctgtttccaacaaagaaattcccaataactaagtgatgcagatcaaaactgactcgatctaatggccaccaaggagcagttctagatctaaggggacacttgagagccaaggggtcaaatccaatctcatgtgttttacac

SEQ ID NO: 159800 - DNA, 1000 bp, Homo Sapiens
tgcctgtagtcccagctacccggcaggccgaggcaggagaatctgttgaatctgggtggcagaggctgcagtgagctgagatcataccactgcactcttgcctgggcaacagaacaagactgtctccaaaaaaaaaagaagaaataaagaaaaatgaagataaaagaggtgaagtttattgtatgtaaattataccttttttttttttaaatggaggaaaacaccttgctatcccttattatactgtacattcttttacctctggcacaggaagtgtaagcacactgtctcctttagagtcctttatctggggctcttcaacagaattttcaccaagacccctatccaaaccaagtgtgcagggccctgtctcagaggaagcaactggagcaactgacaacatgtgaacctcctgagagctctcttcttgattttcgtttctttcagttaggtttacttctgaagaaatactggtccctttgataccatgtacacatgccaatttgctctgatccttattctctgctgttgtaactggtccaaggtttttattttccaattctgttgctttggaagcatttttctctgtttctctttgagtttccatttctgcccctttggttacacacaaactggaaacttcctgataatcatcaagcctgttggtccctaaagtcttctcaagatttggtttaggcttagcaagcctacttcttattctcaaattactggtcactttagaaattgtattcctggttggtgtagcattctcctttactttctccattaaacttatttcttctctggaactttgttcctccaatacaatcttgttttcttcaaatgatgcaggagatgtagtaatgacaggtgaagaaagttcctgacattcatgaacaattttgtgatttacattatctaggctagaaggaatatggcttttatcctttgaatgaacatgaggaagtatacatactcctacatcaccctgttcactact

SEQ ID NO: 159801 - DNA, 1000 bp, Homo Sapiens
ttttttttttttttttttacagactttttattttattatttatttcttttaatacaaagctttggcattagcaattttatgaaaaaataaaatgtactaaaaataaatgcttgtgtggcatgattggtaaatgatgcacaaaaataggttcttttttccttcaaggcaaaatcagtcagaaagcaggttttttcttcttcaaaaccattctacctcattagcattcaagctagctgtggctctgatgatcatgtagcagagtgtgagggcactgaggaggccaaaactggcaataataaaccattcttttgttactgcaatgttgatttctcctgttctcggagtgagctccccatcctgaggaagaggtgagatccccgaagttcgaagtggctcaaggccaagggagttgtcgccggcgaggtcgccgagggctgatcttcggttaacagcttgggttctggtgagcctttccatatcgaatgctacgttatcagtacatggcaaattcggcacaattcccagggccttcaatatattaagtttgcacataggacaggtacaatgttcactaagccagggatccacgcaggatttgtggaaaacatgcttgcaggggagaattcggacgacatcattctgcttatagctctctatgcagactgcacaatgatcaaagtctgggtcagtttccttgtcacccttctttactgtcctggttgtcaatttactgatggctttcttggctgcatctccgagacgacgctggttcctgtcgcgtgcatttgtgtacctgatcttctgaatgaagtagaatatgagccatgctgaagaaataatcatcaaaacaataaaggatattgacacgaagactagagagccacggctgaagttcttcggtggcattcgagttccaacagctattgtcatttgtacagagatgtttttctccagataactcaaaatatccttacccctcaattctgttatcatgacagca

SEQ ID NO: 159802 - DNA, 1000 bp, Homo Sapiens
ttttttttttttttttttatgtaaaactgacttttattacaattaaaaaagaacaaagacaatttgataagtgcctttaattacaacatacctgctatttacatgtaatcatacttttatatatagcttgaataagttttattacatgtaaactataagatattacaagttaaactccagtcttttctggatattcaattgaaatactactggcagaaacatacgaaaacaaatacccatttcagttcctcaggtaccattactggttgaatgatcaagatctggccacagaagagaagtggaaatatgcatcaaaacaaaacttattcttaacatgactaacagtattgttatttaaaccctaaacataattaataattggatcattaaaaacacaacttcaatttatatagcacctttcttccgaagagttgaaagcattcgtgcttatctctattatttcgtttgtccccataacatctctatgaggtaggcaatggttagtatcattatccccattttgtatatggagaaactgaggcacagagaagttaaatcatttgctcgaggtcacatagtaaagtcaatgctggaacagggaccacagccctgtgctcttgtctccaaaacccatgtttccctttacactaaattgtcccacttgagaatttaattcaataactctacacttttccaataaataaaaaagtgcatttttttcacccataaaaatttttgaaatactatgagcaagatacaaacattctgggatggatggtagatggatgctacactcttctagaaagtgcttatggaaatgtttattttaatatgaggagtttcttttcctagttaaaacaaagtagatgtctttacaagaaatatatttgaaaaaatgcttctagtcacctactcaattatagctctagtagccatattatattatctacaaaccaggtttattcctgagtttaaaaagaagaaaatatctaaataataa

SEQ ID NO: 159803 - DNA, 1000 bp, Homo Sapiens
ttttttttttttcagggtatcttaaaacaaccagtttctttaattagaaagcaacaaacatgcaaatggcaagtgtagaaatttatttgaaccaacattttcactatgatgaaaattattcttcaacattgatccaagctcccacatttgaaggttagggaaaatattgcactttgcattttctagcactcctcatacacggcaaaaagttttaaaaacattctgctagttttgttttatacaatctcccaaattcatgcacacaatcattccaaaccaatgttaggttatcccaaaaaaagggaaaaactccaaaaaccataaccttaaaattgcactaaagctctgtaaagaaaaaaatataataaatgtcttatacaaatttcagaacatttaagtgcttgccaaaaagagtttattattcctcatcctcattttcattctcttgaccagagccttctgatctgtcaccctccaaccggtcagctcggatatgattaagtgaagccaacatcctcaacatgaaagaggctggaactgtaatggtgtttctagtttcttccagcatgagttcgtttcgagttataacttcatcagcaagttttcggttaaaaatccttgactcttctaatggtgaccagatctttatgtcataatctatgccagatgaggctaaaattgggtcaaacggatgtggctgcaggcagtttaccacatgattatcagcttccagaagcatcaaatgctcagcagtgtgccgatcccagatgaaaatgtggccacagtcagaaccactcattacaaagttagcaccccagaaattggcttcttttatcattgtcctggagttgcgatggcctttataaaccatttttactagcggccttctaatgttcaaagtatccaattcttccatttctttcctttcttttctccgtctgaagaactcctgaatacgggcaacagcagagcgtctatcaccaggtcctgctcgatacct

SEQ ID NO: 159804 - DNA, 1000 bp, Homo Sapiens
tttttttttttttttttttttttttttttttttttaggagatgtcttttatttcagaattagttcttactgttacaggagcaccacaaattttaaggaagaggctacagtgtgaaatgagctcactgaaggatatgttaaataaaattttaactacaatataaggtactgcaaaagctttgttccccagcacagatcccttaatcaggaaaagtagtgaacacttacccaatacaatatgtaaattcgctctacaggagatggggaaaaacctaactcaactaaaagaaaatactattattagctaacaaacctgtgatagctggcttcagaattttcctaaaaataaaattcaaaagcatacacagtatttatatcctttgataaggaatgtagacatccaaacggaatgaaagaaaaatctggttttaagaatttctaagtggaatcacacacacacaaatgggtaactgagaaaaactaaatattcaaaatttaagtaagaagatttataatagaaaaaagtggcaaattgttactgtgacttgattttctgaaaacatctgcaaattcacactggcattaagaaaacccaagtctcaaaaattctcctttctttctctccagataatgtgttttctgtgcaaaaataaatatctgaaaattgcactaatacttattttaacttctatattatgaataatctgcacatgctgctttacagacgatacatatttgtaaacttactcatgcaaaattagtgtgcgcaacagggatattgttaattttcatacttaaaaatgataccttattatcttttaaaaattgccaaactctctgaaatggttaacaaatcttatatggatattcttgtctgccagctaaaaatcaatttatgttgctgaaaacaaaaagttatacaagaaaaagaaacatggtttttgttttgcaagatttttgatttttaaatgagaaaatttataaaagaaagaaattcatgg

SEQ ID NO: 159805 - DNA, 1000 bp, Homo Sapiens
tttttttttttttttttttttttagggggattaaaactctttatgctccaggagataaatgtgattatgtttgtcatactcaacccaagataaagacagcaaagaaggcaaacttgaaattccatcacatttcctctcttccatatccagggacattcagagctcaatacacagatggtacgtctcataaagaataacattatctgttcaacatttttcctttccattaaccaatttaacaatatgcctctggtacaaaaggaatagacaaatgacgaaatctactgatattcaagttctgactgtgaaaaacaccacttgagtcatactgcttgttttctttttaaatttccatctgtgcattacttcacttttgcttttaagatgcaattggagctgacgcttggtccctcttttagggaatttgtccctgccagcctcccctctgcaggggattcatcatcattctaatgggagttcccctgccatcggtcaaggacagcagaggtgacatataagggttttgtagacacgaggcatgccactctagtattaggacactctttcagcaacatatgtctaggcctcctctgtgccagccctgtgggaaagcagagcccccaccatggcccctggctccttcctagggcctagctgccatcagcctgatgtgcagcagcctttgcagcggtgctgacaccagtttacaaggccctgagaggggtccctgcccttcgggaggttacaaggcaggaatccattaacagaatcagttaacaatgatttctccttttaacactccagacaggtgggcaagtctcctttctccacccagtggaggcctttagaaaccactaggcattctccatctatgaaaaataaaacccagattctagctgtaaacagttttaggtagtgcccattctttttccccccacatcaaacgagtaaagtgcatcgttgtaacaaggtttgagggccatctcatgcacgttggaaa

SEQ ID NO: 159806 - DNA, 1000 bp, Homo Sapiens
tttttttacagacaattcaggaaagagtttccagtttaattacatcaaagctatatccaaaataaaaataacactcagaaacaaagattgcttataattccagaacattttaattctacagagctttaataaaaagcccgacagtttccaaatgttcatcaaaaacagaatgaatatcagtcccatcaataagggggaaaatcaaagaaaaaaaaaaggagagggtgagagatgtaagagatgaatgaaggttgacaactattctcctttaaaaagagaaacactgcttcctcaatgtcactgaaggatatgaacaggcaagaggaaagtaactgtccatatttgccttatatacagtattgggtaattaaatgccagttgggctgtttaggaatggcttgctaaaacattgaaaaaatgaaagacttcatccttgtcgtagactgccacttcagtggaacattcagtgcacatgactgggtgatagatttcttccacatctgtctctgccttctcggcagcatcttcccggttagacctcatcttcttatggacccgccttttcttccttgttctctgaggctttatatcttagaacctcctctttgttaatagaacaattcattacaaacattgctctatattgagtttttgtatgattcatgcctttggcaatcaaggcaagagtgtggtcatgcaggcaggacaattcaagaccagcatcactatttggaacaggctgttgttgacgtgatctctgtggtcccaaaccatggtaaccccttctctgtgcatcaacccaggcctgatctctgttatctttttcaggatcatacagtaattcgtcatttgttggaatcttgtgttgtttcttcttttttttcttggtcacctgtactgctctgtcttcatcctcggaatcagaatcaaaatatatatcatcgtagtaccttgtcggagctgttgcaacttttccatttcctgaggaagatccagttcc

SEQ ID NO: 159807 - DNA, 1000 bp, Homo Sapiens
aaatgacccaagatataattctgattgtggtctggatcataaacccgcatcacattttaaatgtctattgtcttggagacaataagctgttttatgggggaatgggtgggtggaaaaatgggagcagggcttctgaagctgactaatacctgaagaatacggcaacgtgagaaggcactgacccggctgctttggtaaatggaagaaaatcatctcagggttgctaggaacatgggtaagaccagactgtagaaagatccttcaaaacaaaacagtttgccattcctttaacaattactaacgtcaagaacttggaattgtgccacggaagacagagcttaagatggggtggagcccttacctccactgctcccctgggcctaaagcctggtttccttatgggtgttggggccacacaaacaagtctctgttttcaacacagtgacagtggggagtgggtcatgtcccagatgatttggaacaaggccagggtcctatgaccctgctggcatgatgggtgaggtccataaggaaatgggcagagggtcaacttgtctcttctttcaccgaaaagactgcgaggtctatagttcacggtcaccctagggctgctgccatctttcatgcccagagtcaaatcctgcatttctgtaatgcatattccctatcctgccaataccacagatacctttagggggtagggtgggggttcagaagaatccttcaccagctatgaggcaagtacagctaggtgggatcctggaggcttgagggagcacactgtggtggctggtctggatggtagagcgtttggtgaagcagggcacgagtcacagggaggtcgtcaggatccacgcccagctcctgcagcaggctgtggtactccggcttggtctccagcagtttcaccagattggtagactccatccgctccagctgcacctcccagtacacatagatcttctggttgaaagtgacatatacgaggcaggggctgttg

SEQ ID NO: 159808 - DNA, 1000 bp, Homo Sapiens
ttttttttttttttttttttttttttttttcagccattatatgcatcagtttattgttcattcataaaactaattttataagcacataaattgtaaatttctgttacagttaatgtttcattaccactgtgagaggagatccttaaaaaacaatagtaagtcctattggtataagtcctttttgattattcttctcaaaccagtaaagttttgacattaggcacgattattttatcactttgtatgttttagaaaaaaaaagtgaatatatccactccactctgttctttaggaaaaaagtagcttttccaagtacaagagatcaactaacttgatcatcttttttaggcaatgattgaacttttcatttcacagagcataatccatcattttttaaatttggttccttagattataaagctaaagatgctaactcttatgtaaaatttttttacataaaagttgttactgtttcatttttttattctaaggagtatcaaactaactacatttataatctttgtgaaagttttcaaatctcattcatttttatgattccaattccacttgagattctaggagaaaacctgtgaatgctcactacatactgaagattagaaaaaaatctagtaatttcactaaactgcaattaggatttggacccaatgcaaatgtgcacaacataaaatttcctatacattctatagatgtaggaagtttattaattatattattttgtaaatatatattatgtatttaatttgatttaatcacattacataggttgaatttgggggttgcttttaaagtgttgagagtttagtgtttatttttgtaatccaacaactttatccaaaaatgcagaaaatttttctggctggccaggaggataacatttcagtgttgataagtccattgactgtaacagcccaggaagcgtgctgcaggtacaatagaagagatgaccctctttgtgtagctgctttgccagttccagctg

SEQ ID NO: 159809 - DNA, 753 bp, Homo Sapiens
ttttttttttttttttctggttttgctagtttatttcaaaaattacaattgtttgagtcaaatctatacttgatattcattgttgggtttctttaggtcattctgctgttctctcagtttcccaggtgttttgtgtgtcttccttgtgctattaattttcctgtggccttgttggtcagatccacagaggtaaatgcaagtgtttttccttgcttcagaacatgtgctgtaatcactatatcttctcctaattttgcaggtgacatgtacgttatgttcatatcgacactgactccgggtgctcccctttccgtgcatagcagagccattgttgatatgttatctactaacgtggctgtcaaaccgccgtggagagtgcctattgcattggtatgctcttcttctactttcatttcacaaatcactttcccaggagcagcagagacaagagtaatctttcccaaaactctctcaaaattgcgagccttggtcatggcctttatcacctcccgcagagactgagtcatgctggtcatcgtggacggttttccagcctttgggctttgcgcaagaacgaacttcggaagagctggaaagtccagaagttagtgaaagaaggaggacacaaagggcgaagagcccgcacccttctccgcccctaggagcgcaagaggccgggagtcaggcgagctggcagccccggtggtccgcgatttgctcactgactttcctcgcacccttgtgacgaagcgc

SEQ ID NO: 159810 - DNA, 1000 bp, Homo Sapiens
tttttttttcctgggaacaataacatgagagtttattatcacatgactactcaggaggggacatgaagcggagcaggatggggaaggggtgtaaggaatgggcaagtgctgctggagcagggctgtggccacggtcatggggccaggataactggggctgttgaagagcctcttttcctcagtctggttcttcttccagcagtcagatgcagggacgcccggtgcagaagcaccaggcactaataatcaggagaggcatggctagattccactcacttccaacatttccttctggtctcttttccctttggttgggaacattctccagcagtacagccacagaggggtcagagatgccagaagcagcagaatccagacacccaagagcatggcctgaagggttctgaacaaggccttcagcatgtccatgaaggaggtacataggtgtagccttctgacttcttctggactctgagtgggggctggagtgttccagtcactcgagctggagatgcggcaggcactgttgtaataagagtagccatatcggaaatcttcattccaaagtttgagggcagcgatggctgtggagaaagctgccagcgttagcagagtcctcagcagggcccagtatgtaccaccccgtttctcgtaaatgaaggcagcagctccagccagcacagccacagcccctgtccagatggcagctcccgaggtgacgaggagggtgtagtcgcggatgtagaaaaatcctcctaggactgcactcaagatccccagcacgatctgcatcacccacgaggccaccagcagccggctgctgcccctggcctgggtggcccggggccgcagcgcagagcagcaggtgagcaggagcttggccagggcagactcctggtggatgtgcacatcgatgtgggtgtgctgtggggcctccggggccatctcatcactgtcggctgttcccattgtcagggacacagtctgcgctcctcgggac

SEQ ID NO: 159811 - DNA, 1000 bp, Homo Sapiens
tttttttttttttttttttttttttttttttttttttttttttttttctggtacccaaagtgtcctttattctttatcatcctatttgagttttattgtttttacacagctgggaaatgcttaaggtacaaattaataaattttaaactcagtatggaaaatacatttaataaattaaagcaaaaaccaaagatctgaggagatccaagagatcaagacaatctgtaaccagagtctgaagtatccaaggagctactctttttgaggcatattctcctcagcttccagttatcatttgataaacacatcagcaaaaggttcagtgttttaaacaaatgtagactttattttgtactgtacaaagtgctaatgtcagtagatccattaaaatatagaatatttaagaaagatcattaataaaagtaatggtcattcaatttaatgttacagtttacagcgttttactgctagtgttttaagtcagcatgagcagtatcaaagtacttatgtagctagtttctaaaactttacagaaaacccagtacaattccaagtgcttatagccaatataagcatatttcatattagaaatagttatccatatgttaacaagaaactatggtcctcaaatatgccaattttagagtctaataactactgatagtaactatgtaaatattttggaataaacagttatttacgcaagccacacttcagctgagatgatcactagacatctgtttccagagcttcaacaatgtgtgcagcagaaggacgatctttagggtcttcattagtgcatacagagaagagttcaattactttctggtatgattcatccagttcttccatattaataggtggcctagttcccaacgctgcatagtatgcttcatcatcaaaatcactttcatcaaaagttttatcttcatcatcatcatcatttgaaagattaatgtgtggaatcgataaagtcatcatttcccacaaagtaaggcca

SEQ ID NO: 159812 - DNA, 1000 bp, Homo Sapiens
ttttttttttttttttttttttttttttttttttttttttttttttttttttttttttttttttttttttttttttttttttttttttttttttttttttttttttttttttcctgctcatctttgattttattaatatttgattgacaaataataattgtattatattgatggagtacaatgtgatgttctgatacatgtatacaatgtggaaggattaaatcaagctaattaacatatccatcacctcgctcccttatcctccttctttgtggtgagacatctgaaatcagccttgttattgtgatttaaatttaatcatcctggtgactgtctagagtgacagcacattgtggttttactctacagttccttgaggagcaatgacattgaatacattttcacttacttattggccatttggtggtcttctgttgagacgtgctgaagttttctcccctttaaattgatttttttttcaacttgagggattctttatattttctatgagagttcctttgtcaggtgtaccttagagcaaacatcttcttccagtcctgtttcttgtcttttccctatcttaacagcatcatttgatgaacagaactttgtacttttgatgaagtgtaacaactttttatgtttgctgtgttttgtgtactaagaaatcattgcgtaacccacggctgtgccaataatctcttaatgttttcttctagaagactcaatggtcttttccagactcattgcacccacagggagttttcttgtaaaaattcactaatggcaacacaaatggtagtaatgatcataaaaacaacaatagttattatttattaaaattacacaatattccagttacactttcaaagactttacatgtaccaaacatttaatttccatgatagcagtctcaggtagatgtgattatccttatgtacaaataatgcacatagtgtctgtgtgctggacaacgcacaggggtagtgagcctttggcc

SEQ ID NO: 159813 - DNA, 1000 bp, Homo Sapiens
ttttttttttttttttttaagtgtaaaaatgtgtttattcacaaccatttgtaaattaccatttgttaccattccttcaaaaaattctttatgaacaaaaagccaagaaaaattacaatcgtagcttatgccaaaccaaaaatatacatctgatgtatacaaaccttaaaaagcattaacacaggcaatgtgaatatagattaccttaaaaatatttccaagacacagctacaacttaaattatgttaagacagatataaataatagcattaccaatgtattatatttacatatttaaagtatcatattaatttctatgacataaaaaaggagataaaactacagatgtcattgcttagcagttcaaatattgaaagagccacatgatttttttttttaagcacagcaagaactttaggttactatttatatctggaccttcctatatttataagaacatgcaccgtcattgttgcaagaggaaaaaaaattaaaaacattaaggaaaaaccaaaaaacagtttgcttactaaaatcataccaaatcctcagcaaaatcaaggaaagcaattatggagtgttttctatccctggccttgtaaattgacatatacattttagagaaaagaacagtaattgtctagcacaaaatgcagttatagatattgatatgcttagttctatcccattaaagcaccttgtactacaaggtaaaggaaggcttaataaaatcaatggagcctttcataccagaaaggattttatttgaaatacccgtattacctttttagattttcttttctgaaatcatgcagagaatatgttctgtgtaaaatctaacatcgttcattggaaatatagaattttttaaaaataatggcacctaaaaacttaatactgtatatcaattaaagtcaatatagtggcatgtaaaatgaagtggaaaaaactaaatatatatatatatatatcttcttaaatattattttttattattacc

SEQ ID NO: 159814 - DNA, 1000 bp, Homo Sapiens
ttttttttttttttttttactgttttcagtcactgcaaattttcttccctcctctgggatctaaggatccagggaggaggctgccacagtgaagcagaaaagctacattctgcccagggaggaagagaaaaagcaatttctcgctccccttcccaagtccttcctgtccaccaccacctcggatgtccccgcacacagccttccggtgagcggccgtgccgtcccctcctctctctaaggcattggggagcagagggcccataggcagcaccctgcaaaaaaaaaaatgatctacgtgtgaggagagggcaaggggctggatgcaggcagagaatgactttaagaaaagattctatgatcccttcctttagtatggagctcgattttccagctggcgcttggtgagaaagtacttgaagaactcatagacagaccaagaaatggcggtggagggcatctggtagatgacacgcgcctggatgcctttgaagtagccggccaggccgttgagctggtacaccgtccggaaggcattggccatacccgacagccggccgctgatgttggccagcgagagggccacgttctcctgagtgttcagaagggtcttacagacgtccaggggggtcgtggcggccgcggcgagggccccggccagcccgcctgagatgatgtgggactgcgggttgtaggtccggtgggggttgacctgctcctgcaggaactcataggtgatgaagtggatggactggaaggggatgttcatggtcagctgcgtggtgtagctccggtagaaggcccccaacccctcggtcctccacaccgtccggatgcagctgattgctgaccggtgctgcgagttgtacatctgcaagcgctgcttcaccacttctgctggattcattaccgcatcgtggagcagggtggccatactcccagctatccctgcaaaacaaactccagaaaattaccctctgcgatcgggtgttctcaggaagtt

SEQ ID NO: 159815 - DNA, 1000 bp, Homo Sapiens
ttttttttttttttttttagcatttgaaaacattatttaatacagattttggtaacattaactaatacttattccaagattatatggtaaatatttatatttatactgccagactacatagagaaacagggatttaattctaagttatattaccccaaaaagaaatactttctaatattgaattcaacaagatgtaccaccaacagagacagtgaatgtatttcaccttcctaaacagctatttttatatgaaaatcctaaattatctacatcagtcaatgactggcatttcaagagtaaatgattcattttacttacaatgcatcaagataaaaaggttacactgaacaactagaatgtttactgaaattaatcttattaaagtaaaacttaaaaaacttatttgggacattttcattgcttacactcaacgaacgtgaaacagagaaaaacagtcacagaatcgtgctaagtttataataaataattcacatacaacataggttaaattatcaaagaaattaaactgacatctttataccttttgcagatttaacacatttctaatccaccacatacggatagcagtaggtatatttcttgacatcattcagtctatttcaaaaatagatttgattgtttagaggcataatttataaagcaagataaccaaattaaacaacagaattttaactaatattggctttttgggatttcttaagaaaagattcacaagcattgctcagctactggagaataattaaatctcttctttactcaggcacttttaatgcagtaacctcaggcttcattttaaagtactggttaaaacgaacaattgcatacccaaggaaatcaaactcaatagtggagtatttggcttgaatcaaagcccacaatccccaaaagaaatgagaagccaatgcaaactgattgacttgaatgaagagtatttctacctccttttcagtaacttcagtcccaaagcccttaaattctt

SEQ ID NO: 159816 - DNA, 1000 bp, Homo Sapiens
tttttttttttttttttttttttttagtagagacagggtttcaccatgttggccaggtctcaaattcctgacctcaagcgatccttctgtctgggcctcccaaagttctgggattacctgcctgagtcacccgcccggccttaacagccataatttaaactagacagtatgggaacagctggagttagaaatcctagaaatcctgcttctgtaactgaccggtttacctctgacttgacttcaaacaggaagccctgaagattgaccttttcaagtacaacacttaaacaaagaactttccctctggaaggatttgtcggctacccttccaaaaacagacaggtgcggcctgacttcaagtgcaggccccgccctcctccggtgagtggccctagccctggaggcagctccatcagcctcagcatcccctcccggagcccgcacgctcagaaaaaccacaggagcgggcgagcgggcgggcgggcgagcgggcgggcgggcgggcgggcggaggggagaggggatattttactccagcattcccttccacatttcgtattaaatacctgaaatatattaatcttaaaaaacaatatcgatacagtactcaatggatagaggcagtggagtgaacaagaagcccagattgcaaaatcgtaggtcataaaaaaactggagtgcgcgtgcgtcaggttccaggcacgcgagaaaaagcaacgcgaaagctttcagtctcggaggaggttttcgggcttggggtagccgaagagaacaaagtcggcctcgtagagtttatacagctgctgcctccaggccagggggatcttggcgaaccagtcctcctcccagctgctggcggtcctgttccggtagctcggggggaagcggagctgccggtccacctggagtagctgcagcagctgcgcggcgtcctcgtccagagtctccagcttccccacgaagtcgtagtcgatctggcacgggtggcagaggcggtaca

SEQ ID NO: 159817 - DNA, 1000 bp, Homo Sapiens
ttttttttgactgttaaaaactgtatttgacttttaattttgaaagcaaattaaatacagttaaattaaaacagaccagatgcagctgcctgggtgccaccctcaccccagcctctgttcttagaactcctagcccctggcctcactcctgtgtggtggggcttgccagcgagggagcagggaacagactgggtttggaaaacagtggtcatcatggacccatttctgatttataacaaactcattcccaataaagatgaaggctgcagtccaccagggttataattataaataaatatacatgcagctaaaagaggatattaggtgaaaacaactgacctagcatctgcccaaagaagtccccattttgttgttcattatcaaagtcctgaaaatgaaccctaggtttttggctaaaaaggtggcctcagaccagccaagctgaccttggcacttggctggcttctgtgaggcagtaaaatgcccacacataagctcaccacctgtgcccacctcctcccttctctcccatgccaccccacttgcttccaagggcttggtttccaaagtgacatccagggtgtaagaggttggggaaaacgtcctgcaaggtggctcagggatctgattccatcagatggtctcatgaatactgtgggagattaaatccatctcaaaataggcaaccaatgctatattctgaatgttaggtctctggactgagtcccacccacccacccactcaggagtgggttctgaatggccctcagacctctcctggtgagtcttaatggggtgggaggctgttagttaaaaaataaacacctcttcagtacgctggggccctttccttttcctccacttggggggaaaattgtgcttccaacttgcaggagaatgagccggatcaccactagagagcccggccgggccagggggtcagagccctttccagcgggccccagaggcctggggagggcaggagtttgaggcacactgt

SEQ ID NO: 159818 - DNA, 1000 bp, Homo Sapiens
gcggccgcaggaattttttttttttttttttttttcctttcattttctttttcttaaaaaaacaaaatgaaaccaaaaaaaagcctgaatcaaaacctttttaggagtagttacagatattatagggatgggggcggggggcactaaaacaaaagagaaaagcaccagtgagatgtctttcccattttcttctctccgccacggaacacgcacaccaacagagcccaggccactttttgccctcttcccttggaaaaaggaggaacagaagatttaagaattttgaaaggatttttttcttgtgtgaatgtgtgtaaaagtcaatgctataaatctaaaacgaggtctgtttttttaaaaaagttcttttaacaacaggaggaaaacacatggaaagaaacccctcgcggagacctgcttccttacagatggaggctcttttggaggagagtgtgaagggcagagggctccctgcgccggcaggacctgcccggccaccctccactcccctgccatcacccctcctctctccttttaaaaagcaaaaccccactcttgggactcgggtcgtcctccgatccctgctggaaagtgcggcggctacttggcgtcgagcttggccatctcctgcacgtagatgccgatgctctcgctgtcgaagagcaggaagtacacgttcttcagcgaggacgcgctcgagtcatcaaagtgggctgagatggctttgagggtcacctgggccgcagtctgtttgggaaagcagtttctgccgctggggaaaggcgggaacgcgacggactttagcttcttgtcctccgccgctgacaggcagtttttgatggtctcttcaagctgttcttcacatttgtcggagccccactgagggatgtgacagtggatgacaaatttggctgcgagtccactggattggctgacggcggcttcggcgacttccaaagggccttgggatttgcgaagctcctttaccgtttccaagaac

SEQ ID NO: 159819 - DNA, 1000 bp, Homo Sapiens
tttttttttttttttttttttttttttttttttttttttttttttttctggaattcagtatttattttaaaaagtgcataacaggagtaagagaggcttaccaaaatatttcaaaactcaagtacattttcctcatctccaatattttagaacggaataaaacataaactgaatcaaattttgaaactgtctttgacaagataaaaacaccaaatatctacttaaaattcattttgaaaatacaatctcagataactcaaaccaaaagtgctgaccattggttttctccagaatactcagttctaaatgaacaaaaatttatatgcacttttctagattttgagaaacatttttgtttcattagaaaagttatttctaacaatatattaatagagaaatagcacaattcttattcagcgcctaaatttttacgagcgaaaatatgaaattttatttttatgcatagtttatgtattgatccatggggcttacaaatagcaacacactcttgggctgatactatcgtggattttgcttaaattatgagggcaggaaaattttaaaatcccacaggtcacaactgaatcacattaactggctgatttagtaaatgaagggcaattctaaaatgcaaaataaaaatggaattaaggcagctttaaaagaaaataaaactcatccacccaaaatagtgctacataattcattacttaaaaagctctctgtggagtatagacataaagccaaaaataaaaacaaacattgcagttgtgatgcagcatcaggtgcttttacttcagtgaatgaaaaataatggtcacaactcaaatgaatgggaatttaatatgaatatatgcaccttaccagagatgtttgctaccaatgatatcttagcaattccatattccttacaaagtcagtataattgttgtaaaaaaatcaactgtggttctgaatacccattcacagttgacctcaacaatgtatctgatgtaggaga

SEQ ID NO: 159820 - DNA, 1000 bp, Homo Sapiens
ttttttttttttttttttttttttttttttttttggagttctacacacttttattggaggggcaggcctgatagcaggctcacagctggtgaggctgctgatgtgtgcgcccttccagatgccccaggatccacaggctgtgttgggatgcaccttccccattcccagctgactacagtagtacagaaaaagggcccctctgagtgaggctgcaggcagtgctggccaagcagggctgtgtgactgaacgtggccgctgactcagaacagaggacatcctagggcagcaagcgaggatgggcaagagtattgggcatgccagccaccaccagccaaagctgcttccgtccttactctccgtgccacaataggtagcgtgtgcatgagccttgggcccagggacaaccccctcactctccatcttggttgggttggataagcccatattccactgctttgtccaggcaggctgcagcagcccttgtgacagggctgtggtcacccttagctagcactgacaagatctccatcatctcactctccatcagggtgctggcaatctccctcgaggcctccaccatgttcagcaccaccacagcaccccggtgctgcagctcctggttggagctcagaagcagggcctgcaggatctccagccagtgtgtggtcacttggggaatgcggctgcagagcgtgggccgcatggaggtaagcatggccaagcccccggcagctgcccgctgtagcagctcatcatcctctccactgtacagcaccagcagcttcagtcggtcattgccctgggcttcgaagaggtcctgcacctccttgctcatggccaagttacacatgcactccgtggctgcccggcggatcatctcatgctcctcaaacatgtagccttctatcatgggcacagccttctccttcaggatcttctgccggagcctctcgctgatcccagccaggtttgttagggccatgagcgcctcgaagttct

SEQ ID NO: 159821 - DNA, 1000 bp, Homo Sapiens
ttgagatcacaggctttattcctacaaccacagggcttgagcctgactggggcaagaaaacagagtttcatctgagaatgtctcttatgggctgggttctgttcaggggagggtgggaacagaggacaaggaagacaagctcctctggccctaggaacaaaacacatttactccttcaaagaagcagatgatctgaataccctctggagactgaatctgcccatacagcccctggagccaatgggcagacagtactggcatctggcacaaaagggaattcagacccagaacagaagcagcaaaatattttaaaaatagtaaattgttcctggactcacaaatcattgtttttaagggcaagtgcatgcccaatataagtactggggcttcctaagagagctgacataggattacacagctgcctccctgcttcagtggaggccctcacatcccctttgaacacttaacttgggtaggagaggtagccttttcgtctctgttctgggttctgagagctctgcagtctggaggcacagcagactgaggctgacctgggccctgtcctttctgcctggcagtcacaggatgttgtctctacctggagacaaagctggtttccggtcccagacagctggtcaagggagggtagtgtgggtcaacactggccctcagcactcctgagggggcaaagaggatgggcaaagtttggagcaggaggaatcctaggtaaaggtcaggatcatgttcactggatggtcaggcagcggtggctgaagaggtgactgatgacagatgggtcagccacagtagacatgtccccgaggtcatggtcattctgagcaatcttccgaagcactcgcctcatgattttccctgagcgggttttaggcaagccaggtgcattctggatgtagtctggtgtggcaatggggccaatcttttctctaatctgcttcttgagctcctcggtgagcttggggctgaaggtgtggccatcaca

SEQ ID NO: 159822 - DNA, 1000 bp, Homo Sapiens
gacatttaagacaattctttatttctctgacagtgacttcttgaagtgcacatataataaataaatagaaaatatatctttgttcatggtgatgcctacaagaaatgtttacatacaaacactctatacatctaactcccgaaaaaggaccagctatttcggcaacagaaaaaagacaagcatttcagaggagcgttgctttccttaaagacctaactcacttaagtcttacaaacagaaataacaaggaggacaattttctaagcaataagaaaatttgtgctaccaagaaaatgcctagatattggctcttggtgaatggtttaggaaagaaacttttatgtacagatcctgtactgtgaaacatatgtacaactctgagaactttcaaatagatatcttttttaaatgaactgagccaaagacattcaacattcctggccacctgaaagtgatcacatcctaagtggttcacagtgtgagacccttgcattagaagagtgaaaactcaacaaaaccgtggacaagaaggacatgaggtcattttaactctcctctccatcaccactaatctccctggaagaagtccttcctgtgactctggcctttgaagcagccatatctttaaaagcagagccctatggtcacctcccagcagctgaaagatgtttggtgggaaagacctccctgacagttggctcccacctggggaatggactcttggaccgagtctcatgggtgcagttgggtggagggagccaggcaggccctctttgaaggaaagagtttgtggttggggcaggaaaggggataaatgtagttcatcacaagacccagggagactctggtgcctcgtgcaagattataaaccacagatagagttctccctcttacaggagctctttgggctctctataaggtgggccagggagagagcagggcattaagcagcagctgaaagggactggggtggacccaatagctgttcagacacccaaga

SEQ ID NO: 159823 - DNA, 1000 bp, Homo Sapiens
ttttttttggtctaagtaagatattagggctcgtgtttacaaaagtaaatgaaaggatcaaataacatgattaatacattttattacaaaggttttagaagatgaggggcagagctaacaaattaccttaatcattaaaaaaccacaaagttggagaatttttttaaaaagagtggataccaaaatagcttttaggaagacgacagcttaatagtctcttaaattgctgaagagagcaaaagaaagcttaagatctggaggataaaagttatatcaaaaacatgctaaagaatacattaaaacaaacaaaaaggaaagaggaaaaaataaactatgccttagaagttaaatcctatcataaatgaacatcatttctaaaggactatggcccacttcaacactcaaacaaaaaaatcctcattgctaaaacagcttcaacattcctttggagtttgctgttaaagaatttatcctgcatatatggtagacacgaaacacatcctgaagagactcagaatatctgcaaacataaaactgcttctctaaattgcatttactggccttgaatccagtagagtagggttcagctatgacatgaagtgtgtcatcctggggagggggagcaatttgaagaaaaaggcactttgctacagttaattcacatggctataatagtctacaagtttctcctcaatgccaaatatctactaagaatttaaaaaagcagatgaaactttctatttccaagaattcatgtgataaagggtaatgatgacagagtttacatatgctcagttttcttaaagccatagattttattccagaaaggagaaagtacatggcattaataaaccacacatgccatgaattttagaacactaaattatttttctctggcttatcaaccagttatatccatgggctgcaaattatatccatgacaaaattgataacattttgcaacatgtcaaagaaagaccaacatttttgcctgagtgtc

SEQ ID NO: 159824 - DNA, 1000 bp, Homo Sapiens
ttacaaaagcaatacccgtttactaaagacattttcagatatttacagatcaatttctcacatctatttctataacttgactttgaagtttattataatcatattactattctgaattttaaaaggtccagagaatgtaaacaaattctatctttaaaaaggcttactgacaactgcagactcaaagtggctacaaaaggaaaagtattgtaaacatttgtctcttaactctaggcactaatctcctaaaccagttcaacttgataaggaaaaagacttgagattcactcatttataacttagttagcaatgtcattgatcattaaagatatggaagaataatggaaaactggatttttcactaatgcaaaattaacaacaatacctcgacccccattaaatatacagatgccaccatctcttccatcatggattttatttcttcttagtgtaggattactatctgtcttaatccagactccagccattgcattgtcaaatatttcattgtcttctatacagcctagaccagaattataaactagaattccaccattctgtcctccccagattttgttgcgtctaattttggggttgcttccagtccttatctgaacccctgaatacatatgattatagatatcattgtcttctagcactccatgtccattgtcataaaaataaacaccaacctgcttgccactgtgtatccggtttcttctcagtactggagtgctgccagttgtcacccagactccagctagagtgttactataaacttcattctcttctattactccttgtcccttttcatgcacataaatcccaccatgctggccatcatgaattttgttatgccgaacaattggacaactgtttgtcctaatttgaattcctgctaatgcattgccataaatgtcatttccttcaataaggcctcgtccatcaccaaagatgtaaactcctccttgatttccattaaatatagaatttcccctta

SEQ ID NO: 159825 - DNA, 1000 bp, Homo Sapiens
tttttttttttttttttttttttttagaagaaataatgtggtagtatttatttagggagagacagatgtgttgccatgttacttagtcatactagagagccagccaagtttgaataatgaaggtgcagacgtgttgtcttcttcactgacaagctgtctgaacaaggagccaggaactgtcgggtcaccagctgtggagcgtgccggggggacaacctgagcttttgtttcgatgtttctggttgatttagcctttcgagtgcttgtcatgctcagtgggagaagtccaaacctgatctgactggatgccagtggcaggatgttatggggttcttgggagttgaacgtactgctccggggggcgagctgattctctgtaccagtcaccaatccaaacagaacagaagttcgctgcaccaggcgatgaaggttgctgttgaggtgtggcgtgaaaacgtccaggtcaaatggatcaatgagggcttccaggtggtcagtcactttctcaattctggagtctggcttgctccggccactcttcacctcgtcacccttggctgtcagaacaatgttgaggtaacgcagatcataaagcagctgcagcgcccggttctgggtgactggaaatgcaccttctttcttaatctgtttttcttcggagagtttctcataggcagctactacttgaaccatacagcttttcagcatctcctgtaatgtcacctttggcaaggcatggcctccaacccgattaatttcctggcataaactaaacaggaaggactgtacataccaggacggctgtgcagggagtcggatcttggatgtgacactgctgccagactctgcctcctcctgaatttctagctcatcccagctggtggctgtggccagaactgagccagcatcatctagaagtaatgactgggtgaatccatgaatcaaaactttcacaactgcactgctccagacctggtagcccatcacgctctgctggagg

SEQ ID NO: 159826 - DNA, 1000 bp, Homo Sapiens
tttttttttttttttttttcaagttaaattacatttattatataaagagatcctataacttgatacgaaaaacaaagcaactccaacagataacagaagggcaaaaggacaggaacatttgatcaaagaaacacagctaccgatagcacacaaatattcaacctcattaataatcaaaggattaggatgcacttcttgcttattcaataaagttaataatttctaatttttctacttttcaaatgtactcaaatgtgctatttttagtaataaaaaactgagtaattaaaaaaacatagaaagtatgaaaatttctgccaatgcagaaatcataaacagcattaaaatgaatcaacacttgtatgggcagtaaggttcagacccctagaagccaattcattttgccttggttcctgagttttattatgggattgtcaataaggagaaagttgttcctgatttacatgctgacaatcttccaggtatagggggttgtgtgtgtgtgtattacacacacacacaatgtatatataaattttttttcttcaggtagacaattattccaggaaagtacctcttcagaatcactcattacagagaattcctgtaactccatttgctgataaaagtcccattaaaaattaccatgtggttctcaaccaatagggatacctttggcattgaagaggctgagggttgattttagtactgcttgtaagaccatagtgttccagaggctctgtagctggcttctttgggaatctgaagttggtcctgtctttgagacatggccaaaagcacatttttcctcacttgatgcagaagaaaatgttatctcctgcttgctcagatcatagcctcgaggcagatcacacagctcaggatgcacatggactggaacagcaccagggcaagcaccccaaatcacaaaataatcatgttaggatgactaagttgggaggctgaacttaaaaccctatagctttgttcagaatatttt

SEQ ID NO: 159827 - DNA, 1000 bp, Homo Sapiens; identical to SEQ ID NO: 158297

SEQ ID NO: 159828 - DNA, 1000 bp, Homo Sapiens
tttttttttttttcataccaccattttcatttattagcaataacagaggaaataccaatagcaccaattcaaaatgaatccacatgacgtgttttatccttacagctgtaataactagtaactaacatggattggaaagcacttcgcaaatgtaaaaagtgctgtacagatacattataattatcatcattaataaattagcccgattctcctagttcaaaaggcacgtaaggtcagatacatgggcttcagtggggcaaaatgatcacaacctacaatgtagcaatggttcacatgtgttggtaacaagttttaccccatgcaatcctgcagagctgaagttacacacccttcaaaatatgggagaatgaagctaaaagtagacaagacagtttttttttaaatttaatgctttttttaaataacagactcctacctcttttatattaatgcctaaatagataatataattaatcaaacttctaaattgtacattataacaaaattaaaatgtcttatttaaggtgacagcaaattttgttactttctatgagctgatatttcagataccattagaatttcaaagcattctgcaacttcaaagaggtcagattggtaaaatttgtgcttgcacaccctcatggaatattgtcagtattcattccaaaattgttactagaacaaaacagctttatccattcccttgccagcagaagtcttggcacgagatggctcttggctggaccataaataaaattccttgaatcaccagtatcttgatttaagaaagaaattttactgtgtctttcatacacaaaagctgattaacaatggttaaaaaaacactactccactttttcacaggtgtacaaaaggaaatataatggaattacattcaacaataaagcttaaagttcactctaggtaatagttgcattaacattcacatacacaagcacagagtaagtatatttcaggagtcttagcatagcatacagca

SEQ ID NO: 159829 - DNA, 1000 bp, Homo Sapiens
ttttttttcagaattagagttatgtttattaggtggggttaactttcatatcacccttcaggaatgaatactattaatttattcagaaatatgaactttcctgatataaaatatttataataatacaataatttgaaaactaacaatcagacaaaggaaatgagtaacattactaaagacaacagtagaaatttaaaaaaaagtagaattcaagattactaaagggttaaaaaaaactaaggtgaaaagtgaggaagacaaaattaacagacggtcggaaagctacagatacctacattattctagaaattctgatttcctcctagagtcctggcttacaatatttgggaatataggcttcaagaacttgaaatcattactttcagagcctcccgtcagacacacctcgtactggtagctctgggaaagggtcccggtgccgctcacgtccaccagatgccctggaaaggggccctcgggcaccgagcagcgacccactgaggccgccctgctcctcctgcacagccgcactgccacgaacaggaacaccgagaagaggaagagcgaagacaccgaggccaatgccaccaccaggtagacggtaagcgagtcggcctgggcttgggccggggccgcctctgggagcggcaggtagggctgagagaagccgtccaccaggagcacttgcagcgtggcggtggccgagcgcggaggctcgccattgtccttgaccagcaccactagcctgtgcttggccacgtcgcgctcgctcagcagcctggcggtgcgcacctcgccattgtgcgcccacacgccgaacagcccgggctccgtggccttgagcagctggtacgacagccaggcgttctggcccgagtcgccgtccaccgccaccaccttggtcaccaggtagcccggctcggccgcccggggcaccagctcggtgcagggcgcggagccgttctgcagcgggtacagcacgaagggcgagttgtcgttg

SEQ ID NO: 159830 - DNA, 1000 bp, Homo Sapiens
tttttgagatggagtctcactgtgtcacccaggctggagtgcaatggcgtgatctcggctcactgcaatctctgcctcccaggttcaagcaattcttctaccttagcctcccaagtagctgggaccacaggcatgcaccaccacccccagctagttttgtttttttagtagagatggggtttcaccatgttggccaggctggtttcaaactcctgacctcaaatgatccacccgcctcggcctcccaaagtgctgggattacaggcgtgagtcaccgtgcctggcctgaatgtctgttctttataaactacccagtcttaggtgttttgtcacagcggcccatactgcctgaaccacgactttctgcgctaaatgccgtgttgaagagcccagctctggcgccggaggctgcgcccaaggcaggcacggctgttcacgagttgcgtcaccttgggcacgtcatcacctctctgagccccgaagctcctcgacagaagtggaatcaacagtgcccatttcattcaagttgtccgggcgaagaaaatggaaaatcatgtcccttaagcgcaatacctggtaaaaaatctcacactgaactgcggccatgacaactccagcatcacccaaggagcctggacaccgagaagggcagaagcctgtgcggcccagcccccgcagcgcggcgaggaggctgcaccaacccttggtcttcagtcactcaacctccctggcccattctgtttcccaacttaagaaacaaaacaaaacataggtatagagaaggatttcactatcgaaagagaaagcgcactgacaagtgatcacactgaagccaagctggagagccacatcctggctaaacgcagggccattttctatccgggtcacctgccatcaggtggagttaaggccgatattgcccaatcgtcctagttttcaagcagttccagaattcctgttatgtgaactcacctcgtttaacacttgctgtaactctcaa

SEQ ID NO: 159831 - DNA, 1000 bp, Homo Sapiens
tattttaaagaaattatctttatttttatttgttcatctagacatgccaatggctacttaggccacattttgagcaaaactcacaaggtagttcttttttttttttttttttttttcaaacctcacatgtgtatacaaaatgacacagtttaaaggatttgtttaaaagaacaaagcatgagaaatacagtgagatacaagctcataaccaaacctaaataagtaagcagatctgattcaacacgagaaaagattacaaaacaagacctagttttgtaggaagcactatctgaagacaaagttgcaggacacgctgcaagtccctttgcggggagccataagcagggagaaataacctggtttctacttagcctagcagggagttatgggtaggtcagggtttcctaaataaggtcctgacaattcatcactgttattaaaaggaagagcagatttttcctatcaggcctggcagtgatatgtattctctctctgtcttaatttaatcttaactttaccgtcagcttactacacacagtcctttgattcctttcttctcaagcaatgaaagaattaaacctggcaagtcaactattgatggtccatggacaaggagaacaagattgtaaagaaaaaatctgtggatgatccaatagctgtgggattttttgtttgtttgtttgagacggattctagctctgttgccaggctggagtgcagtggtgcgatctcagttcactacaacttccacctcccaggttcaagcgattctcctgcctcagcttcctgagtagctgggattgcaggcacgcactgccatgcccagctaatttttgtatttttagtagagacggggtttcaccatgttggccagaatggtctcgatctcttgaacttgtgatctgcccaacttggcctcccaaagtgctaggattacaggcgtgagccaccgcaccccgccagtgttttaactagtaattggactcctattgaaatattg

SEQ ID NO: 159832 - DNA, 1000 bp, Homo Sapiens
ttttttttttttgggtccacgggctgtttattgatacacactaaacacaattttctcctaatcctagacccagcattttctgcattacactagcccagtggtcctttctgaaactacactgttcaagttacagacatatttaaatgtttaaatttaaaatgttaaatttaacattttaacatgtttaaatgttcatagacacatacaacctgcacttttactctttgagaaatgaatgcagtaaatttacttagctttctgagggaaatgatagcctgaaggcatgacgttttcaaataccccaaactccaactaagataacctggaacctattaaatggatatccaacattttgtactgaactctaaggatatgaacaccaggacaatggttattctgaggcacagaaaatacagccaaagcagcagctcagtatgtaccccgacagtgcctagaagagacttatgtgggagacaaagtttctggtcaggtgtatttgtatacttcatcaggcatatgccttgcattacatagctctcgcccccaacttggcaacatcttattggttttcagaatatactgatgacggattgccaaaagagctcatgaatgaatattttccattctaaggaaactttttttctttttgagacggagtttcactattgttgcccaggctggagtgcgatggggcggtcttggctcactgcaacccccatctcccaggttcaagcgattctcctgcctcagcctctcaaatagctgcaattacaggtgccgccaccacgcccagctagtttttatatttttggtagagatggggtttcaccatgttggccaggctggtctcaagctcctgacctcaggtgatctgcctgccttggcctcccaaagtgctgggattgcaggcatgacctactgcacccagaccactttttttttttttaaaagagatggagtttcctttatctgttgcccaggctggagtgcagtagcacaa

SEQ ID NO: 159833 - DNA, 1000 bp, Homo Sapiens
ttttttttttttttttttttttaagtattataactttattaaaatgaaaagacaatattcaaaataatgcaacaaaatgaataaaatcctttgtccaatactgtacacataatgcagaaatcagtgcatttttcttaagcatgttttaaccttcatttagttcatactaaaatataataagctttaaatagctcaaataatattcagcagtttaaactgtaaacagcttgtttaactgttaagagaacattgcagtaatgtacctctgttagtgagcaccttctcttctgtgcttatctcttcaagataaatacatggaaggatgtgaaaatcggaacaccaactatgtgtctcactgcatctaagtgaagcagccacagctgtgagagttttcaaagcagaaagatgctgatgtgacctctggaattcagacatactgagctatgggtcagaagtgttttacttaaaaagcaaacaatccccaggaaatactgaataggaaccagcaacacaaggccagcttgtgttgtatgtttattaatacagtctaaaaaaaaaaaagcaaaaccacaacacacatccccaaacaataactctcaatcacatagctaattgcttcattattttgtaaaactgacatcctaacactggcacctagaatacttttccatctgagtctaacgtaccccactgcttctaatacggcccgcactacgatgagctacttcagtgggtgggaccaagcaggaactgtaagggaaaattagtcactagttctattatcgttttatttttcaagatgtgtgacaggtacaggtgacaatatggttgccaagtaacctgctctccctccctcaacaagacgcaacatgaaacctggaagtatgaggccttggtatgatttttaacctaagcaggtacacccatggtaaagaatggataccctgccctccatggaaaagattgcctgcaaaaataaatggaacaaaatagaaaaggc

SEQ ID NO: 159834 - DNA, 1000 bp, Homo Sapiens
ttttttttttttttttttttggaaactagtgacatgttttattggtatcacaactataggctcatcataaaacaacacaaagttgcaatattctgcaggaaagaatcatttcttacgaaaataatttaatttttcagcactcaacagaaacaacctttagctgctgtacatgtattttctggcaagactctgactgtccatgaagccggggtccacggaggccaccttggctgctatgaaggagtggatgcagtgcaggacagccctcaggtcctggaactcgagttccttcatctcaatctgtttggtgtccagattctgaaacagcagctttactcgagttttcccatcatctgaagatcccttaagctgggaaaatttaaatctccagagcacattcttggtcttactctcaaaacaggtaaatcccaacgcgaaatccaccgtgaaacacagcatctctccttgccagctgcacatgtatgttctggacccggttctctgaacttccatgaacgtggctctttggaaggacttctcccacatggccagctcgctgccaagctccacgttgaaaacatggctcttcccatggccggccacgatgctgaagcaatagggcctctggtcctcaaagtcaaaatcttgaagacccagatacaagtttgcttgcaaccagcagtcctctgtgagccagaacttgtgaactttaaatagcacctcacagaggtgataggtcctttctgctcgcacccaatcgaatgtgctcaccggaggagtgctgaaaacgtagaaggacgggcccttcagtgctaggaacttgggtctgaaggtttgagaggagtcagctccttggagtttctcatttacccaccccatatgcacaacctggtcggaaggagagcagcatttgttcgccatcttcatgttctgaagtgtcagctccctgatgttggctgagaccgcccgcagccagtcggtgccatcctgggctgtgtaa

SEQ ID NO: 159835 - DNA, 1000 bp, Homo Sapiens
gcatattctaacaggtttttgaaaaagttgcaagccttttaattcattgacctcttttgactgattggaatttttaccattctgtacactctgaattataactaaacaactacatgttactgacaaatttgtgattctttgagtctaaacaacacagaaactagaagatccctttcctagatttatatacttgattttcttataaaaataacttcagttattatgtcaatatttatctgaaaaaggcagccctctgacagtaaactagtaactggaataactacagtatcattataagctacagtaaaacaacctgtaaagtaatttttcctatttgaataataaatagactggacaggagtgaaaaaccaaaactacgaaagaaaaacccaatgtaaataaaggatacaggtcaaaacaaagttcagaaggcaaatatgtaaatattagatgcctcaaaaatcaactatcagtgggaaaatttctatgaaagcaatttcagaaaatacatgaacacatatatctttaaaatatagaactctaaatacttgataacatatttaggatactctacaatgcccagttaattgctataatttttttccctcaggttttcctggatgatacggcaaactacagaatttgtgcacttactgttgctcaaatttgtgtacttactgtgtgcacatatactgctgcactgtttctcggctgtgaaaaattaaaagcattttttcaacctttgagaaggaaagaaaacaatgaagaatctcctcataataatacagcataacagggtttgtttactgtgccacatcatgggtgtttttaaaacgaaatataaatatatggttagggatagcatttttaggagaacaagtgaccaaaaactaagttacctcttttcaggtcagccaaaaaacgtgaagggaaagtggactttatacaacttagacatttatgtagatagcacagcagactcatgttcaagccagccacc

SEQ ID NO: 159836 - DNA, 1000 bp, Homo Sapiens
ttttttttttttttttttcataaatacacaattttatttgctatttccaggggaaacttaggcattaaactgtaagctgataaaatacgatacctaaaaaagtataaaagtataaatatccccttagaataaattttagtgaattaagtcttaatatctttaaattaaaaaaaccacaagcctatctactatgtcaaggtcaaaaatcaaacaacgctaagcggccagcagctccccagagaggatgcccaggagccccagcggccgccttcctcccaggctctgctggggctaagtctgccttctagaaaggcttttataattgtttaagccaaacatttaacaacatacaagagaccttacaaaaagaaggaggtaagtcctaatgctggagaattggttaatcaggtgactggcaaagaggaggatgaggcctaggcaggaagtctccagaagcattggaaaccagacagtgtcagagcctctgacctgcaggcgggaggccggtggtcagtctgcacagtaccccttgggaagccggagttccggaagcaaagcgcttggagcccgccctgcacgccgagtccccagactctgacaggtccccacagccagctgagaaaggtctgttttcaaagcatgcgggcagcggtttctaaaggaatcccagcagctcccacggcatgtcgggcagagcccgtgcaggtcgagtgaagtcccaaacatcccagaaagagagggaaggctgcatagttatacaaagaaaatgagagagcggcgagagagaggcatttgtgatgctctgtaaacatcccgaattttcaccgtgacgcagaccttcagctccagaagccagtggacaggcctccagcccaacctctatgccaggcgtgacaaggcactgacagacgccagctccccgtgagcccgcagtgggaggggcgaggcgacactgctacctcgcgctaacggatggaacagatcagtctccacgcggcaa

SEQ ID NO: 159837 - DNA, 1000 bp, Homo Sapiens
ttttttttttttttttttttactttataattatgaactttatttttatttactatgccaacattttcaggagagactttacatctgctttttagaattcattttacaggcaaattctaatatacagtttgtactctaaactgacttaaaatcaatgggaaaaacaatactgcagatattatttttgctctttgttagtaatgacttagagaccttacattctcgggtattattttgttaagtaaacgctttaccaaggagaaagtgggtaagcttattcccaacaagattaaaacatgtatcttcagttaatgacatagttgtagattggtgcccaccatcagaatcatttaatcaaaagtactctctcaaattgctgcagcaaaaacttaaagggagatgtgaaaaatcactagaaaatagaattcaagcatcagaatttaaaaaggaacaaggccatcatccccaaggaaaaacatcgggtagtacagctataattaattttcaaatgtgtgcttaagcatgcaaacataaccacccaaacgaatttaaaaacacaaaaactactgggtaagatggaaagtaaattgaaatggtgctgcagccttattgatcttaattgcaagcctgttcggtgatttcaaagtacatccccagtgccctagagccaggaaaccagtatgacaactctgctcagaaaccaagagtgcacctcagtgtctgtaacaccatttatgctacaggaacatttggaagtgacagctgtagggggatcacgctctctctgatgtactgagaaaaaagtaaaatacttatcggaacaatggaacattcaaagaaaacttagtgctttaatggaaaagtgacatgctgggaatatatttctgtgaacagctgtactgatatcttcaaacagcaacaattacaaatttatttcaacaaagccacacccaataggaggcaattcgatatttcaggcacaacttcaagcaattaagctc

SEQ ID NO: 159838 - DNA, 1000 bp, Homo Sapiens
tttttttttttttttttttctttttttttttttttttttaaaatcattctcaagtctttaattaaaatccatagagcatttaacatgaacagatgtttaaactctttcagtgactctcatattttaaaatcctttgcacagcatcgtgaggctaacttcatgctagaaatctacggataacgtaacaccacaaaaatacattcggagtccattccaatgcaagtttaaaacactttaattggcagacaatgtaaagatatttaaaatcaaaaattacaaaatgagcacataaaagtcttcccttttgaatttttaataaaatacttctctgtataagatctaatgaaaaattccagttacttataaaatagttgagaaatcaattaagatatgtatctatatatgtatgaattacacttttgtttaaatgaacaaaatgttgaacacttcaatgacagcacagcatctattactcacattaaactagatgaaaatactcaaagaagcagttggatacaggcaaaagaaaatatgatacttaaagccaaaagacaaaaaaatccaaaaaacgaaaacaacctccccatcccccaccaaacccttaactgtaagggaaagaaaggaagagagaacttaaagctaactatggaccaaattctcattctttttaatgagaaacagcatgagaatttggcttcaaattactaaaacagctacagaaacctatttggcctggacaatttaatagtataccaactgctgaaacaaccaagtgcagttggtgtacggctggagggaaaaaaaaaaagactttttacaggtttaactttgtaaaaaaatgtatcttttggaaaccatagtctccttcacaaattgcacttgagatggctgaatgcattgattgagcaaggcattattatttgttcactgacacacacacaaaagcagctacagatagttgacattttggactactaaaactattttatacatgtttttc

SEQ ID NO: 159839 - DNA, 1000 bp, Homo Sapiens
tttttttttttttttttttttttttttttcatttaatttaatcaaagactggtgaataaacataaatacagcacaattacttcagatcattcttcatattgtatacacacaaacccatgaacataatctgaaagaaacctgtagacagcaatgaaatgcatacagctttttcttccctcgctcaaaaaaaagtttaaacacacaaacttacaatctcatcagcacacactctcttgtgacaaatgattcagacataaatagtgggtgcaaagaaactatatgctaacatatgaataacctttgttaatgaaaaaacagaagcagccataatgattaagatacattcagttactgataactagttgtgccctaaagggcattatcaaaagagaaatcgtgctgcagagaaaagcgatatatacatacacaatgagaaaataaactgcaagattaatgcatgcatgtttaatactggaaaaatcacagccctccaaaatttctgcacgtttgttataaaagccctctgcactcaactaaaattaaaatgatcttaaaaggataatacttgtaaagtttaagtctcctcagccacagaaattgcaatggaaataaatgttcagagtcattttcaaaacaaaaccaaaacaaaaatctattcttccgatgacatgcaagatacactgctctacattcccaatgactaggaaaaaaaaaacctcaagtcaatttttagtttgcagatgctcaagaattttgtattccagcaggagttcaaatcttttggatcttttcaccaacaactactggattttcttttctgattttctcagcagcatcggctttgtaattgtaagagcaattgtgtacatctgagtaacggtgtacaccacagtaaacatttccacaccggcattcaaacccagtaagtcccactttcttcctgcacatgaaacagcgattctttttttgtttcggtttttcaagagacttgctttgctct

SEQ ID NO: 159840 - DNA, 1000 bp, Homo Sapiens
ttttttttttttttttttcttttctgccaatcaaagcacacaactttattgatgatacacacagatgcggacttgggtggaagaggttaagtcggtacaatagacagaagagcagtgcacttttttgatgaataggttcactatccatcaggcgcgtgtagaagaaagagcaaacgaaaaataattcaacctaagctgcaacaaatgcattttcagctcaagccgcgatatgcctctggtctctgcaaagcggtcccgcttggacagggagaccaccacaggcaacaatagcactcgtgatgctgtaatttgatgttctttgtccacagcaggcagctgaagtgatcccctcaccacatgaaggaggctgcaagggaggaatttacaatgccaacattgcctgcagactgcacaaccaagaagttactcaaagctctgtgggagcccctgcctggccaataagagtgtggtcctggattgagccctggaactttcacccaatgaggtggtgattggctaaggctggatcttcagtagcaccctctgcagattctttgacatctgcaaaccaagcgcgttgtgggtggattccgtcccattgtgttcgagagggccgtttatggggcaggggtttccaggagaatctctctgtttccatttctgataaagagggacatgaatgagaagagcatctgggcaccgactaactcccccgccaagactggcttttcagacaaacccatcagcggtttcaaaacctgaaccttagcacatccacttccctctgatatcaaaggaaacttcaagtctgaagcggacttggcaagcatgttattaataactgtcatgcttattaacaaatttaatccggcctgctgcagaaatgagttgcagcaacgtgacacagtctcccgacacacttcattgatgtacatcttaatctggccctgactttcaatactcgcatttaagttatccggggcacacaaagcctctctaa

SEQ ID NO: 159841 - DNA, 1000 bp, Homo Sapiens
ttttttttttttttttttttttttttttttttgttggaaaggagatgtttattttcttcttcccatgctatggaaggacattgtattccgcagttttatttcctccctcaaggagaaaaaggacagcaggtctctgggcctcagggctaagctgcccctacttatatagagctaaccaagacagtacagaaagactggtgactgattccaaatctaccagctaacacatccaccaccactgcgggcaggcaagtgactagaaggcaagttgtggacttggcctcagggaccaagaatttaaagactacaaggtgatccaaatgtaaaggtaaacacctactgtgcatttgaccatggaacccacctctctggtattctggccacttacagtaagtggcatctaaaagggctgcagcctcccagcctggtgcaagggtcagctctgtcctaagtctcctatcattctccttggccttgagtttcagacaaaagggcagagttctaacaaatcctctgacagaacacgttctcagccaagtcagtcccaaggaagtatcatggcagagagctctggacactcgcagtagtctgtatttacagaaccctcccacctcggggcctctcctgggtccttccatcctgaagctgattccccttcaagactatttgaactctcaacttgagtggagtgcagggagcacagtcagcaaatgtggaatatggacaggtggccgggacccaggagaccgtgggcctctgcaacgcttctttaaacttgagcttcaacatttatttaaataaaactttaaaagtcataaccaagcatgtaaagaaaaatactgtcatcttcagctcattttttaggaagggcaacagaggagaaccaaaataaactctggaatttattaggtttaagataatgagtgcattttttaagtgttaggctacgtataaagtttgctaaccttgatggcacacacacaaaaatctctagatggag

SEQ ID NO: 159842 - DNA, 1000 bp, Homo Sapiens
ttttttttttttaaaccttcccttaaaggactttatttctctatttttatatggatcatttattaaattagaagactaaaaagtaaaaatatattttacaatcaaagaaaaatctggacaatggaccccagtaaaataatcagaagcgcacgttctgagaccactcctgcctggcaccctgcagggtagcgcccagggagcatctgcagaggggagaggagaggagggggagcctccggcgacctgtcttctatctccggagccccgcctgaggctccaagatggcacagtcaggctgtccttagtgaccgctgccacggagctggcgatcggcctgcatcttcaaacccaggagcaggagcagcagaggctggcaaggcctgggccctcagacaccaggggcctaaacccagctcccaaacccactgcagcctccccttgtgagctggcagacaagcctgtccttctgagtgtgacgacctcatccacacctgacacaggcgggggcgggggagggtgggggttgtgaaccagctaattctggggaccgctcggaggggctcagcaagctgcttctacagtaagccacttctacagtaagccttcaaacaggaaataaagcataaaatgaaggaaagaagaatcttatttaattaaaggccttgcaaaatgtgatttgtctattaaaaaaataaagcgcttgtgaaaaagaaaactaagagatggcggcaagcgtggtcatcggcaaagggttgctctccctccagcgaggctggcccccactgtgtgggtccctcgggcccccacacgggctgctcaagggctggcagcaggggccacgtcctctctaggagacacccacagagccacatgtgcacgcgtgtggcagtctcactgcaccccagcaacgcgaaggcagaaaccggtgctggtggccacacctgggcgcctggacaccgaagcccccagcacagtgaggcctctgagtgtggcttgtggt

SEQ ID NO: 159843 - DNA, 1000 bp, Homo Sapiens
gagacagggtctcattctgtcgcccaggctggagtgtggtggcacaatcttggctcactgcctggaccttccaggctcaggagattctcccacctcagcctcctgagtagctggaactacaggcatgtgccaccacaccaggctaattttttttgtagagctggggtttccccatgttgcccagattggacttgaattcctgggttcaagcaatctgctgagccaaagtgttgggattatgggtgtgagccaccacacccagccctttttaatttataaaatagagacagggtcctgctctgtcacccaggctggagtgcagtggcacaatcttggctcactgcagcctcgacctcttgggttcaagcaatcctcccacctcagcctcccaagtagctgggactacaggggtgtgccactatgcttggctaatttttttgtcgttgttgctttttttgtagagatgaagtctcgcccaggctagtctagaactcccaggcacaagtgattgctcctgcctaggcctcctaaaatgttgggattagtggcgtgagccactgcgcccatcctgctaagcctatcttgaaatgatagatttttctgtctgttcctatctgccttataattagtgacagaccatctgaaccaaactcaggaaagaattaccttaggaaagctttcatcatcaaaaaacatcttataattgcagaagtatatacaagatgatctattatcaacagtttataatggccaaagataagtcaccagaatatttgcagaaaaaagttataatggccaaagaatggaacaacttaaatacacaggggatggtaaatccatacaataaaatactgtacacaagaaagaaaacataagtggcactctacacactgctatgaaagcagatcaatataaaagcagaaaaaagccaagtatggaagtgtagactaaatataaaatactcaccggaggccaggcacagtggctcacacctgtaatc

SEQ ID NO: 159844 - DNA, 1000 bp, Homo Sapiens
ttttttttttttttttttttttttgcaggttttcaattactttattttagaaaaacaaaggtttacaatttgtgccataggcagaatatcatgaattcaacaagttagtaatgcagactttcaaaaacctctatagattagtccaaagtagaaaattattttttgcccactcttggactcagacacattcagaaaaaatatatatttataaaaataaaatgtcaagcctaatcccaccaattgatagtcttaatatcctacactggtttatttgatcatttaatgcataaggagtgttgaatgatttttccctgtcctaactccatgtcgtatgaagcaatgatgaaaatatgttactttttgcaacaccaaaataaaaaggtcccaaagcaaaacacacacaaaaagtcactaacaatatccactaaacaaaaacagtactgctaattcacctgctcatatagacccttccttcaatcccccagatacttggcatttaaatgttatttctaaatcagataccaggaagcaactatgtgagaaagaaaatgaaaattctaggtctaatacatgttaaacaagtttcaggtaatagtagctgagaaaaatattgatgcacataatgaaacaaaaagaattgccagatataatgtggtgcacagggtactcgataaaaacatgcactttgtctcgctgaaatgtccttaaatattgtctgagcaccaaattctgcaaaagcaaggatctagaattccgaattttagaagttataaagagaacttcactgcaattaaaagagaaggcaaaaattccaacttcctgaaggaccccattattcatatagaatcatgacaaaatttaccatggaattagaatgatacctatgttcttccactagattcacttattaagagatctgtctttatatggaagtaatgtttcacggaatgaaactaacattcatagtaatctctgatatcacattgaagggaacagcata

SEQ ID NO: 159845 - DNA, 1000 bp, Homo Sapiens
gcttagaaaatgctgtgattttattcatagtatatacaccacaaaacagacactttccattattttgattacttcaaaatttaaaatctgcttgtttttcaattgatttttttcatgacagatgctgagttctgacccatttttttcccctgacagtatcaataggctgcccgactacatgatacaattgtttttagcatttaaatttaagactatggctcagtgtttgaaaaataaataagttaacaaaagagaaacattattaggaggaaaatgaaaacatattcaccacatgataaaaaaaatcactccttaaaaatcaataagtggtgtgagcattatttcacttaacctacttggaagcactataataccaatatacaaataaaacagaacccataggtagcctggaatgatacagtggccatcactaattaggggctagttgacaacataaatacaaataaatgaaattacaaattaaaaaaaacttgtttttagcttaattgttggtgcagaatgtatggcgggggctggttgtctggcagccgctttagctttgctcgcttggcttgctcgaacggcagtttctagacgcactttcaactcaggagcagcccccattactgtcttgaaagcatgtggatacagaggtccaatatgcattaaattctggagtgcaaactcatgaagatctttggaagctgaacttgctgaggcaaaagaattttcatccagcaggtaagatatcaaagtgggaactaaaagagcaagtagctggactctgttttgttcttcaccaagagcaaccagtgtttcaagaacttttattccttcttgaaccgctaaaagctctatgttactggctggtctgtttctttcaacagcttttagcttttcaaccactattggagctaatgaatgaatataaggagttgaaagggcacgattggaatgctggaagactgagaggagaagctggtaacatttggcttgaacc

SEQ ID NO: 159846 - DNA, 1000 bp, Homo Sapiens
tttttttttattttttttttctactgttctttcttcctcttcttcttcttatttcggcaaaataatttacaggcacatgtaaaatacagtaagaatactgggtcatagtttcatccagtgaaactctgtgacaatccttcactagaaggagagtacttttttcacacagtcaggggatgaggatctgatccgaattacatttggtcgagtcactcattcccacagatttgagtttgaatgcagctgtggggtacatcatcaggaacattgcacaattattttatgtcattcaaaagaatgatggaaaggaatgttagcggtgcttaaaggcctcagtaggcactcaataattttatagaatagttaaataaatattgcttacacataaaaactcatctcatttcaagatgagggggaaaaaggcatttgggaatctcttaatttaaaacaaaacaaaagtacttgctaagggcatgatcctcttatgaatccacaagaattcagccatcaacaaaaatcccgtgagtggaaaattgtatggatctctaacatgacataaaaacgcaactgcgttttacttgctaccttattgcacacctcacttccttgattgagcctttaaaaaacaattccaagttgatatttttttttaaaaagtagatgacaatcttaacattttactgtattttacattcactctgctaaacaaaagcctttaaacaggcacaaaacactgcaacaatacattaacttcctaataaaacaaacctttttaataacattgaaataaaatggtttcattttgcattaaactacataccatgaacttctccaacataaaaggactaaaaacaagcattagaagatatttacaaactatctttaaacttctacaggtctctcctcctcctcctggatgtgcacaccccaatccagttcacccatcaagtgcacagcaaaggaagagaggcccatttaataaacataatgtttccaacac

SEQ ID NO: 159847 - DNA, 948 bp, Homo Sapiens
ttttttttttttttttttttttttttttttttttttttttttttttttttttttgtgtgggcagaggagggttttattctggacatgggtggctgggtggtcagtcccccagcaagatagaggcctcacgcacatgctgccggaccactcgatctaagagggtgtgcacatctcgggcagcctgggcagcagcctccaacacccgctccaggtggtcctcgtgcagccgggcatccatctcaagcagcgcaatctgtcctgaggctggcagcagggccagggccagctgggggccaccagctgcttcctccacatggctgaggtccgccagggctgtgccgtccacgaagccagctgagcacgcacacacaaagtctctcatgggtatcccggcatccagcactgccagcgtggctgcattcacacaagctgcataggtcccaccatctgcctgtagcacctgcacatagatatcaatctgggagcgtgggtgcagctgtgtgaggatggctgcttcgaaagtctggcggagctgcaggcccatctcacaggacttacggtccccatgtggccgtcgcttgcgctcacctgtgctgaaggtcgctgaactatattgacagttcactagggccctgtccggcagggctcgagcccgggagccccggatctcgtgcgggccgtagaccacagccagtgccttggtgttgccctgctcaatgtaggccgagccgtcagcctgcgcgaacacgcccatccgcgcctggatcttgcgcagctccccggcgcgccgcccgtccacccggtagccctggtccgacaagagctccagccccgccatgctgcccggccgccaggtccgctctctgcctacttctctgagccgcgggagaactacagctcccggcggctccgaccgcccggaatctacggtttccggaggtccgccat

SEQ ID NO: 159848 - DNA, 1000 bp, Homo Sapiens
ttttgatatatttatttgatttatttacataaccagtagaaaggagattttaaaaatatttattacatttgtttctagaaatcatagaaaataaaaattgatacaattttgatatacaactttagaaaggcatatttatcctttcacaccagagaagtttatgcaatgccagacatggaaataccaaagccactggtgacaaagggtaaacgctactgatagaagaaagccttgtccatttttatagttttcttctctaccattatttatttttgagcaaataccagtccagtggaaagagttctgaacataaaaggcacctagagtaaaaattagaccttaactaataaaacagctgtacacgtttacatcaagaaaaaaaaacccggccagcacagctcatgcctgtaatcccaggagttagcctcggcaacatggccaaacccccgtctctacaaaaaaatacaaaaatcagctaggcgtggtggtgcgcgcctgtactcccagctacttaggaggctgaggtgggagagtcactggagcctgggaggtcgaggctgcagtgcaagattgagaattgcaggattgcactgcaatccagcctgtgctacagagtgagatcctgtctcgaaaaaaaaaataaaaaaataaaatgggcctatcaatgcaacgttcctgcaaggcattgataatataaatgcaaaagccaccgcaaccaaaaagtctataatgcttgcctgaatctagtacataagcaggataatgacaatcactttttgtttataaatttgtagatgtcttattatttcagtcagcatgagtactgtatttatatttgtgggtggcagctctcaaattatttatccatagtccagatttgttttgttgcatttgctcttaaaatgcattgttgtatactccatcacagatgtgtcaaatactcctgctgtcttttgagaatgtagcaaaacctaaacctgctactttaaaccaaagtcct

SEQ ID NO: 159849 - DNA, 1000 bp, Homo Sapiens
tttttttttttttttttttttttttttttttttttttttttttttttttttttttttttttttttttttttttttttttttttttttttttttttttttttttttttcaagtctttaccattttatggtatcaaatttcttaagctcatagtgacaacagtacgaggatggtgcttttgacctacggtctcatacctcccttccttcagcatcctcgctagacccagccttgaaccctttgtttggcatgaggtagggcctcagtgcctcagtggcattcataattattttctttccatggtgaggttgggagagagttgagctcttctctagaggaggggcccaggtaaggctgagagggggctccgagaagctccttcctccacagccctctcccagcagccactgctgtcctccacaaaggcacctctggctcctccacttcctgtgatccaaatggtgggggaagagcagcaggcagggctgctcctcaggccaaaacaacctggtggtgggagtggatggcacagaggagaaagcagtggctaggagtcaggtggagatgatgttttgctccctgagggctccaggtcagctttgctctaattttgttttcatttgttttcacaatcgtggagggagaactctctggaggcttgggaaggtggaccccagctgcagagaaacacaggccaagacccacacaccacagcccaggtcttgtgggtggacaggagaagtggttctgattcccgtctgggaagtctcagggacacggttcaggagtaatctacaggagaagcaccagccttgggcatacgacagtggagctgacttctctgggaagagatctgagagtcagggggccagggaggcatcccccttcccagccgctgggtgtggctgacctccatgtcttccaaccagtctggcctccactcccacaggggcagggagaggttgggggtcaggaagatctcatcccgtggggagggaggtg

SEQ ID NO: 159850 - DNA, 953 bp, Homo Sapiens
actttcagcccctttaattaggtgctctgagaagaggtcagaatggcaggcagggggtggggaaggcggtgcttcttgagccccacttagcaactggtcactcatcctctggcagctggatcttgctggggtcgaagcagttggattccatgatgggaaggccattggcctctcggtatttcacaagcctctcagcttcgcggcgggaccactctttcatcccatcccacgctcttggacaccctgtgcacctgtagtcaggcagataggccacaaaggtgctgccaaggaccaggatgatggagacgccaaagaagaagacaagtcgcatgttccagacgtccaaaacggggtccttgtcataaccatgggagtctgggttcttctcatacaagttttcgtcctcgggttctgggtcctcttgccacggtgtggtcggttctgggggccgctttcccgccacagcggacggggcgaccacagtcctggagaagctagattcccagcggacgcgggcggccgggagccctcgcgtcgccgctgccgccaaaagacggcgagcgctcaaaccaaacagcccagccgccatgacagatggtgctgcagggtctcaggggcggggaaagaaatgcgactgtgcgcagctgcagtgggtgcgagcgcgacaatcatcgccccgcctccgccacgctatataggtcccagatctgatttcagttttccaatgaggcggggcgttgagcaaccctctttgcttccagttgtcgtggcttcgtggggccaaccattttcggccaggctgagaaatttcttattgatgggtctgctcatttcctgcataggaagaaatcggtgacatttgggtggatacagttcccagccaatcgccccgagttccctcgcccactggggaaagaggcagagcttcccgctagtctttcatcttaaaaaag

SEQ ID NO: 159851 - DNA, 1000 bp, Homo Sapiens
attgcttgtaaattgtgctttaatttctgcaatcagatatgatgcagtgagatacaagtataaactttcattgtgcatccagaaaataaaaagcacaagtatacaggtttagctcaacagcttattcccttataaagaaaaaaaaagttttgaattaaagctagtttatcttcagtgtaaaaacttggaggtataaacaaactcaagatattatatacagtaaattaatttacatttccaaacttgcacagtacagcattttaaacaaagtaaatggtctcatttcagctctcactgttaagcataatccacatcccaatctcagataaaaatttcacaatatataaatccattgagaattctgtacacaaatacgagttatagaaatctgatttcaaatataaatacaaaaattgtcatgaccttacacgttacaacagcttatttttctattgtaattttaaaaaatcatagaaaaatatgtcaatgcacattcaactgctatgacaaaggccatgaccttgtgcctttaaaccatactttgtagagtgtaaagcatcacaccgggcatttttggaatgaaaattacaaagcctgaagaggctactgtataaatattcacgttataacgtggtaacaaaaatagctccatagcatatttgggaggcaatggggcagagaaggaagtggaggttagtgctaatttaagaaggcctatagaatgtatgtgaaggtagctaaggaactagttagtgtattttaaaatccctattgcaagcctaacactgacctcgctagtaactcttaaggcaatcaagacggaacatgtgtttggcccccagatgcacgaatcctgccctcccctcaacctttgttcatcctaacagaccaacctggctcctgcattaatatggagtggggagaacagcaaaacaattcactgtatgtacaaaagacaattcagtgcaaacctagaaacttctcttagtcaatagtttcc

SEQ ID NO: 159852 - DNA, 1000 bp, Homo Sapiens
ttttttttttttttttttagaaagaggaaacattttgattattttattttttaatcttcaaaattttctgccatgagacaggaatgcatgatagcaatggctcaacatcttcacatgaaacacttggattcattttcattcacaagtttttctaaaaacatctacaatttcataaccccacccacttccaaccattatcacagatttaactgaccattaaacagtagttgccagcattaaatagctggaacgcttcctgcgtattagtagtgtcttttgaaactaccaccgaagagtatcatgattataaatctcattgtacatggcaaccccaaaggtgactgatgtcctcaaataaactccctgctgatcactgagagctgtattccccaggtacttaaagaaatgctctttcttctccaagaactgcctgttcatgtcagtatatttcttgcagggagtatagcacatgctgatctgatgatgtaataatcattgctaacagacagatatatatgcctgatacttactggcgcgctccgataagtatgtacagaacatacatactgaagaaagatgggttgcttggaatctctcttcttttgaagagaactattttgaggttttttaacagttgtaaacaaaaggaaagatatacagatacctatacacatagagatctacactgagtattttcaacgtggtgcatatcttcttatctagagatacacacagtgtctccactcgccccttcacacacacccacacccttccatacagcgtgtgaatataaatgttgtaaatgtccttgggagttcactggagttttcatattaccaaatgatgatgaaatacctgatttgtattactcctgagaagatattagaagggaatgacagttctgatgcactttggaatggcacaatcacgtaaacgcctgcatacttaagacttcttaactcatccaaagtttctaaacatgatttgaccaaaaaaatag

SEQ ID NO: 159853 - DNA, 1000 bp, Homo Sapiens
tttttttttttttttttttttttttttttttttttggaagtcaaaagacccgtttattaagcacctcctgtatgcggcacccctggggggtgaccttgggttggggtcacaacctcccggtcatgttctttcttcccctgcagcctgaatcttggccagggctcagggaaggggccagccagtggtttcggggcagaggagcagggcccgcacaacacgagcgcccacgggttctgctgtggggcactgggtaggcccccgggaagggctgctgcccccaaggaaggttcctccgaccctcagctccatggacgagtcaaggactgggcagatggccgtgtggggctcagaccaggccctgggaggggactgggcctgagtgggacccagacggtgtcctgggtggacgccccttgtggccagccctgccagccttctgtcgcttcagcgtctcctccaccttctccttgaagcgccggttcttctgcttgatcttggccagctcagccttgcgcttggcctccaggtcagggtccttcccctccaggatcagctgcttccgtttgttgatctccttcttttcgtcaaagtgggccgcctccagtttgatctcacactctcttcgcaccacgttgacctgtgtgaggatctgtagcacctcggcctcttccacggagaactcctccagcttcttcttgatctgctcctcgatggcgtgcaccaggtggatgtcgtactgtgtcaccagcgtgatggcctgaccctgccgccctgcacgggccgtccggccgactcggtggatgtagatcttggggagcccgggggtgttgtggttgatgaccacctgtaccgtagggatgtccaggccccgggaggccacgtctgttgcgatcaggatccggtagatgctggacttgaacttggctagggcggcaaagcgttctttctgcttcatcatggagtgcagagccacggtggggaagctgaatttgcgcagcat

SEQ ID NO: 159854 - DNA, 1000 bp, Homo Sapiens
attatatacaaaataatgttataaaatgtagaaaggtcagtgcttctgattcttaaattattgaaatactagactccaaaataaactacaaaaaaaaaaaaaaaaacaaaataaaaactcatattattgatttctgaagaccagctttgagggtggtctggggcagtagtggaccagagcccaggctcgaggttgtggagatgggcttgagggaggaaagggcccaggcggccgcagcacctgatttccccctcagtggaatttccaacacactgccctgagtgccccagttaggcctggcacccttggctggtgggaggggcaggccctctgcctgtctgcttacagaagcccagggccagagggtggtggaagccgggtagacggacattcttgcccaaagggcctagaccagagagccaggcctgcatacagtagttggaggcatggggcagaaagcactcccctccctcgagcactcacctcacctccagggcaaaccccagcaagagacgcacccagtggttttccagcccacaggaggccctgccctcattggccccctctctcctttctgatttgggcccaactgtcgccgtggagcctgggccaaaggcacttttggaaacacggatgccagtggaggccacagcagctccgggccccatggggctactgccactctctctggaaaacaggccggagccccggaaggagccccctgaaggccactactggcagggcagtgcccagtggcatctctcttctcttctgttcctctggttggtgcagctgccaatctgatgccagacagacacccaaaggtgtggaagggtattgcatctcttggcaagttcacagtctgtccggttcctgccattccctcctcctcctgagagcagcacgttgcatatgaaaaacgtcccatccaggatgcaatgtaaacaatgcagaaggaaggtccagccgcggggctgagcagggatgtccaggtaggctc

SEQ ID NO: 159855 - DNA, 1000 bp, Homo Sapiens
agcaaaacaaaactgttttatttatcaaagacaatgaaaaaattagaaaatacagaagaggttataaagcataataaattttattttttggaaatggaaaaatgtccctgaatagttagatgtaccttttagtagtaatgtctaataataaataagaaatcaattttataaggtccatatagctgtattaaataatttttaagtttaaaagataaaataccatcattttaaatgttggtattcaaaaccaaagatataaccgaaaggaaaaacagatgagacataaaatgatttgcaagatgggaaatatagtagtttatgaatgtaaattaaattccagttataatagtggctacacactctcactacacacacagaccccacagtcctatatgccacaaacacatttccataacttgaaaatgagtattttgcatatctcagttcaggatatgttttttacaagttaatcctaaagtcataaagcaagaagctattcatagtacaagattttatttgctaagctttacaaattaaactctaaaaaattattacaatgatactgaaagatattttattggccttttaaaagacaaacacaaatgagaattatcttatttagaaaattaactttgaaaattatcttaaatgaaataaatataatatctaatacaatctcttcctgcaagatctcttaagatgggcaatcctaaaaatgcagcttcccatctgaaaatccctaaaactggtatgtcccttaaaacaaaatttatttttcttataaaggacatttggtattcccacattttcttaaaatttgtcctaaaacaaattctatctttaacactcacgtttctaaatatatatatgtgtgtgtgtatatatatgtgtatacatatacacatatatatttagttcacttaatttaaaattagtgaaagctatctggacacaatttctaagaaaacattgcagaaagtaagttatgcatggttattta

SEQ ID NO: 159856 - DNA, 1000 bp, Homo Sapiens
tttttttttttttttggggcagctaaaatttttattctgttgtcaaggggcaagatgccagcttggaagtgccaaggagctaaagggcccagcactgccggccccagaactgtctgttcaggctgtgcagtaagcaccagagcctcgcctgtccacgaagggtgtaagcctgtgctccacaatgtgctcagctccagagaggcccaacaacctcaggagggcttggctgtgggtctgaatttctttcctttgtgcttgaagctgcgcagtgggttctgggactttgctctcttggccttcctacaagaggaagacagcttcttccgcttcttgtgagggcgcaccaggccacggagagcaggaggaaccaggtagtcaggaacatggcccaggtggggcttcaccactgcggggtgcaaaggtaggtcatgccgcagcagctggaggtccctagggttgtcttcaaagtatgtcttaagcttctcagaatgcagaagctcttccttgatctccttcaatcttgcctcccgaatggcctgcttagtcactgagcgcatggcatccctgcagcgatagcggaagccctcgatctcctccatccggaactggtaggggagcagaatggggcccctgttctctccactgagaagctcctcaatcttgcctaagtggaactgctccgtgggaagcacaaaggttaagactatgcctgggttgttagcgcgtgctgtcctgccagctcgatggatgtaggcctcaggggttgggggaagatcaaagttgagcacagcagacacatggtggaagtctatgccccgggccacacctgcttccggatcagaggccttgtcccctttgggccctcggccccgacgcttgcccttgactggggcccccaggacttcagcatcagttgctatgacacagtcgtagaagccttggttgaactgtgagatgatgtggcacctggagcgcagtggaagctctccattgagcacac

SEQ ID NO: 159857 - DNA, 1000 bp, Homo Sapiens
gcctgttgtagaatattgtttatttctgggcataaattgttgaatgatgcaaaacaaattttatgacacaaattagtattgcttgacacaataaaaaaaggttaattatttaatgatatatcttcatttaggttcccttgattggggacatgggtaactaacttaaacaaactaccttacttgacataaaacttataacaagggaaaaaagttaacaacttaaagagataataaaatcaaagcctattatgttattaaaaagattcacgagttactaccactactattactagttaatatttattgaattactctgtgcttggaactgttctatgcattttacttgtgttatctcatttgatgctcacaacaaccttgtgaggtaggtattattgttatcatcatcatccccattttaaaaggaggaaattgaggcacaaagagattaggtagcatgcccaaggtcgcacaactgaagatggtaggtttggaatttgaaccgagacagtctgacaagatatatgagactaaagtcaggaattttaaattggttaggcttcttatttacaaatcatataatcatagaactacaggataaaaatagttatttcagaatatcataatatctaaaattagtaattctgaacctttgtcttggcaaatgtaccatcaattaagacaatttttacaaataaaggcagaaacaaaatagggataagatgcagaagagaataacagtcctaccatatatttggtttagtattttcttgtgcatagaaaccagtcatgagttaaataaggcctaaatttgagaaggtttttggtttcattatctaatttctattttattccaaattattttcccaaacagaagagaacatacttattgtttgtgcctacatatataaaaaatgacctgataaaagatatgagatagctaatcaacttcagaaattatttcaaatttgtgaattatgtttgtaagtatctttttggaagt

SEQ ID NO: 159858 - DNA, 1000 bp, Homo Sapiens
tttttttttttttttttttttttttttttttttttttttttttttttttgaatgcaaaaaccacgcatttattaaacatatgattaacttaaaaacaacacaccagtttgttttaaagtgctccttatccaaaaccttaaacaaaactatcagcccaaaatgaattcaaaaaaacagattacaaggcaaacaatgacaataggtatggacaggcactaccaaaaaatgctatttgttctttaattaaataatgccattctcaagtgatatagagcagtcatcttgacagaattcctttttgtataaatattcataaataaaaatgtctctagatattggaaagagctgcaaacaatactttacaacagcagcttaatatctattttaggaaaaaaaaagcactaaaattctcttccattgaaagttgtttatttctctagtgtaagtgagcaaagtcactacagcattaaaatctcttttctagaacaacgtaaagaacaacgtatacacatcttaaatttggtaggtcacaaaagttagaatgcaatcatcttttgaggcaacaagaaaataaatacataaaaattaaacactttaacccaaaatttggtattgacaaatcagtagtgtcaacttcacatatgaaggacaatacagtctggttatttaaagatgctcaatatgtcatggtatttgggctaaagatacttagaatattgtgtttcctttttgattaaaggaatacaatacaatcaccatcaagctgctatcgtaactcatttttagctgtggtaaagtgaccatttggtccatggcacaagttacatatatcacacttctgtcaaactgaaaccttataagatttcatgtttataagctacaatacaccctgaccatgctgtcagtcccctcagagtttttaagaaaaatatctacatttgtccttatggatgtcaaaatgttacaccatcatttgttcaaaaaaaaaagatgcacattc

SEQ ID NO: 159859 - DNA, 1000 bp, Homo Sapiens
tttttttttaaaaattctaaattacaattttatttgtatttaaaaatacattggaaattctgcatattcccatgatcaaccttattttcaatgcacattacttaaattttgatgacacagttgattctgacaagtcctttttcaagctgaacaccaaaatagggaaactcctgtacatttccatgggccctgttcccattgatgtatactgcttccttactaacagtgagggatgactttcatcagtcttttatcacctgaacagtcttccggccataatgatagtaactataagctgatgcagctgtggtgaaagctgtaaaacaccatagtatctgaagataaatgctgtcagcatagttgaaaactggagctgccaaagaagctgccaccaagattaactggactgctgtattcaccttgctgatgaatgttggttttaacctagcagtggcatagcaaggattgaaatacttggcaagtgttcgtggtgttggaagagttcggtatctgacataaaaaacagcagcaatcaacattacatctctcgaaatgatcatgtaagtaagtggaactggaataagatctgcataggtcaagctaacatataagatactgataagtattttatcagcaagtggatcaagagcacttcccaaagctgatctttgattggcccagtttcgagcaataaatccatccaacaaatctgttagtccagctaaagcaaaaactcctagtgcaatattaaaatcttcttcaataatcaaatagcccagaactggggccaagccaattctcgtcattgacaacatattcgggattgtccatgggttttcatacaggctgggggtgctcgccgggccccactggccgcccggggcttcggcagcggcgcccgctccggccgctggcctgggagccgccttccccgcgcccgaacagtggttccgctggccgatcccgggcagccgcaagccaagagcggccggacgcagcc

SEQ ID NO: 159860 - DNA, 1000 bp, Homo Sapiens
ttttttttttttttttttaagcacagtgtattcaataaaacatttttattctgtacaatatatatgtgtatttaaatatatatacatatgtatatatatatatatgcacagagaaaccttagccaacaaatccctgagtccatgggaacccaggacactaacaaagggaaaggagagtccatgcctaaagagtaggaaatatggcaacatctttccctttcctcctggttccctgcaacagagggaagggaacagtcactacaaattactaaaacgagggtttaggtggggcaggaaagtggggtgagagtggtaggatggggaactcagatgccaccagtctgggaaagtaaaacatttgatccagcatgaaagccaacatgaccgcagaggaaaaagaccagactgatgggcatgcagctggcctttggtatatgccaagcctttgcttggtagccccacgcctgggccagcacaacaaatagcacctgtggggcctataagccgggaggggatgggggagatagggactggggaaatggcccttgagtgaaggaaagggagataaagctgaggaagaggcctcaggcctcagcacagggtggcaacactaccattcactgtccctgtgccatttcttcagactctgggccgccaccaccaccagatggccaagagcagataaccttttgtccacagccaggtagagatgggcaacttacatggccttgagaagaggtatagaaaaaggagtgcttttgagggctaccccctgttgtgaccattcctgaagtgcagagaccacaccagcaaaacatgcccagtcttagtagtggggacgaagaattgatgagtggatccagtcagctccggcagacaggccacagggttgccaggtttgatgagccaaccaggtgagcacacagcttcggagcactgccctgaatcctgtcttctccctcaggactgccctttcctggccacaccaagtttggcacct

SEQ ID NO: 159861 - DNA, 1000 bp, Homo Sapiens
tttttttttttttttttttgtggtgacagactttctttataaacatttggaagttttctcccccatcttcttaagaagcaggggggcaggtggaggagagtgaggggagagctgcccggtgcagacccaggacgagggctgcacttggtgtggccgtgtcctgagcctcagtgaggctgggcagatggtctcggagcctccatggggcgtagcaggaaccgggcttggcttcctattgtgactgatgagaaaagtgaccacgtgggggtcagtcgggggcaaggggctcagccccactggactctgggctgcagaggccaccccccaggtgggggtgcccgcagggatggaggcagctcctgaactggtggccagcccacggggtactggaagacagtggttctgatgggttcagccctgctacttggggctgagctcagccgcttggctctcttctccagccagtcctccagatggccctcggggagctcaggagcatctagtagccactccctggctcgcctctcctcctccacctggatgctcagctcctgcaggtctcgctctgacatgtgggaaaatctgcagttggagccaaagtcgcactggcctgtcagtagaaacttcctgcagggccgcttgttctgctcatccagcaagatggcagctgcatctcggaacatgtcgtaccagaccttcttggccttgaggtgctgcagcccgttcaggtgcttcttgcggttgtggaggttgtcctggaaggagcggtcgcagtagtcacagaagtatcgcttccccatggccactcagagcaggtgctttgctgcctgtagtcccagctatttgagaggctgaggtgggaggatagcttgagcccaaggaggtcaaggctccagccagctgagattgcgccactacactccagcctgggtgacagagaccagagaaggaagtgttcaagtcttccagtgcggagaaaagagactaggactcgcccctc

SEQ ID NO: 159862 - DNA, 929 bp, Homo Sapiens
ttttttttttttttttttttttttttttttgtggagctgggggatgtttactggtgtggggggacctgggaacatcactgtcgttcgtacatctctcgtaggatcttcatgctttctgagtaacgaagctggttccgatgagaggcctccttccacctctggcggatgcgtttccagcgctgcatgttgcgatagatgagtgtggagggtgagggctcgggctcagagggctcatcgtcaggggtgccctgcatctcaggctgcagtggagatgggatgcgggatctgcaggcatctccgggtggccccgggggtgtgggtggcggcagcttgtacacatcacgactcttgctgttggttacctctgagccctcctcatcctcaggcagcgggggcaggggtgagctgggagagcattcacgctcgcgcacagaggggctgttgcgcatccaggcgcggcagattgggtacagtggcgtgttctcgctgaactgggccaagtccacgctccggtcgaacagcttgatcacatatgtgttggatcgctgcggccctccctcagccagcccatcatccatctccctcctcttcttcctccgctggtgggggaagcgggcagatggccttttgccagtggctgcgatggagcagtccttattgtgggtgtctgagggtgttttcccagcttcctcatccagacgctccctgtccatgtgactcttctccagcagacactgcaagacagcatccagttggttccgggctttggccatctccagctctgatttctccactttcaccttcacagggaacatggtttgggtccgggatctggctagctgggtcagaggcgccccaaagggcctagggtcacaagtcaaggcgggagaaggcggggacagttcaaagatgagcttcgtgggccacgg

SEQ ID NO: 159863 - DNA, 1000 bp, Homo Sapiens
tcaggccagcaggcggctgtactctgccagagcagaggactttctcaccccatcccagatccgggcagcgtagtggaaccagttcttctcggtgaggatcgtgtgtgacagctgtggccgggccatggacatcacttggctccggagcttgctcaccaaggactggaaactggggtggccacgatacccaggcagcagggagaagagtgggctggaaccaggtcctgctcttggtgggttttcactctctgcttcactgtccatgaagggtaccaggaataagttgacctcagagtccaggaagtcaggtggaagccccgggaagacattgcattgtaacatggacagagttcccttgtaacgcaggtgggagtgggccatgagctggtcaatcatcaggtgcatctgccgcagcttccgaggacagaagtcctctcggcgagctttgttctgcaagaagactaggtgggggtagtactcggtgccttcatcggagcccgatgagctgctggactcgtggctgggggatggggtggagggcttcaccatctctgctgtctgcaggaaccttggggtttggggtgagtggctgttgctcttgcacttgcaccccaggtcccacagcctgtagagactgaggtctgtgaaccagtcctggacaacaatcaccacatggcagaccgtgaaaaggaaggcagcaatctggagtgactgcatttcaacgtaagtgtggggaaggttgtactctggaggcagtttgcggtcattattgatgagatggtctaggatagaagggctcaggatgggctgtgtgtccaggaaaacaatccgttcttgggtaataaagaagtcgatgccactggtctggttgccccctcgttccttcatttcagcgctctgggcccggaaaacataagtcctctggtcctcctctggagtgttggctgacaacaatgacatgaccatggacttgcctgtcccctggaggcccaggacacca

SEQ ID NO: 159864 - DNA, 940 bp, Homo Sapiens
tttttttttttttttttttttttttttttttttttttttttttttttttttttttctcctctggaactctttattatctcaagtaagaaaaataaaaaaataaataagataaataacctaataaataaagaggagatgtcatagtaaacagcctctggcttcaggaagcgtagctggggcttcggccctgggaaggtcccaccatgctcagagggtccgaggagcccacatcggggggctggggggccaggattccgggtggctccgggagtgcggggggcaggcctggtagtggcaggaagcgagctggtcctcggggtgcagggtcccggtgtggggacttgttccctggcaggtgcagcgggaggccgtgggcttcggactggtaaacattgtatccgtcctcaagaagcagctcccggaagctgcaggcctcagggtcaaagtggagcgatccatacagggccccatctggccgctggcacaggaacctggatgtcttgactcccaagatttgaataactcccggcttcaaggctttcagctgcaggagactttcggggctctggtcagcagcgccccccaccgtcccatcctccctgatctccaggtgggcttctgtctgctgggcatcatctgtgtagaggtaccgctgccggacttggcccccgaattgcaggagaggactggagtcagggatggggtgtgcctggcaggctcccagcagaagaccagccagcacagaaacccacagtcctgagtgctcgaacccggtctcgtccgagtccatcaatggctcgggtcctcaggtgatctccggggtgtgagctcggagaagctgagtggtttagaattggtgccagattccagttgtccaggtgagtagactcaggtggcctgagtgcctggctcctctttcggctggatcctcagctgacag

SEQ ID NO: 159865 - DNA, 1000 bp, Homo Sapiens
taaaaaaacaaagcttttgatcattcccttgtcaacataattggcagatctactctcaaacacacttaagagtattccacacaacatgttcggaattcagatttattgatttccattgtattgactttaaaaatggtatgaagctgactgcaagaaagggaactggtaattttaagttaaaattaagctaatggtgaaagtacatcacctctggcttcagtcaccacatcacctcagattgaatatagattttttatgaacaaagttccagaactctgaaatccagggatgctgcaggcctctcccggcaatgtccttcactttgggtcagtctcctgggccagaggtgaaagtgctttcaaaaatactgccatttccccagcacagtgtctttgattgcatccacatattgagttggaacccagtacacccagtagtaagaggcttccgtggggcccaactgaaacgccatcatgtggtagtcttcatgtccttcgataggttcactgaccacattttttatggagcccatgggcaatttctcagtccgctctttagtgccaatccacagctggtcttgttctagtttaaaggtgagtctcacttttcctccagatttattgtacatgccggacagcggtaccgttggcaggcgctcctgggcccccttaacagatggcatcacatcttcaggttttcctttatccaacactttcctgtgttgtttctgcctgcagagaggctccttcttgttctcttcggcctttgcatcctgctgcgcagcatctttgggtgtgtttactgctaaaacatcattgatggtggagccaaccaccatgatcttggccccactggtcacttttatttctctcaatgttttatcctcggggacgagtcccttatacatgactttctgcatggcaggcgggagacctgtaatcgagtggatcttctgtttcagctcggagcctgtgctgtccagggggaacttcacgtcatg

SEQ ID NO: 159866 - DNA, 1000 bp, Homo Sapiens
tgatgacttaataatgtaatttatttgaaatacttccagaaaagtttaaggccattatacaaaaacattcatttcatcaaaacattcattgaccaccttcccataggccaacacttgacaaacctcttttcccaacacactggctgatggcttctaaaagtggctgatggcgcctacaaagaatcattcattcttttcttcaccaataaaggctgttcttggctttcctctgcttctgtctgcagcaggttcacttgctgtatcaataacgacttgagaaagcagttttaaataaacttgtaatagaaaaaattcatcatgtttaagacctataaatacagaaatatgttttacagggtaaaattgatcacaatatccttgttttcaaaaaataataaagtatataccttgtttttatattgatatatcttgtcacacagcttgaatgcacatgatatatgtacataataaaatgacatcaatgcatttactgctttcttttctgtaaacttgaaagacagattaaaaaaaactttttggcaataatttagaataattaccactagtgctggtgtgggtataattttgcacaggtcatccttaatatttacacttgcagggagctcttctaggtacttagctgtttttaaggtctgcactttaccctgcactgtaaatcaaggctggacaaagaggttactaatctggctagctgattctaattaatcagagttaatgaaattggcctctggagaacataattacaattctgattatagcacagaaccagagatggcaaattgacgacccaaaagcagagcaggaaagcccaaagctctggcctttctcagaaggcactggaccatgcttttctctcaatggctcccacagaaggttctgacgaagtgcttttcattccaaattcttcctctcctgtgtttctataaacagtgtcatcgatagagtcatgttctctcttccttgttgcttcattcattct

SEQ ID NO: 159867 - DNA, 1000 bp, Homo Sapiens
tcaggtctccatttctgtttattttttaaagtaatttctgttctttacaatgtgttattacacacacacatgtgcacttgcacacacgtgcacacacaggacttgagatggagaaacaagaatagcctccacacatcatttttacaaagttcaaagtagattacatttatgtgcttttcattcattacacaatgtacagacatgatccgtttaatgacttaggctcctcacatggttaaacagtgaggatttcctatggaagactagacatagaagtttttagaagcagagactgttttctgcaaaaaccaacctcaggcatacatttgtgtttacatatattccttgagaatactacagtagcagtgcataagttcattctgtaaaaagatctgaaagatgattttcaagagactcaatacattgtgctttcaggtaaaaatccttagacaaaagatcagttactatgaaaataacagttaaaactgcatatgtgttagagatcagaagaggctataaagaaatgtaaatagttgtgcttaggggacttttttggcaaagttgtcttaataataaataaaaacttaaaaaaaagtctcagtgactgatataaaatagacatagctatcaagagtttcttacacttggcttagagtttaaaggtgaaaaatcatctccacataaatcacctggtatctggtaatcccagtctgggtaagtcaggcagggaggggcttggaagaaaagataaagtgatttttccttcctattaacacaaagcattaaccagaggtaaagccagggtgaaccaactaattaaacagatgcctaccttcctttagaactcttagaccaaagagagaggtcaccctacttctattaggttttttaaaaaaaaacccctatgattcttggtgtctggaccacaacctgttctgtaattcacaagattaattaaatatgtcctctcttctgtgagaccctaggataagcatgatcc

SEQ ID NO: 159868 - DNA, 1000 bp, Homo Sapiens
tttttgataaagacattttatttccactttacttctactggaagttttttaaaaagagagaaaataataagagcccctccaggaactgagggtggaaactctgtatccaggtttgctttctgtcatctacaccttgataagccacagagaagaaagcgagccaacaggccacatccaaggcaccacacttgcaattaatttattaggaactcatcattagtcaccccagagctttcagaaaagtagtgtcctctgagtggatgtggttacatccctcaaagcggaaaaacatttaactcggtaacagttacatttcgttctttgactaggaagtagttatagtgacaaggtacaaaaaataataagcatgcagccctttatttagttttgcaaagtctctgcttatagttctgtatattacatgactgtgttatacaaatacatttatttacaaaaacactctagctgtgcaaacttgttgctttttaaaaatgtatggatacttccatttctgccggtcccgatatatacttttaaagcatgcataaaaattaactttggtgtgggaaaactactctatgtgctgtcacatacagtatttttatgtctatgtatatttatatatttacaaaagtttttcggtttacagaaccgtacagagtatacattttaaaatccacaatgcaagagcgtgggttaccaggtctcagaaaacaaaagaaggggttagatacgccaaagaaaacaactagagaatctcaacatgttaaaaaagaaaaaaaaaaaaaaaaggaaggaaaaaagaaagaaaagaagcaagcaaagaaaactagcttgcttgggctagcaaattattatacacacttttcatggcagtgcaataggtttgataaattgccttctacacatgcctgtctgtagggctcatgtagaagttcattggttttatagtctagaacactactttcaaatgtacaatgctatagtatcaaaatgtttt

SEQ ID NO: 159869 - DNA, 1000 bp, Homo Sapiens
ttttttttttttttttgaaaattcaggacatttatttttctgcatggaaatttaactactgtataacacacgcacatacaaaacaaacccacaaagcaacagtgtgtaataggtagtgagagacacacaaaataagcatatttaaaacgcctacaaacagccttttttttttaggcaacaaaatacgtccagtccttgacatcttctcatactcacctagcaccacagatgcaaggacctaacagtaaacatgtacaatctcatgcttaacacctaaagcatgcactgaattgaatttgtatgttgtgatctattctactaagtatgcaatacatactttttcttactaatattttatacattaaattaccctgcagcattttgaaattttaacattgatgtaaaacaacttttgaaagatttatgaaacaagtttcgaggttcaccttcaggctggtttggttaagtggaaaaatggcagcagcctcaaggttcatactgaatgaaaatggtgttgtgtgcatgtcaacccatgtaaaaaatacctatatacaagatggcacaaagatttgtgcagttggaatcaccagtgcaaatgcatgcatttgaggtacttatttttttcatggtcaggtataattatgcatagtcattttccttaagtgctaaagatttcagacctgatcaaatgaaaagctgtaagtgtaaatatgagctatttatatagttaatttcaaagtgctatgcttttaatgaacatatgtttaacattatagatttatatatttagtttaaaatatttatattactaaccaataaattttctcactataaagagactgactggcaattatacctggccaagtaatttaaatagcatacttgcaagaactgtagtgaaagagttaaatacttcattattgcttcattgaactgagaagcccaaaaggcatagatcaacaatgctcagtgatgaaaaatgaatacccagaacagcggt

SEQ ID NO: 159870 - DNA, 1000 bp, Homo Sapiens
ttttttttttttttttttccagtttttaaaaggaagatttatttaacaagtttcacttagtacaatacatctaaatggaaatcacaatacaaggaaagatttaaaccaaagcctcagattttcatacaaacgacacgaccaaacttctaaagtattggtattacatcttaaaattgtcccgtatccttaaaaaaaaaaaaagtgtacactcacgtgccttacaggatattaaaccaaaaagctagaattaacaaacatgccaaatgttttcactttgaatcgtagacacagctcctatatttgagttttacagaaaggcatgtttctcaacatgcatccgaagttttcaatgtatttgtggtataagagcaacatttaacataagtgaaactgcattaacctaaatacgcttactgcttaggtacactcctacaacataactaacttgaggaaagctaaaaattgttttaacagttatggtcaatactgaactttgttattatgtcctagatgaatgtttcagtgttcaaaattactgagcttgaagttttaaaataatctcaacttccactttacagtaagcatgaatcacaagcctgtaatgcaaaactgttaaacttaactcgttttcttaaaaaaggagaaagaaagataaagaaagagaagctgaccaagagtgatcagaatcaattatatttcccatttaccaatcatactggatatactaaacatccctcccattctattcaactcccacaaatgtacagcttttatatctggagtagctatttagtgctccttctctacctaagcaaggtttgactgatagtcactggagttttcctgcagaacttggtcatatccactcatactgctctgaccaccataaccacctccataaccaccactcagctgctggctagcaggacctccataactagactggttggataagcccatccctcccatcatttggctaccataagcgccaccacttgcc

SEQ ID NO: 159871 - DNA, 1000 bp, Homo Sapiens
acttttaaagaagctcaacattttattctcattttcaataacttaaatgaacagcacttaacacattacacaaaattaaagacttgtgcatatatttgatttcaacattaatgtcaaaaatacatagtatgattttacataggatttgtgctacattagaacactagagacaaacatcacttgagtattaaggaaaacattaaatattaaataactgagaaaatgtgtaaacactaatctaactgggggttttgctattgcaacatgtccaatgaagtggtttcaacagtacaaaaaggattaggacatgagtttttccagtctacatggaatatatggatttcatttcaggaatcctttcataaaaactggtccaggataacaggagagaatccactctcctgattgttaatttggtacactccattctatgctaatttttacttgcaaacttgggtactgagtaaatactttaaatcatcactccttatcaacatcttggtgaaaactgagggtttgttggtgattcagtgtaagatttgagttcatatgcagcaccgctatcaacctccattgactttctagagaacaggagccgtacgtctctatggaggtagatctttccagatttagaactctggaacctcagatgtatgaggtagcgtaataaccgttcttctgtgtgtcggatgttctctttattaacacttctcttcacttcttgtttaacaggtacagaaaaagttctttgtcgtaggaatgtctgatgattggctggcatatctcgtaaatcatatatcacaacaaacatcttcaccacagtcttattaggattaaataaggtcacttgtattgttcctgaaggaggtactcgataaccccttttaccaagggactctaaagtaatcacacccatataaggagagggagcattgtcatctgaaacactgtagaatgacacttcaactggaagagtcaaatgtgtggggcagaaagcacc

SEQ ID NO: 159872 - DNA, 1000 bp, Homo Sapiens
ttttttttttttttttttgaaggaaacaaggcgcttgttttctctttgcacaggcagggagggtgttcctgagtgaccttccagaagagttcgaaattataagcctggagtgccgagggaggcctctgccgctgggggtctcgctgtctgctttggggttctggggcctctccttaccccatctggggtcccaggatgggcccaggggtccaggaaccaaggcagcactgcactggtgcccgcacggtccgggagcaggcctccgtagatcaggggtcaggggccccggcatcaggctctggggagtgaggtattggaatctgaggctcaggggtcaggggccccggcgtcaggctctagggagtgagctattggaatctgaggctcaggtgtgggagtgtcagggctcaggacataggtattagaatcccagggtatgaagtttcaggtttggggaattagagccgtgagtatttggggaagagcacggagcgctgctagcacggggcttgggtgttggaacactgggcctcctgcctggggtctgagatgacagagtagggggttaaatgcccaggtatcaagtatccaggtcccaggtgtctggtcctggggatgcgggagtcgcaggactgggctgcctgttctcaggagtcttggcctggtgctcacagccaagctgctcccatcagggctgtgcaccccagacgtgcgtgttgcccttcctgcggcgcagcagcacatagacgagcgcaaccgccgccaccaccgcgaggcccccaaagatgatgcccaacagcaccgcgtagctgcgtcctggctggcacttcggggtgggtgaggaccaggtgccgtcagcctggcaggtgctggtctctgccccggccaggctgtagccgttgtcacagtggaagtagatggtggaacccgccaggtacctgttgccctccttttgtccgttgggaggtggggccagccagccacaggacaccactggctg

SEQ ID NO: 159873 - DNA, 1000 bp, Homo Sapiens
tttttttttttttttttttttttgggggccactgccctagacatcaagtttattgtgctgttctcacattgaaaacccaaccccctctcccactgggggagggcaaagggaaggattttcacagtacctgcgtgcctccctgccagtcttccccgtctaaccctcagtccctctatccatggtccactgaaatgcagctagggacaagagctaggtacaatggccgaggagaaatgggaatctctctccttgggagaataggaggaaagggctagagaatttgatatcctcccacctcccatgccctaagagaacagaggtcagcaaacagtccatgccatccagcctgggaggctgggggagaggaagatgatggtgactccagcacagccagccttgctgcgcaggtgccagaggcatagggaggaggctgaggcagcgacggaagaaaagctttctttgcagatccaagaaaggaaactatttttggagtcagaaaggaaagaccttgggacactttcctcttcccccaggtccttatgagcagcgagggcagcctcttcacactttctgtttagggggccacttagtggctgggggatcgggccttgtggaacaggtacacaggacgctggaagcctttagaggtgttgtggggtgtggccacaagctcatagctggagaagcccacgtctggggatgtcaggtaggaactgaactgctctggcttcaattggattcggtagtagttcttgtagatcgtttctgtaagagtctttctcttgccatacgacgaccagggttggggctctaggaccaggatgcccccagggcgtaggtgccggtagatccggcgaaacatgcgcttcaggccctcgtctccccagttcagatgcacccacttggtgaggctgaggcagagcaccacatcatactcaggtgtttgggcctccaccaggtcatctcgatccagcacataattacccgtgacgaagacaac

SEQ ID NO: 159874 - DNA, 1000 bp, Homo Sapiens
ttttttttttttttttttacaacaaaattagtcacttttatttaaaagaaacattacaaataagtgtgcaaaattaaacatcatgattaaatacacatgaaaggaacatgcatactttacagcaacatccacagagaattagctgattacatgacagtgacagtaaagaactaaagaaaccggcaaaaccgagaactcgctgctatgcaggttttacatgtttgcaatctgaaatcaaaaccataaaatagagtttaacgggaatttaagaaaattaaatatatatcccaagtagctgacaatgtagagcccataacctagttaccaaatgttaaaaaaaattatgtgcctctccttcccaaaatgttagtgtgtagctattcttacaaatgaggggaggggagacggtggacctgggggctcggaggccagaccagggcatttccctccacaccagcgggaactgcatggaccctcccagaccctgctctggcagacgaccccgaagttaaaggatgttttccccataacgaatgttcaaagttcgtgcatcactctgctgttccctacacataaccgggaaacaggtttaatccaaaatgtaaccaggagaccccccgtccccgccccgcacacgcctgaggtgtgacggctcggcttctagagtggcctggtgtctgcctcattctaatggccccaacggagacggggacgccacgcacgggcacaggtgacgtcacgggcacagatgaccacgttgcgggtacggagaagaccacaggctgggctcacacgaggggaaacattcacactgtgttctctctacagggtcaggtcgtttttcttcatgttcgggcgggaaaaggaattcctttctccttttctaaggcaagctgctggtgttgtattcaatctgcttatcatgtaagaacttacatctgcacacttgttcactcccccgctgcagactcagtaagaacgacggaatctgctgcaaaaa

SEQ ID NO: 159875 - DNA, 1000 bp, Homo Sapiens
tcaggaatagaagggcctccctttctcaggagtctgaagtctgttcagcctcgcaacctgagaaggggaggggggcacatcttgccggaagggccccttgggaggggcgtaactggggtcctggactttcttatacgagtcatagttgctgggcccctcggaaggaggctgcttcttcatctgctgctccttccgcctctgttcctggcgaaggagctcctgagtttccagcatgaccctggcgttgaagccatgtcctcccaggtagccgttcctggagccttggtagctggagtacctggggttctctttggcactctggaagccttccccaggggagtagttctgctcccaagagtcctgggagaccgagctggcatttttcctgctttgccgaggcagagagctgtactggcgctgggcctgctgggagctctcgcgctcctcctgccgctgccgctgcatctgcacctccacggacaccgagtgtcgcccgctctgcgtcgccggccgtgcgttcggccagggttgctcaaaactataggtccgccgacgatcttctacatcttcatcttgctttgcttgctgaaattcttgcctcagacgctgtatccgatcatgattgctaggagttgatctgttactgtctacaggtgagggtttggaattccgcggcttcttgacttgggcatacaaagcatccatcatatgcccttctcgtgggctctgaggtctagcgttgagagccatggaaccttcataagaagaaactcccccatacattaactcatcatcacagccaaatgtccgatgaaaatcttgaatttcagcatagtcacgctctcgagcttgtcgttccctaaattctcgagttttggcttgaatcctctcctgctcctgcttcattcgtatcctctcctcttctgatgtaaaggattcctgtatttttattttacccgttttctcaatcttgtcatcttttcgatgtttgccaaacctg

SEQ ID NO: 159876 - DNA, 1000 bp, Homo Sapiens
ttttttttttttttgtggtatattcatacaatggaattttattcagccatagaaaggaatgaaattctgacacatgctacaacatgggtaaaccttgcaaacgccatgctaaatggaagcctgactgaccaggggctcttgggctctcaatgcaatagaaactgacatggggccaaaagacttcccagacaaagcacgcgaagggtagaggatataggttagcatcatctggttgtgatgatcatctcgagtaatgggccacctggtggtctggccagcggcaacaaggctgtaaatcaattaattattcagcattccctcccaagatgggacactctgcaatcttggttccctatttggatctcctaaggccagttcctggaattgtttaagtaaaagacatggttaagcattatgagagcacagaagaacaatacagaaaggccattttctttgtatgactaaagcctcgaggttagcaggtatggtgtcaatgaggtagtagtatgggttttgtgatcagtgggaatgcatgaaaaaatgctctagtgggggtgagccaaagccaagcccccttcctactgtctcagaagaagccagacacaaaagaccacatatattgtgtaattccacttatatgaaatatccagaatagaaaaagccacagaaataaaaaggagatcagtggttgccagcggacaggtggaggggaagatagggagtgactgctagtgtgtacaggcatttattttggagtgatgaaaatgttttggaaatagttaaaggtggtggttgctcaacatcagtgaatgcaaccaaattgttcacttcaaaatggttaattctatgttacgtgaatttcacgtcgattaaaaaatatatatacaggttgagcatccctaatctgaaaatccaaaatgctccaaaatttcaaaatttctgaatgccaacatgacgctagaagtggaaaattccataactgatctcatgccagaaatca

SEQ ID NO: 159877 - DNA, 1000 bp, Homo Sapiens
tttttttttttatatttaaaatactgtttatttgtgatttaacattaattagcattacatctaagagcaatatcagataacatttatacatttttccacaggacacagaggttcattggctcattctttatgccaaagcaagtaaatagaggcattagcaaaaggtgcaatagttcactgttatgtttaaaaaatatttatgcacattgcattcatttagatatatatatttttaaaaagttatggaaaagcatagttcacaggttactatttctacatacattgtaatacaacataaatgatgtagaacattaaaaaaatcttccaatagagagttaagcaactgaaagtttccaccaagagattaaaacactgattccagtagttagtgagatctagaatgacatttccaggctctggctcaactctgcattatcatatgcacacaaacagagccagctccaaaacacactgtaatcaatgtaattttttgcatgccaactcacccttaagaaacactttgagttatttttacccacgatcattctggatcattgattttgcatcgaactgtgacatcacttgggtgaaaggggaaacgcctatattaagcctaggtttaaatttgtatttacattaaaaagaaaggtcactgaaaagatttttttaaatctgtaaaaatcaagaagtggtagttttcttactggtgggattagacctgctgatttcttctagtgctgccctctaaagatacaaaaaattagaaagatttgacccttttaaaactcaaatatcaaccaagaaagacattgcttttggcagagaagcagaattttagaaatttgggacatgtttccaacaaatcacactttgtatcctatcgtgaatatgagtcaccatcaaactagaattcttcttttcacatcccatcttttgtccccttaatttttcactttccctttcattctttttcatttggctaccttatgagacttttctt

SEQ ID NO: 159878 - DNA, 1000 bp, Homo Sapiens
tttttttttttttttttttactgttgaccatgtagttttatttcatcagtactcccatttttaatggattcaggcagcaccccagagtacaggactgagttcctaggggtggcctgacccagcagctgtcttctgttccaggaggaaaaagctttttattaaaaaacagaaacgaaactttaggaaaatatgaaaaatcagagggaggacagaggtcatttcataaaatcgttatttgaaaacagtgcagtgtgcaaataacactcagttgggaatcgggagaccgggggactagtctaactggctcaaactagctgtgaccttaggcgtgtcattcaccacttggggatcatttcctcatctaaagcattcagcacagttaccctgtaaggcactttacaggtgcaaaatcttaaggtgcccccagtgtttgctatcaagtccattctgcggacatatttggtgtcatttccttcctgatgaaaaccaggaaaggccaggaggaaatctcaggaatatattttaggcaagtccagcatctctggccatcccgtagaagatgcctctagctgcaatgaggttggctggagaatcaaattcagctactactcctttgtccaggaccaggaccctggtgtagtccatgatagtgttaagccggtgtgcgatggtcaggacagtgcaggtatcaaactgggtgcggatggtagcctggatgaggttgtcagtctccaggtcgatggcagctgtggcctcgtctaaaaccaggatgcggctcttgcggagcagggctcgggccaggcacacgagctgcctctggcccacgctgagattctccccgccctctgagcactggaagtccaggcctgccggctgggagctcacaaacgtgtgcaggtgggacagctccaaagcccaccaaatgtcctcctctgagtagctgccgaaggggtccaggttcatgcgcagggtccccgagaacaggatggggtcctgcggg

SEQ ID NO: 159879 - DNA, 1000 bp, Homo Sapiens
ttttttttttttttttttgcttttcttaaatatttatttttttcaacatgctttcaacctgtcaacaaaaacaaaacacacaaaaaaagggcagtgtttgaagattgttgatttttttctggggataatctatattatattgacttcctattacttattataaacctgtgtttgtattggagatgtgtctactattgggggaagaggttctcgtaatcgctcggtgggaaatcatggctctgccgtcctgcctctctgtggccgtgggttcacgtggcctctgcggtgagtctccaagtttctgcctaggcgcctgtgcgtttcctttctgtgacgggattagcttagacatccttgcaaagcgatcactttcaataaattgggaaattgctgctccagcagatgcctcctgcgtctcagatgatccttcctccggcctcgcctggggtggcggcggccgacgggtgaccctcggccctctgtgggcagctgccagactccacccacttgcccaccacagggtcccagccccacggccttcctcccgagaggcagacaaagcttctggaaaaacctcaaatctttaatttctctcttcgcctggtgcagcccagacgtgagacacctgagcttcaaaaacaaacatggtaaaaacagccccagggcccgagagccgttgagttaagtgcgagtgggggagtcccctctccaacacccctcaaagtgcatcgggactggccccccaaagctgggcccataacacccttgataaatctacgggccgacaggcgggagggtggctgcccccagggcccttggggctaaggggacagcggtgtggtttggctttagtgcaaaaagctggtttctttagaggcactttgagtggtgggacccctccccgacctggcgggggggagggttcagggtcagccccgcccccccaccccaagtaaaagcagaccctgcagctggtgaaagccagcccctggggctgtcc

SEQ ID NO: 159880 - DNA, 1000 bp, Homo Sapiens
taggtgaaatatactgcttataaactattgatattagccttgaagaagccattattggttcttagttgaataattaaagctttaaaaagtcttataaaatgcaggacctatttgttctttatacaaaatacttagtaattgaagtcaagtcaaaatattctcattagttcttttaaatcatcatgaagttctcttcatttaaaaaaaaaaaaagctgctaatttactacttttctttttttaaaaaaaatacagctaactccataaatgaatatactataaaaagctgttaggtacaccttagccttcatcaaagtataaagtacacctcataaaaggaagcatactgacacttttatgttcatcttaaaaaccagaaacttctaggaaatagcaacaatttgttttttaaaaagagtttggcaaaaaccatttctcttggacacccaaagaaagggaaaaaaaatttattaggtccaggaatcaaagatgacttgatagaattatgaatacatgcagaattggatggttagaaatgaaatcaatctatttaggtccagcctaaggttctgatagccaatcagtagacacaatcagagtagtagtattcctaagaaaccaggataaatctccaatgtgcatgagtttaatgaaccagatagattattgtatcgccaatatccacccttatcccattctcagtcagatgaattttcttgctcatgaggtccacattgaaaacagcatgctcagaaatgggggtcttctcggtgtactcctttcccaggacaggaactcgtcgaggccccaacagtggatcatcaaatctcatcagtttcactttggaaaggtctttaattcctcgattcattttcattaaacgcctgattatggaatcacagttatctccttgcttgatttcaattttggttgagaagtggccattggatggctggggattcaccagagaaacggacacaccaggttctattctaaaaaca

SEQ ID NO: 159881 - DNA, 1000 bp, Homo Sapiens
ttttttttttttttttttctcttacaaaactgtaacctttatttgttgatccaacagtacgttaaccacttttaccccatccccactttacacggtacaccaacctgaacagattttgtgccacaatttcattcaaagggtttgtcattcactttatgattgtgctggataatctagatgtaagcaagtctggagattttaaaatacgggtcccctgtatgagagtagcatagtttatagcatacttttaaaaatggcattcggtaattttgccttctggacagaaagatatcttcaaattgcaaacacatctatttccacaaaacaatttggtcaggaaattttatttgaacattctaaagcaataatgctttagatgttacttaagtgtcccagacaggattaacaaaattaagtgtctctaaattacaaatttggctcctgtaggagtctcagaaaataaacagaagaaaacaacccccctcccaaaagaagtatgacacacacattttgaagaaaccccaatgtttcatgcaatggtaggcaagatgtaaaagcccacccaaatcacacatttctacaccaatcatcataagaaaaaagtactctgtagtcgatctgtacatccaaatgcatttgggaatctacacctacgttacattatttaatgttatatacatttattacccaccccccttgtttttaataatttcttatgtaaaaccttcattcaaacccaaaagatttaagactaacttggggggaaaaaagataatcactttagacattcagttaaaatgtagtttatctaaatctcaaaatgtttaataaaaacaagtatcttctccatttaacactttgctttctaactgtacagtaaattgcattgtagagagtacacttctgtcttcaaactgtatcttctttggatggaattaagatgtaactgtatagttttaagataaataaatgggaagttggtccaactaagatgacagca

SEQ ID NO: 159882 - DNA, 1000 bp, Homo Sapiens
ttttttttttttttttttttttttttttttttttttttttttttttttttgagaggaatgaagcgactgcctttattgcatagaccttttcaattgctttttagattggggacggaggacgcgcatgagacgaacaggggatatgaatttccccgcccccacccgcggggagaggaacattagtgcaaatcctagcgccggccccggggaacctgcccctcctgggctgattggccagctaaatggaggcaccggagtggatggggcgaggctgcgggccctgaccggccgactcactgaggcctaccccagccagtacattccaggtcctgtcattgggcgacgcgtaaaatagactccgccctcagccatcctggccgggtaggagcaggtggcaagcgtcaggactgagccctgccccgtaagggcggccccagatcagacgccaggccccgccctcattgatcaggcactaccctcgggacgagcccatttctctttaaccgtgacgacgcccaccttccagcatcacgtctggtcccatgaaagcgagcgcaatcctgagacggggccagggcccctgccaccacaactctagcagccaggccacaccccctagctcaggctccgccccattggaatgtaggccccgcccccggcgggtaccaagcttgtttagtttcagggctcccgccccgggcagccaggaggcccagtgagcagtgtaccgatgccagggtgcatctgtgcctgtagcggcccatactccacctgctccccgtccactgtgagcacgccgcgtggtgtgagcggctctaggcggaaggcacgggccgcggcgtagcccagctgcggacagcccaggctgaagtggctaccacgctccatggccaagaaaaggcgcagcagcgcagcccgcgagatgccgctacgcacccagcacaggtgcaccaggccgtcgtcgaagcgcgcatgcggagctgccaccaggtcagcgcct

SEQ ID NO: 159883 - DNA, 1000 bp, Homo Sapiens
tttaataattttttaataagtaaaaaaatcttgtagcatgcaaaaacttaccagttccccaagttttcattaccctgtctcatatttagtatatgtgctgcatctggcaacaatgatcatcagaagcctaggacagtataatattactaccataaatcataagtaataggatgattttagcaaaactctcattttggttttctagaacctacctccaggctacttaagtacttaatttctttcaactcttaattctatgtaaatctacattactagataagataatggtactcagaaatgtattacatccattaagctacctgattggctgcaaaagctggagcagtttctttagaagtcttccaaacaaactgcctttgatattcagaatttctcaaggcattatatgaaggaacaacagtcaatccagctttcttacgcagaagtctatccaactgttcaaaaaacaaaatccactcaaagacattaaaaatttctattcaaactttttaaaaattgtggtaaaaaatgcataacatgaaatctatcttcttaacaaaatgttaaatctacagtgcaaaattgttaactacatgcgcattgtggtacagcaaactttcttcaacttataaatagtatcttttttcaagtgtcaaactatttaaaattcctttctatcaaaggactattaggcatcccaggaaaaatataatactctcagtcctttcctactaatcattcataattaaatctattaccaaaaagtcccagcactttgcctcacctgcacactgcttctatgaacaccccttctcctgcctgccagactcacacatcaccttccttgttccctttcacccccagctttttcaacaagctacagattcttctccaacactctgaaatgcctcttcagggtcccagtcagtggtggacatgaaccagagaagagcagtggaacagaatggagaaagaaatgtggaaagcattgagatcccca

SEQ ID NO: 159884 - DNA, 1000 bp, Homo Sapiens
tttttttttttttttttttttttttttttttttttttttcacaacaaagaccacgccatttatttacaaaggccagtgtgggagctgggggaggcagggagggaaagccacacagacatcttctctggactgcttgggaccctttcccacttggagcaaactctgttcctcttgccgtcatattctcagccatggggtcggtcctccaagcagctgggccaagtaggagagggaagaggtgatatgagcctcctctgtgctctgacagagaaatgtccaattccagatcaaaggcatcattgccaccctctcctctccttcctcaaagaaaactttctggcctggagggaaatagttaagaactgaaaggccaggggctctggaggaaaaaaaccctctactattcccacaaggcagtgaggggtgataagggtgctagtcacagccctgacagcttcagaaagggtacccacattacctctgggttacccagcatccagagccccaagggacctagctctcccggatatatattcctgcaatggactgacctttttacccacttgtctctggtggtgggagagcactctgaaccagaaaccaacaaggaatccacttcccacccaacttaagagtgtatgcacacatgtggatacacatgcacctccccactactcacacagaccccaacccccttcatgtcttttgaggggggctcaaactactggtgcctggggacacaagcaagacctgggtccatggaaatgtgtgtgtgtgtgcatataagcacatatgcttgaggaactaaagccaatatgaccccttgtggggcgtggcgcttagcttcattgggctccttttttcagtttaaattccattagcatctctaagtctcttctgccagctcgggcctggattcttctgcctaaaagagctatgagtgcttctgctccccactgctaattccaacttccaagccttttactcaggctgtctcccc

SEQ ID NO: 159885 - DNA, 1000 bp, Homo Sapiens
tttttttttttttttttcatggtgtagtttttattgctcttaaagacttggtgttgagaagcacaagctaagctgtgagatgggaaggaaaccagatgaggtgtgacccctgcgcctgggcctccgtctccactctaacctaggggctgcccagctccgccatggctcagtgcagaatttatacattatatattaatttcaaagggagggaacttctatgggaaacaataataattaaatcataaaagatctaaatttgcattttccaggtcacatatgtgcatggtcgtacccttcagcttttttccttaaagattttgcaggtgttagtgagtcagtgaatggcatggatctaaacacacatggagacggatgagcagcgtgcggcatgaggaaggtgcaggagaatctctggggtgctcagccaggggagcgcatgccctgcccacggcacagctgcccgagtgggcgggtggagggatgagatttcagatggagggaagcacatttccaaaacaacagtgtctgcaagcgtgtctcgcatggtgtcgttggtctcatctggtttcgttggtctgccccttcacccctgcgaggagccgtgctctgagcaggtgtgcacaggtggcgtcccgcacacgccctgagagcacggcccccacagacccggggcccggcagcgcctccatcatgcagaacgctgccgtcccctccaatctccccaggacacttaggcccgatgcctaattatgttctcggtttacttttcttcatgcctcttttctccatttgttttcccctagaaaactcaacctacctctattcagaacgctggtttcaagatatcagagataacacccattttggtttttttaccttgctaaaaagatgagggcgctgtgacttagaacaagcaagtcgaaagccaaatgcaggtgggctgatggtaccgcaaccaagttgagcgttctaccactgccattgccccaggggccccacc

SEQ ID NO: 159886 - DNA, 1000 bp, Homo Sapiens
tttttttttttttttttttactttgaaatagttttattggctcgtaagacctttgcatataaaaaaaatacccaaaacactatgcagtattaaatcacaattacatttttttaccaattaaaactacccagaatatacattttttaaagaaaagaaaatcctacagaactgaattctgaaatgacattatgacttaaatactatgacaaaatagataattccttataacattaattcattgcacaaagctgccaggtattttcataagcataaccgctgcaccgagtgcaaatgaacacaatttcaaagttacacatttattcgaaagaactgcgcctccacctatggaactcttaaatttctggcacaaaatgttggtctgttctaacttccaccaggcaaccaactttgcaatccactaactttctttctggccctcccttaaaaaagcaacatccttctgctgtcgtgccctgaggagtcagcacctcctctgcttgaagaaatctacccccctcaactcttcaggcaggtactcctgatccacaggctcgctgtacatggggttgtacttgtagcctttgccatagcccaaatccttcatcagcctagtgggcgcgttcctcaggtgcaggggcacggggggcagtggcccctggtggttcctcaggcaggctttgacgttgttgtaggcgctgtacacctcaatggactttggggctctggcaaagtagaccacacactgggccagaagcacctcacattcaggcatgcctataaaatgacagccttggtaggcagcaaccgcttgtgttaacgcagacgggtctgccagacctatgtcctcgctggcaaacctgacaagcctccgtgccacgtagagtgggtcctctcctccctcgagcatgcgagccagccagtagagggaggcgttctggtctgagccccgcatggacttgtgcagggcggagatgcagttgtaatgctcctcacctgcccg

SEQ ID NO: 159887 - DNA, 1000 bp, Homo Sapiens
tttttttttttttttttttagggaaaaaaaggtttattttcaaggatttgtgcagacaatggtgaataaaaaattgtatttcaactataaaaaggagctgacttcattccaccctggcctacagggtttatggtgatgccagtttgaatctgaggcaatactgctatccccattcctccacctgtaaaagattcccccagaggaataacattctataacttttagtcaaaaatatgtaagacacatcaaacaaagtaatgagttaaacaagtttctgcttatctgcttagggaaagtcaagaaatgaaacaaatgtatatttgtttctggctgtaaattacctttaccttgtgcactttttggtacattctggtatgaaaacctctcaaaatgtaacaacacaagagtttgggtcaagacgacccacccaggaggctgtaaaaactggtttgaactagaactgtggaatggaactagtttaaaatatgaagcagctctaaacaccaagcttagagacatttgccctattagaaaacaaaaatcattaaagctacaaaataacaagtgcaaacatgctgaacctgtttccagggagtgacattcccttctgccaacaggtcccaaactcacacccacaaggtgtaactctctttcctgttccactagatttcctttctctcatctcaaaggtcctcagaaatgacaatggaaaacgtatgaattgttgaaatttaccctgtggaccaattcctgaagagataacagccacaactctgagatgattagacatgcagtgtttacttgatgactttctgtatttctagaaaccctcaaagcattaaactgcctatttcaaaatctaaacttcctagcagcttttattatttggagtaagcagacagaagacaatttactgccacacaggaatcaaccacagctaacttgtccaccattaagttttacggtaatggacaattcaactggaagacccatgtctatg

SEQ ID NO: 159888 - DNA, 1000 bp, Homo Sapiens
ttttttttttttttttttttttttttttttttttttttttttttttttttttttttgactcgcacacaaggacggtttattggctagagagcaaacgcaggcagaagtaaaaacaccagataaaaagtgagtgtggagaggtgaagactgcggccgctggacttggcttgagctgtgaggggtgggaggggaggatagcaccggaagatgctgctccgggcccaacaccagccctggccaggctctcccctcccaggggcagcgcccagtccccaggggctgccagagccctgtgtgccttgccgcattcccctgatgcagcttttggcaactgaaaggcagggctctcgctgagtgcacctggggcttcctgagcccatctgcggcggccccaccctggcctaggtgctgagtgcagctgctgcagacagcccctccctccttagtggagcctggagggtggggtgctcggggatgcaggcaggggcaggggctccagagccacaggtcagaagcagggctgggggaggggtggagccattcagcctcaggcaccctcacagctaggtgactaggggcagggacagaatggggtgaattctccccactctgaacaactgtgtcaccaacaaacaagttaagtggcagggctgcgcccatcctctcctgcctaggccagaatgcgggggggatgggggcacctgcctagctgagcagttccaagtaggtgacagggaccttgcccttcttgttgcctctctcgccaatgagccagtcagggtccatgccaggcaggctgtagacagtgatgagctcatcagccagcagggccagctcactgctgtcggctgcctcgtagtcatagagcacccgagctttgcgggtcccactggcagggggggccacctcttccaggcagagcgaggcctcccctggaggggccaggctggccacagagggcaccacaggcatagtggccgcagcagtggtgggtgaggtg

SEQ ID NO: 159889 - DNA, 1000 bp, Homo Sapiens
ctgatggaaagccattttatttttctctaaattttaaaatagaagactttaatggaaaacatttagtaccatcatgtcaccctgaatgccagcaatacctcgacttttacacacgcaggaagcctagtaaaagccccgtcagtagtacacatttctctatggtccttcaacagtttttcatatacaaaattttctgctattttgctttagcaaacagcaataacttttgtgtttcctatatgacacctaatatccagtcctacagtaatatagttagaaaaataaaaggcttaaaaatttcatagtacgagttcatggtgctaataacagaatctctttaaacataagatcattttaagcctcttacataaccaccttctggtttcatttgaaatccttaagaattaaaatctagtaagattgttaaatcaacgtacgtcaatcattcattttcacttgccttgggagagttaattcccactgtccactgaatgaatgcctttcaaatattaataaatatattacagtatttacaagcattcttatacactccgacactgacagggagttaagccatggagagggaagcacaggtttcccaatagtgtgacttcatgacgtatgggacaaaaggaaccggtgctcaggcctggagggagctgagatgagagcagggatgatggttcagatacgcacacatgctctaagacacatcagactctagctgagaccagccagacatttcttttgttgttggattagaagtaaaagctgaacaagaaaccaggacaaggaaggaagaactggaagctatgcctaaagtcagaccaggctaaggattttaaaaccaagctccacaagctcttagtgaattaccctgtggaaactatgtagctgacgtgaagtgtggagggggggtggtagaaaggggggttaaatgtaagactttgttttggcaacaaaaaatgatagtaatttgatttctacaactttaactgtg

SEQ ID NO: 159890 - DNA, 1000 bp, Homo Sapiens
ggggcgcagacactgtttattgagtggcaggcacaggagaggtagctggctccggtgtggaagcagaggtggcaggtcatgccagggtgctgtgggcatctggcagccagggccatgccccccatcctagggggacggcacaagctcactatgacaggagcagcaaggagccggccagaggagggggtagccacgacccccaggatcctgggcaagaagcggcagacaaacttggcacaggggcctagggtgagggggactggggcctgggtattctgtgggggagggagggggatcacgtctgtggggtggagtagagactgtggtggtggccgcctggtcctggcacctggtgctctcaccccggctgtgctcccaggagcagccctcatcttcacagtgcccagcccggtcaaagaagtaggaccgagaggcaaagacctgcccattgaggatgtggctggtgctcaggtcctgtgggggccggtgcacccggaagaagcccaccagcagggtggtgggcagtagctcccacacgaagaggatgaggccaaataccaggtagcctttgttccccaggtcattcaccaggtccgcctggtcagacacattgtaccagccgtaatcgaaggtgtccagccggctctggggggccaaggccagtgctgtcaggttgtagcaggcccggctggcatagagcaggaccatggcgccacccatcgcggccgcctggcacacactggtccccttggcctccaggtagatgctagtggagggcgcccgcctggcgacgaggcagaggcaggcagcaagagacagcgcgcagatgacgaacagggagtcgctcaccaggacgcggacaagcagcagggcccagggctgtgcccggcgccgatgggagagcacagcacacagcacgttcaccagcagaaagagcagcgaggcccccacaaaggcccctcggacagcgagcaagcctcggctcatctccggccgacgc

SEQ ID NO: 159891 - DNA, 1000 bp, Homo Sapiens
ttttttttttttttttatgatcacaaatatttttattaagcccaagacataatagcgcattacaggaagaacccaactacatttcattagagataaaagtatggatataacaacaacaacaataacaacaaaaaaagaaacagcctatcattgaaaatacattaatacagaaaacatgagatatccattatgagattttaaaaggtaaaattcctaacaatttgaataactgatttgggtatagtgatgtacaaggaggtagtattaacacacgaagactccttttagccctgtaatggtaaaatatattcagtctgttcaatataccatcaagactggggttaagccgtgagttctcagtctttaatatctaaataatcactgtaagagttttatttgccttccaaatccagagggtcgtactacctagcatcttagcaagttaggatgctttgaaaagcatgatttccaaaaattaacaaatctttgatttataaataagtttatttataatgatatttacataataaaaacaaaacacatgggaactcacaagttattcaaagaaactgatgtataataaaaacagcaatatagactgacaggcagaaatttaaagaaagatttaataagggttaaatatcaaatagacaacttcacttctaaatttcactttgtcactcacactgaattggaattgaacaatggctctctcttcaggcggtcctgtactggaaattctggaaactggtaaaatatattttgataagagtttcaagttaatgacctatttccatgcagtacctaatgctgcctttagatgaagtcacattcagtctgctttgaagtgaaatagctttaagtaatctgttctgccaggctagaaaaatgtcaccaacattttgctgatgcatggagatgtggcagtaattaaactactatttagagaggaagagaattggagcagaagtgactgggcaacagtttcaagagaagcaaa

SEQ ID NO: 159892 - DNA, 1000 bp, Homo Sapiens
ttttttttttttttttttaaaagaataaaatttattgtactctcctcgccccagggtgcccctgggaaagcctgaggctacttgtacgcgttggccttgtgcttcggcaagaaggcgaagctggggggcactggcccaaggagcatctcgctgatgcggatccagtcggctgccttctggctggccatcagcgtctccaggtagtcgcggcccaggtagtagggcggccgctcgttgatcctctgtgggagccgctccagcagccccacgggcacgtaccggcacaggaaggacagccactcgagcagaaagcgccgggtcttctccacgccctgcgtgtccgagccccagtgctccaggccgtagttggtgaagtcccgcaggatgtccaggcgctcggacgacgagatgtcccagtgccgctgctccttgatctccgtgaagagccacggcttgagcagggcgccacgggcaatcatgatcccggtgacaccagtctgcatggcgcggttggcatcctcaaatgacaagatgtccccatttccgaacaggggcatggggctggcggcctgcacgcactcctcgatgtactgccagtcagctagcttggtgtagcgctgctcccgagagcggccgtggagcgtgacgagtgccacgccccagtcccgcagctcgggcagcaggcggtgcgccaggttcacacgctcctggacgcctgtgcggatcttcacagtcagcggcacatccagcacctggttcatgccacggacgatctgctggaacttggtggagcgattcatgagggcacagcccccacccttcttgtacacgaggtcgatggggcagccgacgttgatgtccacaaagtccacctccacggtgcggctcagcagctcggcacacttggtcatggtgtcggggaaggcgccctccagctggacgccaaagatgtcctcacactggtggcgtttgagtagggcccactcggacatctggccct

SEQ ID NO: 159893 - DNA, 1000 bp, Homo Sapiens
ggtgcaaatttaattttattaaaccttacaatgaatgttgtggcatatgattttccattgtgtgacaatttattagctggcatccgaatacagtacttcttttgaaaaaatacacaatgggaactgacaaaagggagagaaactagttgtttagtgacacataagggcaaaaaaaaaaaaaagaaaaagaaaaaaagaaaatgatgatgaccaattagtttgtttccttagtatctaactctaaaatggttaaagttctaggcaataatgctgctgttacagtgtaaaagagtatgtcattatctcatccagcctgcacaattctaagaaaattaattacaaaaattatcatacctgtaaattcagcctaaggtttctgttgggcaatatgatttttaaagagctacttttcccatataacctaaacaattttcccaaataatagtagactggggtctctatacacattaaggtagtcactttacaagtgagctatcacttaacttcaaattcataatgggcaccaaattatctttgatttgggtttatgcctgtcagatttatgaataagaaaaatgactatttttaagtctataatccatttgtctttataaagtagactggcatctaagtaaaatgaccatttcttttatagaaatgatcaaaacagtggaacatctaaaattcaggaggccccaaaagggcattttcatagaaatgttaataacttacacattaactccagtcaataacaccgtgctacagtgtacagtttagttagactcaagagtgtaattggttcattattaaatttactcatctgtggttcaaaaaataacacaaatttaagtattttattataatccatctcataattgtgagaatactttctgacaaaggctttatcagtgtcacatttatgaaacaattttccctaaaagaaaataaaatcagggacaattttgagctattaaattaactggtttttcaaaacctccca

SEQ ID NO: 159894 - DNA, 1000 bp, Homo Sapiens
ttttttttgtcactctagtgggaatttattaactatagtatcacagctttttccccccagatgtagatgcaaaaattaggagaccgttgatgaattctacttacagtacttcagcaccaaaaaaactgggcagttatgctgataaatgtatgtacagttcaacatttgtcagtcttaaaatgcttatttatagtgaaatctatataaaaccgttaaaaacttttctatttacatttttaaaaatgaaaagtatagtttcctttgccacaacttgtcaaaactcttaccctcccacccccttacccctttcactctacttgtgacagacagtgatcacaagaccaaaacatattgcttaaacaaactgtgtcctaaaaagatagaaggcttaaaaacattacatttagaactgtaaatgaactttttatacatttcaaaggggcttaaacaaaagtatgtaaaagttattttcaaagtctcagtccaatgtgaatgtgcaatttcaacgttaagaaagcatcatatgaatgaataatttgttttcttaacatgaccaaacatttcctttaggtctgaaaacgtttcttttcctctgcttcgcaatgaaacattttttagtaagttttcttaaaggaagagggaaagtggggagacgacgacagtggaaagcgtaggcaatcctggtttacaagaaatttgtcagaaggagtacggcctgctttgaaatgtttacacttaaataaatagaaggcaagtgtgctgcttagagcacaaaggaacaatacaataaattagcacacaactgataagaatgcacaagccacccaaaaagtacctcccactggttagggatctgatttctaccatccaacaaggattctttaatgccagtattattctaggtgtttataaactaattatgaactgagaaaatgtaaaattttaaccaattcaacacttccagggatttgcaaaaacatacaagtttttaaaaaacttt

SEQ ID NO: 159895 - DNA, 1000 bp, Homo Sapiens
aaaagaaaataacaaaaaaaccaaactttacttgcatttagccattaataaataatttacagtatgtacacgcggtgacactccacacaggtcgcagacacgtggacgcagtgaggggtccccacttccaagcagaacgtgagcaaacacaaccaaaataaagtgcttcactttttacttccaacatagggaccaactaaaaccagcagggagagggaggggccgggccccgagcgccctcccacccgcccacacacggttctggcagagggagcaggacctcttggagggagggggagacacacgttctgcagcctcctggccagtgtatgagaggtccctggggaacagcagagaggctgccgatgggtgggtagggtgtggagctgtagggctgctggcaggatcaccctccagggcctggctgcacttttgggagtgaagcctggctttgtgctgtgggcatagcagcacaggtgggactgttctgggcccctggatgagcaccctgggctgaaatgaggcgggagccagcggcaagtctctcctggctgtgtggccacagggcttaagggaagagattagaggttgaagaccctgccagggatgctcagagctgagagtcctaagaccctgctcctctccccagactccagacgtggatggaccgggctgggggctcttggggttgtgaggaggaagcagaggatcagggcaggccagctggccccatccactgggtctcctgccacaccctggggcccaggcacccctgcccaggagctcttgcatctgcaggagggagaggaacagaagtcaaggatctcttctctgtttagacatttagaaccaagcacttcgactttctaagcacagggtggaaggggcaggggcccaggccagagacgggcagctgagcaggtgcctgaaaaccgggacctgcactggtacccacagcagccaggtgaacatgggcagggaggccacaggccagaaggca

SEQ ID NO: 159896 - DNA, 1000 bp, Homo Sapiens
ccattttattgttttatttacaaacagggtgaagtcaaagggaaagtcaggggatggagtcagtctgggccatccgaatgtggagtagttcttgggtcaagctctaccatgaaggccacctcttacatatccttttcctgccccttggtaatggccccttgattcctcagggcagcctcagctgctgtacctgaacacttttatgagggcagatggatcctggggtaacaggggtggtacgagggctggggccccctcagtttgtgtaaacctgagttccgatcacacgcatgatttccttctgtatcttggggtcctgagtattaatgttggcatcgcccacctgaccatcctcatatacaaagaagaatcttgtgcagacatggtcggacacagggcacacccagatgttcccatgcttctggaggtccttagatgtaatcacttcacaaagtgctatacagtttagattccgactctgcaggaaccgtgactgaatggatcgggtctgggggatggtattcatcctgttgtatctctggaccagctcatccttggagggcatcctgtgctgtccttttcccattcctgcagtttggtgtaggatgcattgaccagcccattgcgcaggatcgaatgccagttctcaatgtgggacccatggaaggcaaaggtgctgccatagagcttcttggcggtccggaaccgagcctccttggcaggagggctgctcagcaggaggaactggtgtgaggtgtgcatgaacttcagctgcctgctgagaggtagtttgacaatgtgtgacctgttgctagagatgatccactgcaggagaggatgggccaggggatccaacttgtccatctgtttcttgatttccaaatatgagccctgggtcatctcccgaatagacatcacactatccagagctttctgaagccgctcataattcttcttcttagggttaaaggccagagtcttgggatcagtggggtccacc

SEQ ID NO: 159897 - DNA, 1000 bp, Homo Sapiens
tttttttttttttttacgtcttttaaggttagatatttttaatcaaaagagcacagcgaaatcctttattaagaaagagtcttcactgtagagaagtcagtgatcgcatggtgaaaccaggtgcttgggtagcaaaggactccaagaatagttaaaataccttttatgaagtcaactgcttacatttacaagttgatcatgaaaacatcagtaagacacaaaaacatttccgatgctctcggcatgaagaattggtatctggagagtagcaagttataatagtaaggtttctgcaaaagattaaatagtataaagaatattagtatgccttcaactggcagaaataggactgggcacatggaaaaaggtcagaaataagagaagatgcagatttgctcaaaggctgctacccagcactcccatgcccaccccattcctaagctcttccccaagcatactcttcatatgcattggtgaggggccaggtccctggaggtcccagagacacaaagttaagggtagggaaaagttcagccccacactcccatccactttgtagggctttctccctccagtctgggggtccccacaaatgcccaagatggtggaaacagtcacatggatttctaagagaccacatgacatgctgggagttgcagatcactgtcctcagctcgcattatttgaacgcagggcagtgaccatgatcactgctgctgctcagaagagctttaatttactcaatgactcacaaatggggaaaagtggaaagcatgcatagtttcagaatcagagataggatggccagcacagggtcccctgacctcggcactattggcattttggggctggataattcttatttgtggggggctgccctgtgcattgtaggatgttcggtggcatccctggcctccacccatgagataccaatagcagtccccaccaagctgtgagaatcaaaaatgtctccagacattgctgatggcccccagccctt

SEQ ID NO: 159898 - DNA, 1000 bp, Homo Sapiens
ttttttttttttttttttttttttttttcagacaaagagaaaattttattttcttattcttgaaatgactgtacgatttttcaatgttaaagttcactttcaagtatgatcaataacaagacatcaaatgtaaaaattatgctgtattatcattttctccattgcttcttaaaccactgaaagtaatttcacaattcaccacatttaggcatcttctttttcactttcttcattttttacttctttaggcaacaatggatcaatcttcagtaataaaccttcacttgttgaactacgaaggaaagcacgtaccacaaagggacccaaattcagcggtctgtgcctacaaacttcattaataactgcttgcagattggcagctatctggtcacttgacatatccaatgttgctattttggtctggagaaagttctccctttcttcatctaccttaatttcatgtccatttttaaataattcaagcattttggggatgtcacggccaatggaatttcgagaaagctttggatattttttattcagtttcttccttaatcgattaagttcaggcattatttctggaacagctacgtaaaagtctgcaacaatttcatcatcccaaatcttctgtatcagactagtgcctcctgcaaatgcagctccattttcttccgctattttgacctctgatgcattctctgtaaatacagcaactttattgatttcggaagcaaatgggtatggcaaactaagaacactggtaaatggctccacgtttttcttctttcccagtgccatatccagtgtcaaatcaagataaacactttgctttggactagtaaagtcaagaatttgaaatttcttaagtaagtgaacagctttctccacctcatatatctgtctcgggtataagcgttttaaatagacatcatcctcaggttcgccttccatatagggatatgcttttattttttctatttcatcttttttctcatctggt

SEQ ID NO: 159899 - DNA, 1000 bp, Homo Sapiens
cttttttttttttttgtagtgttttggtcttttattcatggtcagcagagttagaaaaataaaacagaacgaaaacatcaccaccccagtgggccggtgagtctggccaaaatggggaaactgaggtagcccagagtcacagaggaggcctggcccctagcatcaaggcaccagtgaagggaggctgcggactccctcccctgcacggtggggacagccacccagagttagtgtgctggggtccctctgccaaaggaggtgggcgtgatgcccaagcccaggatccccttcaaacctcccctgggctccacgtcccaagggcagggccacgggccacagtggcctcctcttcctcctcctccaaggatcaggataggccgcctgcctgggccctctctacctagccctggaggcaggggcatcacagatcagtgcaggtgactggagtgaccccatgaaccagcagcgtggggcccaggtctcgggttagagtctccagtagcgccaggtagcgggggtatcgggcgggatcggctggcggccgaggcaagtacaggaaggtgagggctgtgatggggccctcagcatccccaccctccggcccacccggccctcctcctgtgccgcgcccctgctgggcccgaaccagggcgttggcgctgcgtgccagggcctctgcctctgcgtctccccgcccactgttcacaaagtccccttcctcctccgcctcgggttccccagccccggccccctcgccccacaccacctcctgcacctcagcccggatcctcagttggctcagcagtgcccgcagccgcccctcggccgccccaggcgcctcccgaggccccaggcacaggaagatccggagccgggcgctatgccaagcgggcaccatgcccaagatggttgccatctgcagcaggaagaggccgcagacatccacatagccgggcccaccccggggccgcagcaggttgaggggccacacgtccacatg

SEQ ID NO: 159900 - DNA, 1000 bp, Homo Sapiens
tttttttttttttttttttttttacttcaaacatatttattatttttacagactcaaaatacactaataatcctgcaatgcatgctggtgtcatgtgacaccaggcctggaatcacacctctgtccagcaggcacttgtctcaggtgaggcagttttctgagggggctcccaggagcagcatctcaggacacctgagagggagggggctgcaaggaacacctctgtgtgcacacgcctgtgctgtgctggagatgagctgtcaccttgaggtggcgtcagaccttgactctggcttgggagccccaaggttaagggaaggttaagacatgatcaaggtgcccatgagattgtgacagggacatgctgggtttctgtggcttgactgcttggatgaacatctcatttttcaatcacacagttgcagtgcagaaaggcatcaggaggcttggtctggtattaggaactgaagaagcagcccaatccctgaccagaacggtagcatcaaatgccttgtggtttccaggtggctgtggtagtgactcaggagtcctttagtgtgttctcgtgaacaccaggttatgtggatggcaccttatacttttcaaagctctttcaatctgtccgctcattctcttctaggcattgtagcttataccccttcctctcaccgacgctggtttagacctgtcaagttcttgagcgtcactgctgcacccatgagtccttgcaccagtgcctctcctgtggactttacctgcttggcagtgtggcccatgttcattgcatcattaacccggttttccaggaagcgccaagtgtcctcaaagtctggagaggagtcctgcatcatcaccagctctgttgtgttgtagatggcagccagcatggctcggcgggtgtaccagttaaaatcagtggactggtccccagcgtaatgccacatgtcatccaccatgctggtgagcaggctcaggctggacgggatgttgtgagggagca

SEQ ID NO: 159901 - DNA, 1000 bp, Homo Sapiens
tcaagtttcaaggacagatatcaatgaaaacttttatttactggtaaaatataaaaatccaggtctcttaaatccacacaatctctccaaatatttggcaagattgattccaagtccatatgggtggataacaagaacaaaggggtctctgctcagagagacgtattgtcgttcagagttctgccctgcttccctctaaatgctcaccaacctggactcttctaaagtgggcagacaagccctattctaagcgtaggaatagccccatttgtgcgtgacactaagttcctccaatggtccaaactgagcgtggatgactatccaacatcacacacaaatgcacatcccctctctttacaagacatgcagaatctcaagatatgtcaagatatgcagcaagtttaatacctgaaggttaacataaatgacaacaggacacagatgcaatgctacagtcaaatgtggttggggatggaagggggcagagggacactggatatcatcacagcaaccagtgagtgagtcctctggtgccctgaggaggttgtgagccacttgactcgtgtcacaaagaatggagtaaactaacaactctgaaagacaagagggtggcagcattgctgagatgagactcaaggcaggggtctgcagctctgtcacagagtgttaatgctcaacgatgcctgggctcaagagcgttctggtcagcattttaacatcagaagaagggcttcttcaggacacactcccttctcttaacatgaggtgaagaaacccatcccattctgaaaccaggtcccataataccttggtcttttgatacacagcagcactacacaccactgtgccccccagccagcttcactctgtctgctaagcacccactctgcaaacagatctcagagtgaacaaatccagaggaggtgggaggagccaccatggtgggatgtgagggacaggagttggctggaggagcagatgggtcccatgtcaggaacct

SEQ ID NO: 159902 - DNA, 1000 bp, Homo Sapiens
ttttttttttttttttttctccttcaggacatttattcagttactgtatactgaagccacagagaatctcaaatttgacctcgctttctcctttgatccaccaacacagattctaagtccaatcaagagctgcttttgataggaaaaagagttaatggagtgctatttctgccttttataaatcctccataggggttcaggtaacacagttccagactttgggtgtgctctaactttaaggtacaaagtctggaatggaatgggtctggaacagtggcactttgaaaagcagtccacttttaaagtccttatttctaaactatgaaaaaacaaacaccttccagagaagaaagatgttacttgcattcttgtttctctcttgctaaaaaggcccatcagatcgggctgagtagaccgaaggccacttgtgcaaagacaacacagagactgcttcttagtgaagattgcattttaatgctctgacaactcccatttcttcattgtcagaataacctggatagaggccaaagcttaaaacaatttgtacatatgtaaaaagaaaagaaaaatgagaaacctaaattgccgtaagagttcagggcagcagagcagatctttctggatttggcaccagagtccctgagcctggggatgggcccgggggtcaggtccttgtttgcagagggagtctgagggccagctccgtcagatgagtcatgtctggttgtttgctttgcttcttgatgtattctagcgttttcaccatggtcctggtgtctgcacagccgtgcctctgtgccaggtgccacaggttgacggagagctggttgagcttgttgttgcgtaggtccccatgggccaagatgctgttaaagaaggaaaggcccaacgagctctggcgcttcagggcctcgtccttggccagggttttcagatgctctaggatctgagccatcaccgtctcacacagcttgttgttttctgccaggaacttggagtc

SEQ ID NO: 159903 - DNA, 1000 bp, Homo Sapiens
ttttttttttttttttttaagaatgaaaacaagaaatttattaaatatacaaaacaggaatacagttcaattactgtgtctaaaaaatttcatttttacataaccaagacaatatttacaactatatacaaaagactcccacctgtgcataacctttggtccatctgtgctatctctcatatctgcaagagaaacctaaaatgttaatatttgagtgttaagtatttacatctttttgtgttggtttttaaatgcacaagtacccctgaatggctcaaagggatgggataatgctagaaacactaacttgcaataaagtgcagttttcatgcaaacttagccatcagttttcttcttttagataggtatccacagtccatatggactttttttctgatctatttttggtgatcttgaagatgcctcttctgtggcagctttagctgatttttgtattggctttgctacagaattattagagctaaaagctatgcttctttgctgggtaggtttttcattgggatttcgagttccatcttctgttaccttttccgacagttcaggctttgcaccattacttgatacacctattccacggcttgtttctttggctgaaggaacagttctgagactagctggcaagtcaatgttggttgttcctagagctttcgctgcattggtttttgctatttctaacagctccattcgatctttttcacttaagcgaaagggggttctgctccgcgacctcgtcctggatctgtccctccatctgctgtgctcctccgggtacactgtgcgaccaaagccgtagtagcgctgtccccgcgcgatcgcgtacgcccttccgcagtacgaccttccccgagagcgcgacctgctacgggaccgggaccggtaccgcgaaggagaccggtagtatctcctggtgaacccgtagcgcctctctcggtaacggcggctgcgggatcgcgaccggctccgcgagtatgaccgcgag

SEQ ID NO: 159904 - DNA, 1000 bp, Homo Sapiens
ttttttgatgcattaggactttatttggggtgaagacggaaaagctacgtgcaggctaggcatgtccaggatgtcagggcggggctccgaggacacagacagcaggtctagagctgtgtgacaaggtagcaggtgcggtgggaggcggagagagtcttggtgacggcacagggaggggtgggaggtcagattggtgctggagtgcctttgggagtgctgtcggttccagaaatatcccaggaccttgtctcggaacacctcacagaggtagtctaggatctcgaggatggtgagcaggctggccccgatgaacagccccatctggcccccaatgtcaccaagcagctctgacatctcataggccttcttctgctccacggtctcatagttgagggcctcaaagaagatgtccagggccagcacgttctccgcgatgtaggcctcgctgcggttgagcttccgggccaggaagcgcgcggcggcgcggctcgggatccgcaccatggagagctccttggcgtagcgcgtgctggcgcacgggttggggcaggcgcacgagtccttgcgaagcatggcatctatggccgggtgggcacagttcttgtactgctgggggctgcacactggcacgtcgcctggcatgtacaccattcggcagccgcacttccgagccacgtagcgggtttcgcaggccaggcgacaccccataagggtatagggagggctggggctggggctgggggagcctaggggatcagagggctctggctcatagttggggttcagagatgctgaactgcaatcgccccagggcggtggcaggaagctcagctgctgctgctggcaagaaacaaaggtctggtagcccggggacacccccaagcccagctgatcgatgatgggcggctcctcctggctgtggatctgcactcggatccccacctcaaacggggtctcctcattgtccctccacacaggtagatattcctcctgctgcacg

SEQ ID NO: 159905 - DNA, 1000 bp, Homo Sapiens
tttttttttttttttttttttttttttttttttttttttttttttttttttttttttttttttttttcccacaaaagtcaaatgtctttattttatataaaaaaaatttgtacagttttagttcctatgtttaagaaaaaaatcctaaaattgccgtaatgtttagatccactgcaaactgtagaaacaagctttttatatattaaaaaaaatttacattttacaattttctacatgcatgcacaaggtctcagctctgtaaccccacccccccaaaaaaaaggaaaaaaaatctagatccaacagtggaaaattctacatttacaatctcacttggaagggactcaaaaagccctcttccttttgcgcacggaagaacaaatcacaacaatcacacaccaggactgaatccatcagcagatactgccctgtgggaagggcagaggaaagagaagacagacggactgacagacaccacagaggaacaggggagttagcctgggaccaatggaggagaagtacgaaccctgggaaaaagacgtgtcagatgagaaagttccggagagtccgatgtctcatcgcaggtgttacatcatcagggtttgccattggaatactgagtggagatgggaaagagaaaagttaagggctgaaatgggaggggaatgggaagaaaaaatgagagacaagagggaaataagaaaaaacaaagagagcacaaagaccagtttaggagaaaggaccaatggggacagtggcagagtggcgaggtaggtgaaggactgaggcacagcgtcctgttgtggagggaggaaaggcaagcgttccgaggtggtgaaaaggaaggcctgctaggcacggtggggatgaacgaggatgccatgagtcacacaaaagacagtgctggtgaggcccagccacagcagccctatggtgtcaagggggtaagaggtgggcatacccccacagcaggagaatgagcagatccagcgcatgatgg

SEQ ID NO: 159906 - DNA, 1000 bp, Homo Sapiens
ttctaccttcctttggacagtgttatatttcactttcttctttgcaaaatgtttccaaattcatttgctcaggatttatttaagataataacttaaaacaactaacagttgtttatgctatatgcatatcatgcatgttctactggttcaaggacaaaattaaaacaagatcttctctgtaaagcaaatatatttattatgcactttcatatacacagggattttttgagtaatatcatacaagggataaaataaaacttttacaatgtgaaattcaatgtacatttttggctatttacatacctcaaaccaagggaaaaataaaaagaaagcatttgtttgcaactacatttgctgagaagtgtaaatggaggacattaagcaaaacaaatatttgcatagccaaaacaatattgagaaaagtatttacttctgttttttaagtatcaaactatttttggtgagaattccagtgagggtgggggtgaaaacaaagaacaaaaattattggctgtactttgcagtacgcactgatttcaggtcatttttccttccaaaacctttcttagaaacattcagatttttatttcattactgtatttttatcactttccttattataaactcatgatatttagggaatagacacagacggaatgttataaaaatgttataagcacatgccatcatagttgtgtagtggcaacagctgatttataaaatttaaagattttaatttcaaaaatatctattaaggagttttatatttggaggacaatttttactttttaatggagcagaagccattttcatttatagtattaaatcccccacagaaacaaataagcaaggcagggcatctccagcacccatcctatcatccttatcctaactcaaagtcatttatgttctattccaaaacataatttatataaaaacatcccgaggaatacttacttttgaaaatcgtatttttccaataggttctcttcctaccaat

SEQ ID NO: 159907 - DNA, 1000 bp, Homo Sapiens
tcatgaaaacaaatcttcagtcatctccttgtaaatagcatggaggacagcagctgcttgaagggaaaccttcagccttcctattggggtagccagatcttcagggctaacaatgtctagctcttgctctagaatatctcttcctgactccaggatctgccacagttgaagatatgcatatcccacttcttcacattctttcttttcttcatccagaggatcacttaccactgtaaactttaaatgtccttgatcaggatcttgtccattcagcatgtcgaacagaaaccgccttcggccttgctgctcctgtgggtccaggtctattaccttgctaaagtgaaagtggatttcttctcctgccctaggcttccttagggacactggagtctctgtctccgacaagggtaggtcgtagaatttgtactccacatacacctgttttatgttctcatcagacatcacttctgcctctgggtagaaggccagggagacaatttcaatgcacatcttctctgaatctgccttaggatatttctgagacatgggtggcactatgacatcatcactgtcggtagtttgtgcttcactgacttcagaaccttgttcagaggattctttgtcatttacaggatgtagaggttccttctgtttcagtgctgaatgggataatgtcatttcctcttcctcgtgctgatttttaaagccatcacctatgaagctgttagtctctgagaacttccactcagtgtaattcacctgctgtggtgtatttccatttaagatgttaaggctaagatactccattctattctttccttgaacacctattcttttgccatgttttcttcttgagtagctcacaacctggtgctccttctcctttctttctcccccatgaggaggttttctcttagatcgatactggccagcttcaatgggaacctcaggagatgccatctgatcctgggaaggaaatgaagccttttcctcttcagat

SEQ ID NO: 159908 - DNA, 1000 bp, Homo Sapiens
ttttttttttttttttttttttttttttttttttttttttttttttttttttttttttttttttttttttttttttttttttttttttgctcgtttattccaaatgtctttattgaaacagaatgatagagcaagaaataatgaggtctgggtggatgtctttgggcgcaggatggagcccagacccagtggttacagtgtggagctctctccctgtcccctgactctggccaaggaagtgaatgcaaagcagcagggaggaggcagggtggggacggccctctgagctctccgcgatggctggcgtgaggtgcctctgagacttctgggcagccctgccttccctactcagtcttcccgatcttcttgccacctttctgtgtgggccagcctcccgccagggtactcagaggccgctcagagggcagggttgggggtggcaagcagcgggacgtggtcacagcgggtagggggtggctgccgcagcagggaaggccggcgacacagctccccgtcccggagcacctcgggcaggagcttgcgcttggtctccggcagcagcataatgctgagaatgcagaggagggcgcaggccgccagcaccacgtgctgcaggaaggctccatggcccatgtggaggcgctgggccgggccgctcagtcctccaagcgcccctagagccatgatcaggcccaggccacggccccggacagtggtggggatgacctcagcagcaaggagggtgctgaggatggcggcagcttgggaggagaagagcccaaggacagagaaagtggtgatggcagcctcgttcagatctctgttggggttcccttgttgagcccacactgtggggaagataggatgctcacaatcccacaggcccagcaggaccagggaagcaatgccggtaagggtcatggagagaagaaggatgccccggcggccaaatcggtccacggtgacccccaggaagacacaggccagggctgcggtgccg

SEQ ID NO: 159909 - DNA, 1000 bp, Homo Sapiens
ttttttttttttttttttttttttttttttttttttttttttgggctgcagcatttattacatgtgctttggcgaaaataaataattcttcacacacatatttcagcaggccatgaaaaacggggagggaagggcagctgcaaagttctcaggagtaaaggggcgggggaggtgctcgggcagcacaggggagggaagattaaggcacaggtgcgcggggcctcagcggcccaggggaggggtgtggaaacctcccctctcagtgcatgcagctggtgagtggctggcgagggggcccacggcaaagacccctcttggcaactgtgagtcccctcatctcactgcgcagtggtaatggaggcgtctcaggcagggttcctcgagagggtcggggtctcacagccccagggccccgatcacgggccgggcctcgggagcaggggtgctcagcaagggggcaggcccggccagctggtgctgcggggatgctgggtccgcgggggcgggagccgggtcggcgggtgcgcgcatgcgcagagcttcgggcgggaaggccacgttggtgcagaagaggccgagcagcagctggcgctggcactcctcccacttggccagcgcgtcccccagcgagaggttgttgcgcatccagccgggcagtgcctctctgtaggcggcgcaggacagcggcacggacggcagcgactggacgcggcgcagctccacctgctccggcagcctggagggcaggtgcctgcccagcttcctcttggcgcgcatcaccaggtactggcagatgctgcccgtctgctccttcatccaccggatgtcctcgggaacgtcgggcagccactccagcaagcggatggtgaaggacagagcgctctccagcggcagcgtgtagggcaccatcatggccgtggccagacgcacaggcagcatgttggagagggtggtcagcaggtccgtgggctccacgcaggcctccagcagggcctcattg

SEQ ID NO: 159910 - DNA, 1000 bp, Homo Sapiens
ttttttttttttttttttcagcggtttcaggctttattaacaaacggtgtaaaaaaccagacggatctggaggaagggacagggctgcccgtctcagctctcaaccttcccagagaggggccaggcctggcagccctgtgcgtcgcgcctcctaagcagtcaaccttgtcccctccaaggacaggcatctgacccaatccaggtcccagggaggcggagtcgcaaaccctaactctggggtgtattctgctcggcctcctctccccctccccagatagctctcccagcctggggcacggacagcacagactttgcagacatcacccggggaggtttctcagtgcagacaggagctgaggtaggggttggagaggctgacctcgagaggcccccgagggccaggaaggaaaaggagtcattccactctgagaagctcaaacactacagacttcacactgctgacgggtggacagaggccaggctcctcccctcggcaggcctctgtttctgggcccagggtggttgaggactcactgagggagagcaggtaaaagaacccgcagacagtaggcgatcatcaggtgctggcgcccctccctcctcccctgccctggctgtcagtctgtagcttcacaggtctttgctgaattccctcaccagcgtgtagcccaggcagccccagcccccctcggcctggtagccacagccctccagcatccctcccaccccccaggcggccacagccacggggaccacgagccgggcccggggctcccccatgcccccagcccaggcccgagcccgggcctccgcgaaggccagcagcctcctgcccacgccccggcggcggtgccagcgagagacagacaggcgggtgacccgggccccgtcccctgcatttgtgccaggggccagagccaggaccccacacacgtcaccggagccccgcacggccacccaggggccccccaggccacccggcggaggcagcgagccccat

SEQ ID NO: 159911 - DNA, 1000 bp, Homo Sapiens
ttttttttttttttttttcacagttctgacatttttattcactgatcataaatatagtctcatgagcattaaggtgatcatgaatgatgtactagcacctggaacatgaccatcatggagcactcactgattccccatcactggccaaagaagtcggggcatcttcctttcaccaagtgttcaactttggagggaccctccttctggtgcagcaattttattcttggcttgttctcaacaattaaaaaatcataaaagactgagtgtttgcaataaaatatcaaagaggataagaagattttctgttcttcttaaagtctaaagtaaaaaggggaggtagggaagaaggaaaggaaaggggaaagatgtcagggatctgccacgtttcttccttcctccagagcattttacaaaaacaaaaccggggaggtatttattaatgctgtttggagatgggttgcgtctctctgatgagccactcgagagcttcctggcggccctgtttctgcaattccttcccaatcacatccctgcaggtcaggtggtaattgttgagccagtcgcactctttgtctgtaagagaatccacatctatcattttggtctgaattggaaccaatgttagaggttcaaaggtcaggcttccccggttattaaaattatacttggtcttcacaggaaccacaaggacaacattctcaatgcgaattccaaaagccccatcttcatagtacccgggctcatcagtgacaatcatgcctgcctccaagggctcatcagagaatgttttgtaactgatgccgcaaggaccctcatggacattcaaaaaagacccaacaccatgtccagtcccgtgcaagtaatctaggcctgaatcccataaagctgaacgggcaaaggagtcaagaaggtgacctttggttccagtcgggaaaacggctgcactcacagctatgtggcccttgaggacatatgtgaagcattccttctcgtaggctgt

SEQ ID NO: 159912 - DNA, 1000 bp, Homo Sapiens
ttttttttccaagtaaacatctgcatttattttaaatcgcatcctcggtgtgtctgccccttttctgtccagctgtcaggtggcccaataacgccttggactccgtccccttgtcagtgccactggctgttcctggctctagttcccaggggagcctcaaactggggcctagcccagaaagccaccggctagcatcacatagcttctccagctcaaatagcccaaggttggcatgtctgccgacctccaggaataaccgcagtcaccgtgcccaggcaacacatcctcgtgctatggggagaagcctctgctgggtgacccaccagccaaccctgggccaatttaatttagataaatgctcaaagttcaaacggccacaggaaacccctgatgtaacacctgttgtgccggccagctgtgtctcaggagctgactgcagacacctggtctgggtccctcaagcccagcagagcttgttatgtcccctaacacaaaggaggaaaatgtggctcctcgagaggaaggtgctgagcacctcaccccagggtgtcaccgaagatgggcagtgacagcaccgtatggactggcggcccacaggccccaacctcacctggcccagggggtcagcagtcggtaaagcgtggccaggcgtgcccatggccgtccctgctccccaccctgaccatccgggcccaaacacacatggacagtaagaccaggtttcagaccacaaagtcaagaggaaggaggaccttctcagtagcaccacgccacgcccctctgccatgattctgaaaaggtttcaccagagttgccactctggggagatgtgatctgtccctgtgactggtcacattgcctctgtagcggggcggcagcagcagcagggcaggactgctaggcgtcgtcactgcagtggtctggagcagtcagcagggggcgcctgtctcgggccatgctctcccactccttcttcaccatgacgtacagcctcattgct

SEQ ID NO: 159913 - DNA, 1000 bp, Homo Sapiens
ttttttttttttttttttgattatgaagacttttattaaattacagtgtattacagattatatcataataataagcctttcatctttaggctaatatgatacaaaaacctacttggccacattacttcttgagtttcttttgggcagctttcttcttgaccatctgtaatcgcttcatagcattgagctgtgattcttgtgaagttgggcctttaagggatgctgagggagagctgctggattctgaagtagttttgctggtagtacttccactaggtcctgatgttccactatttccattcccacttagttggctgctgcttcctggaactaaactacttggactaggaagacctactttgctgacattgtcacaactaactgagcgactaaggccagttttacccaaggttagaggtggaggtggttttaaaggtacagtgggcgtagtgctgttattggaacctattttggaacctattccacctttggatgatgttgccagaccagtcaaacccacaggtttctggttagctgacgaagtagcaggtttcccagtattgttttgtgttgttgaactcaattttgctgttgaaggaccagcagaggaagttttggctgcaaaagctgcccatccagttaagccactagttactgacgaggaaacgctggcactagaagaatttcctgaaataactgtggatgtcttgacttctgttctcttaaacgctagaaaagttgtctcttgtttcagtttagtttctggtttcttaaccaatggatctttgacagctggagttacagaaacaactgcaggggctggtttctgcggtggtttctgagttttttgagccattcttttcatttgtctggtacatcgggcacaataccacaccaggcgagggtcattcgcttccttgtctgtcacctggggtttatgacaatctcggtggtagagattatggcactcctgacattctactaattgattgccagatgc

SEQ ID NO: 159914 - DNA, 1000 bp, Homo Sapiens
ttttttttttttttttttaaaagcatacaaacaatatctttattacctgtaatatacttaaagagcaggggtccccagttggttaaacattgaaaacagtgggagagcttcagaatagagaaaaatgactgtgcctcacccctcacttactgagtcagaatctgcagagagggaagtgctgagagatgtctttttaaaaagctctccaactctccaggtgcttctgtccaccagccagatttgggcaccggtgctgcccagcatgccccaggcttcagggtatgggagtcgccctgggcttgggtcaggctggggctctctcattcaccaggtgtggggaggggcttgagcctgcatttccagcaaattcccaggtggggctgaggttgctgatctgcagtgctccatctctgggtgtgtacctacacacccgtcacctttgttgtactgggctcaggtataagttgcagggtgcaccgtgtatccccgtagccctgccctactccatgctgcccccagtctcaagtggtgcttgaacttgccttcaccaaggcagttctcgtctcagagttgaaccctccctgagggcccccaacagccctctccaggccttgtatcagtaggaaatgaaaatgcattaattgggaggggtttatctggggtcaaaggctcagggagatcattctttttattgccaaggaccaagaaacaaagtgtagaaatgctatacacaatggtcatgagctacaaggtaggaatggggtgcaggggagacgtggtaacacacagcactattctgaacgaactccagctctccattctaacacttgaaccaaggaaagacagcagtcctttttcactaagcctgcaacagaatgcaaatgtgacttggtttatcagctcccacaggacaggcagcgcaaaaggctattgtaagctggttttgggagcccccatctcaaacagagagtggatgctgaaggtggtccctggccgccac

SEQ ID NO: 159915 - DNA, 1000 bp, Homo Sapiens
ttttttttttttttttttttctgaccattgtttttaatttatgaaatcaagtttaacacacaagaagcctataaacactgcaatacagaaaaattaagctgctgcattgaattcttactccaaaacaatgcaaatctgcatgaggtctctcccgctatgggtgtgagtggaagagagggagacttttttacctggggttggtggtggagtgaaacacaagggtgggagaggttttgcaaatagccagagaacagaaaccaatgtgcagtcactgacacacttgaccagttaatttgcacttgtacttggctgtggctgttccggctgtggctccttcggcttctttgtcttcttcttcttctgcttggagagacagctcaaagcagactcgctcttacttggggcagacacaagcaggggcggcttgccagactgagtgggatacttggttttctggctctccgtaaacagtggctgggacagcaggtggcgcagctccttcttcagaaccttcatctgcttttgtctccgacgttcttcttgctggtcagcttttcctcccttatacatgtcttcttccagctcaatctccagggcagctgctgcctgctcaatccaagagttgtgcaggcaagcctggaagttccgatactcagatttctcaatctgtcgagctaaacggattcgctccttgaccacatccatgtattttgtctgcacggggaacagtgggatatcctcatctttcttgagcgttttgtaaatcttcttaaagttgatcacatcctcaggcccaatgagcatcagactgaggccttcattggtagctcgagcagttcgaccacttcggtggacataaatctccgaggtacgtgggacctggtaatggatgacatgctggactttaggaatatccagaccccgagctgccacatctgttgccaagagaacacagtcttccagacgggcaaactgctccaggtttctgagcctctgcttc

SEQ ID NO: 159916 - DNA, 1000 bp, Homo Sapiens
gggaaatcccataggaagttttatttttacttactagtcctttagcatttttattttaagaaatggcttaggctgggcacagtggctcacgcctgtaatcccagcactttgggaggccaaggcaggtggagcacctgaggtcaggagtttgagactagcctgaccaacatggtgaaaccccatctgtactaaaaaaaatacaaaaaaaaactagccgggcacggtggcgggtgcctgtaatcccagctacttgggaggctgaggcacgagactcacttgaacctgggagttggaggttgcagtgagccgagactgcaccgttgcactccagcctgggcaacaagagggaaactccgtcacaaaaaaaaaaaaaaaaaaaaagaaagaaattacttaaaggacaagctctttagaacaatacaacagtaccaagtgcaaatatgtaaaagattaacagtacttaacagtactcaacagttacagtggaaactacacctttagacttttttgaaaatactcttggccacaaagttacatttggactctattttccaacttggagaggccaaatgttgctgttctttctgataaaaagcaaataccacagaagggcttgttctgttttggattttttttttcattttgtttcacatgagtgaaaaaattaacagctgccctcatttctgaaaacaaaaaactataaacaatcactgttgctcccaatgggaccgttggacataagccctgaggctttggggtcaacgggctagactctagaagcccaggaccccgccaaggtcaagtctgcatacttggggcagggcgagctgttgaaccatcgcatttctctgctgcttctttacatgggaaccaacacaagaacaacacaatccctaaattggctgctgcgggatcctacaagtaagtgaaaaagcgagaggacacagccaaggagtgcttgcctacccagcccccttcttctaagccataatcccaaggg

SEQ ID NO: 159917 - DNA, 1000 bp, Homo Sapiens
tttttttttttttttgatagtgctttgtctttatttctgatgcccatcttcttcagaggttaagaagaaatgacactgatgtacaaatgactcaccaagggactctcacctgactctacccttgcaggggtggaataaatcccttctattttcaagtctatttgtcccatttctgtttagacataatttgaaagccagcttggaccttgtacttttcaattatgttaacgtaaaatactcgtaacgaatgtagtatgagtttaaagtgagcttttcagatcctataagtgcatcctaagtaatgacaggctttaagataaggaatatatgcattttgttaaggcagaaatctcataaaatttcatgaaaaaccatggtcaatccaatgatgcactttttaagacaagtttgtctggaaactggaagggtcaaaagacaacaaaaaagcacacaccaaaaaacctcactttaagcaaatctataacttgaaaaaaaaaaaagcctaagaatattctgagagtggtacatagttttatagtagccacagtaacttccagtgactggcaaatttctttgcatcagctggcatgtgtggtgaatggaattcccatgaacagctcttacatccttccgctttccttctacaggcctcggtcttgtttccaaaggtgactgcagtgaggatgtaaggtccatgacctctagggataatgccatccactcaggaagaaagatgctgagaaactctagggatatctaagtttacatcacagggggagaatcaattgtggaggttttaagaagacatttgaatttttgcccctaatcaagaagtgttttgccatctggtttacattcaataactagttggctcatcatttgcagaaataaactttcctctagattaggaaacttcatcatgagatctgagatatactggtttggaaagtttcctcagtttctcttggcttcgaagtccccggcctcggagtggggtaag

SEQ ID NO: 159918 - DNA, 1000 bp, Homo Sapiens
ttttttttttttttttacctgtacaataggcactttattagtggttggaatgcagttacacgcaggggtgtgcagacgcaatgggggcagggctggtgcaggcacaggaaacgggagacccccccctctttcccctggggccaggggttctccctctccaggatcctgggacagtgctgatgagcagagacatgaagtctgagggggacttggaatatggcaaaggggcaactgggaagccagttcccctgagtttgacaagtttggcaaaaggatcaagtgaggtgtgtgggcagaggggcccggtttgcccaggacatctgccctccacctctccccctgaaatcatcccttgggtgggtttagtttctttcctctcttacaaagagagctgtgtcaataactggcagaggaagtcgggaaattcagcctaactccctccagcccagcaggtttccattaaacagctattagccatctcctctccagcctgctctccactgccaacccccgcaaaactctccctccctttccctccttcccagccaggagacacccccacctgggcacacacactcccacccgtcactcccagctaggagggagcaaaaggaaggcactccttggcggccccatctcagctgttgagacagacggaaagaaagctaatagaccctttaatgcatgtccaggttaaaaaataataataataaagaaatgcttctggtggcccttgagccaactgttcaggtgtggagaaggggttcagtcctggccggagcaggcaggaataaacgtgggtgttcactgtggccagcagctccctcagacacaaacaccgtccttcccgtggtctggcccgttgtcgtgtaagcgggggacaggaagcatgagggagcttgtggaggtcgggccacgtgccatcccagacatcaagaggccccaatgggtttttacttgtttctcgcagtctggaggggcagccatgaaaactccaagc

SEQ ID NO: 159919 - DNA, 1000 bp, Homo Sapiens
tttttttttttttttttttttttttttttttttttttttttttttttaagttttacattattatattcagacaaataaccatttagttactctatttcagagcactgaaaaaaacaagtagcaacagaagacagacttacaagggcactaagtctctggtcactcaaggaccaatcaaaggaatgcgctgttaggccagaaaggagtctctgaagcaaatgattggaaggaaaaaaaaaaaatctaaggaaatacaagccgaaaagtttccatttacaataaccaagggaaagagggacccgacatgatataaaatcccaaataagagctttccgctgaggcaggtttctgagcatggaaacaacaccggtagggactggaccggaccacagtctgcccaggccccgcctcggcccttctcgccgactccagcatgggaaatactctcatcgtcccggagcaaagatgaaatcaagagcctgccgttcggccgctgcgacgtttggatgccacaaatccaccatgaaaaccacccgtgggccatcctctgctgaaccttcatggaacgcagcatgcaggaaagagtcatcaaagagaaggcagcgcccttctgcccagcactggggctctccccccaccaccagctcacagccatttggagttttcagacctaaatggcatcggatgcggatgttggtgggtccatagtgctccgttatcacagtcccagggctcagcacagagatgcacgcgttcccaaaaacattgttcccaatacaggtccgaaggcttccgagcaagcggtacgtccgtgggcacttcctacagttcctgggaacacaaaccccctgattgaccaagtaaaaggtgaaccactccccgctgggggtgctgttcattttccatccttgcgggaggctgcagtttgagaaagctttgtagagggtctcaaactcacacaggatggtctggaagttccgttccagcacttccacatcat

SEQ ID NO: 159920 - DNA, 1000 bp, Homo Sapiens
ttttttttttttttttttttttttttttttttttttttagagaaaaatatgtccattttattaagcacaacactgagcatgaagctggaggggtggagggcgaggaaactggggaaggacaagaatggtgtgctggactttcaaggagagaaaagggaacagaggcaggattagaactcctggcagacattaaaatagtcaacttccaaggttaactccattgggtgtgtgcacggaggacatgtggccaggataagaattccttgcagcccttactcatgaacttctttctattccactttggagggtgtggcactgcttttagattgaggcagggagaagggccagaagtgtgctggctgggtctcagcgcacttgggagctaatcctggagttaaggattagaacttgaagagctcacaggcagaccaccatggggagctgcctgtcattcatgcagatgggcaggcaacgacattaatgagcccaatctggccaagaggttggaggcttgagaggtgggagtgagtgtgtgcagagtgggagtctgggtagatgctccatatggctttgcttggagaaggtgacacagcctggccagcccattaagcttttcacgacaaacagcacagacccaggcgagagctatctacgtacactgcacagagccacggcacgtagggtgtggggcatagagcaggcaggtcagggagacctggaagctggtgggcaccgcttctcctgctcacagcttcaacaaggcttctacgccttggggctccctcctgggcctcctatgaggggctgccccgctggcagcaggctggtgcttctggccagaaactgctcctgctaagccctgctccacttgctctgccttcctccctctgccggatagacaccaggtttggaagagcagaggagttgaatatgtctcctgaaaattgcagtgacataggcacaggctccaggaatcacataatgagacagactccagtct

SEQ ID NO: 159921 - DNA, 1000 bp, Homo Sapiens
gggatttcaaaagtttatctcaatctcctcattcccagacttccaggtgggaggcaggccgggcagtaatgtgagcatctcaaggacaccacagtcactgcgaccaagccagtctgtgtcctcatttacacaatgaaggcgatggaccacatagtctctgacgtcccactgcaccctgacagctgacaaatctgtttgtcctcaaagacaggtctgagagggaggaaaactgatggggatgatgagttagagctccgggctccctggggctggaggctcatccatcagctgctggaggtgagaggctgccttgtccagttttgacaattccagctggagggaagaaagcttttgttgcctctgagtccctgcctccccttctgatggggtcctggctgtgaggctatcaagctgcttctgcaacttgtaccttcgggcggctaacagaggtagctggatctgcgggtccaccaggccctgcagctccatgtagacttgagccgtgtcactgagtggagcctgggcccagccggagggagctgctgcgcctgggggtaacaggcccacagccccacagtagcccagggtgcccaggggctccaagaaggcctcgaagaggccctggtccccaggctctgagctctgcagcagcactcggggccgggctttggtgagctggtacgtggctcggagagcccttagcacctgcacgacctcttggacccgggagaagcgccgctccagctctggctggcgccagtgctccaagctgcaggcgctggggtagggggcaaccgagatgctgggggcaggggggcaaccaggcctggggggcagcctctgccagagctcttcagccaggaagggcatcagtggggccaggaggcggaggccgaggtcagcgcaggagaacaggacctgagggggccccagggggcggggcgagtgccacagcacgggcttcacagcctccaggtagacgtcacagaggttgtgaagc

SEQ ID NO: 159922 - DNA, 1000 bp, Homo Sapiens
actttttccatcctattacataatcagctcggaatagatacaaataattcggcagaagagcaatctggaagagacctccaactgcttttccttgttgaagcccctttgtgtgccaggtagtaatttccaaggcataaggtttttctctgaaggttgtattcaactaggaaagacacaaacattctcctaacttccacccaaaagcacacatacctttctttgttaaaatcataaatggaaaaacagaaacacaaggaagcatgagaaaggtgactttgaaattaatgttaaagtctgaatgacaacctagaaccttcttattttgggccccaaagcctctcagtgtgggaactccaatactataaagggctttccctttaaaacagttgaatttagtgtgcatcagaatcaccaggagggcttattaaaacgtggattgccgggtcctctcattagagtttctgattcagcagatctgggatgggattgagaattttcgtttctaacaagttcccaaaggctgctgatgctgctggtcttgtgccatactttgcgaaccactgctttaaggaatgagaaaccaggggatcactcacttacttccatgaccacccttgtcacagaaaattctccatggtataatcatgaagaagaatgaccaaaccatcaaactggaaggatctagtatacataggttgaattttcaaccgtcttcgtgtccctgcagctttggcattttgataggtatcctcccttcaaggctacatcttctgggttactaccacctttcccaggatctgtggccggcagtgctcacttccagggctaggctgagcagacatgcacccatgcaccctggtggccccatatatccgtagtcaggttgattcaggacttattaaaatataaggctgattggattataaggggcaatatcttcaggctttggcctttggggaacagtgttcataagatcattttattactatggccttctcag

SEQ ID NO: 159923 - DNA, 1000 bp, Homo Sapiens
tttttttttttttttttttttttttgttagtcttctctaattttattacagggcatgttggggacaggggagggaagtgttagaggagtgacagggcagcccggggccctctcccaccctgagcctcgaggcctggtgggggacatgaactgcagaggcatcagataaggcctcagaaagcccaggccatcattttccatgggaccaggctggctcaatgtggaactggccctcccagagcagcaggagaagggctcgcatgggctgcccccgtcacctgtgcctgacaggatggggggggaggcagagagagagcatcagacgccctccctccccataaggggcatgggggatggggacacttcctcccaggacacagggagcctggctgagctggctggctcatgccccatctggtctggaggtcagaggggagtgagacactctggtttgaaaggccttcctttccactttggggaaaacaggcagggagagaggtgagggtgccatgccaaaaaacacccccaaatccagatgcagactttggagccacatgtgggtttgaatctcaactctacctgagtgaccctgggcaagtcacttcacttccctgagactcaagtttcatcaagatgggaacaatgagcatctgcctcacaggcttgtcgtgaggattaagtgagaaggtgcgtgtaatattagcgatgactggatgatacaaaattaagaacaaggctgggcacgattgctcacgcctgtaatcccagcactttgggaggctgaggcaggtggatcacctgaggtcagaagttccagatcagcctgaccaatatggtgaaaccccatctctactaaaaatacaaaaattagccagccatggtggcatgcacctgtaatcccagctactcgggaggctgaggcaagagaattgcttgaacctgggaggtggaggttgcagtgagccaagatcgagccatagcactccagcctgggtgacaga

SEQ ID NO: 159924 - DNA, 1000 bp, Homo Sapiens
tttttttttttttttcagaaattgaaattttataaaaaggcatttttctcttatatccataaaatgatataatttttgcaagtatagaaatgtgtcataaattataatgttccttaattacagctcaatgcaacttggtactttcttccctccctaaaaaacgagagagaaccaaaaaataatatatatatatataactgtatatatatatttatataatatagacaaacaaaatatgaaaaaaatcatttcctctttggtataaaaatcagactctcaccttgagagacacacagacagacatgatactgggtttgtaaactgtgtggccaaaagggatttccctgccaagacttcccctctcccattccctgcccacccgcccccacctcactgcagcccatccagttcctttggggctcccatatggaacatttaaaatccccctacccactcccagctccaaaccattcctgaagaatcccccgacccactatcaaagaagaggaaaggattcttctcaaggctgattaggtagcgactaacttgggaaatgccttatttagggaatagcttcataggtgtggatgaagtaaaggacaggctgtggccaaactctgacagtgtcccatccagaccaagccaggcactggcctgggcctggttttgcccttatcctcctctactacccggcacaaggattccaccacctcttgccagaggctgggcctgaggggcggggctccttgcttactgaagaagggagcagagaggccaattcccgttccagcctcatctcaggtgcacagcttccccctgcagccccaccacagggccctggggtgtagatgcaagaaagcaccagatggggaggcaaagggaggtcaaaagggagtctgccaataaacttgggtttaaatttaaaattaaagaaaactacgcctccctgagctgggtgtggtggctcacgcctgtaatctcagcactttgggaggttgag

SEQ ID NO: 159925 - DNA, 1000 bp, Homo Sapiens
ttttttttttttttttttaaaaaccttactttttgtttaatttgttttgccaaacaaacacagtgaaaactttagtctgactaattgtacagaaaatagaatttgtaaccagtagcaaacaaaacaggataaacctaagtccctggcaagctggatctccatcagcaggtcatccagatccccttgtaaatggcctcctgggaaaataagtcctaggaggcagaggcacagatttaccagtccccatcagaatcacaggctgcacctgggaaggaaaagcatgaaaaggaggagaactgatgttacttgaatctcttatcactacacacattagagttgtctgactgctgaccaaccttaaggtatggttttcccaaacctatagtccctggacatcccacctgcatccctagagggtaagtttcaagttcagtggttctgaagcctctgcttaaccagaatctgcaacaataactggggaggaagggtagacaaagtcataattgctggtgtcaccagggcagagtctaaggccccagcttccacttcaggaggaaacaattgaggatgccaggtcaccagcaagagagtccagctgccttaagcctcagtactgtcaaccagtgcccaggagtatagaggagttcaacaatggcctgcggtcccctggctggatggggtctgggagtccagcaggctgccggggcaccagttcacattccgtgcttcttgcggatgacagccatggcaagcagccgatccttctcacgcagttcttcgcgcagcttggcctcagtgagacgcaggtggcgaatgctgcctttcatctctttcatcttcacttccatcagagccaggatgtcccgctgctcattcagcttgcgcaggagctcctcctccgtggtgcctgacgacaaggagtacgaatggtcggagccagtatcagggaagccctcttcccctaccaccaccaactgggggcccatagggcactcggcag

SEQ ID NO: 159926 - DNA, 902 bp, Homo Sapiens
ttttttttttttttttttttttttttttggagactgtctcactctgtcacccaggctgaagtgcagtggcacgacctcagctcactgcaacctccacttcctgggttcaagtgattctcctgcctcagcctcccaagtagctgggactacaggcaatgcaccaccacaccaagctaatttttgtatttttagtagagatgaggtttcaccatgttggccaggctggtcttgaactcctgacctcaagtgatccacctaccacagcctcctaaagtactgggattacaagcatgagccactacacccgacctcatagtagttttgatttacacttccctaatgattgtgtccagcatctactggccatttgttagtggtttttttcttcttttaagaactgctgagacatccataaacattttcaaaatgcagggtatgtttttcagtgttaaggcaactgttctgatgtgtttttcctttgctctctatcaccaaatactgtacatataaatagtaagactgggctttgtgttgtccattgttaatcctaaatgcaacaaaacacatggagactttgaaaatccttcagaataatgctatagttaagattttgctaaagcaagtgttttttctaactccttgagctgcatattgccttgagtaatcatcatccggattgtatcctcttcggtggcacttttgtttcttctgaattcttctcttgcccaatctttcaggtatttgcgatcagaatcatttggaacttgccgaattgtttgcaaaatccttctgtagaggagaagaacttgttgccttcttacgaactgctttaacgttagcgtcgctgggggtaagcgggaagcagccatgtccaccagaggtccgccggagcctcagccccc

SEQ ID NO: 159927 - DNA, 1000 bp, Homo Sapiens
tttttttttttttttttttcttgcgttgcttttatttaatcacttccccagcccttccatcgccttttttgaggataagaaacccaaagttcccagagattaacttgcccaagatcacttggcctggatttgagcctgaggctcagactccaaaacccacactcaatttgctacatctcccaggggtggggccaaggcagctgtgagcaaaaggagaagtatcagcttctcaagggcctagggtttgttggaagggcaaggcaagggcaaagggggatacagaacaagggggcaagtaccagtgcctgggatggacccatccattcaggcagggggtgtggggtgtcccctgtgcttagaaaccacctagcatcatagctgcaacagcactttattgggatctgagtctacagttcacatagggaggtgaagccgtgggagaagcaggggtaaaaaaaaaaaggggggggacttcaccccctagggacagctgcttccaaacctaacaaaaccccagggtaagtcctcgtgctgggcctcgagccagcaactctagtcaaatcccaaggcaccggtcagcatgtgggtcaaggggcccactatggggacatacactcaagaggatgaaagctctttagcttcagaatcagattgccttccccagaccccaccccaaaacaggctcctctcccatctcccccttcacagtgacaaaacacaagcccacatcccagggcctggagtatttgcatgcatttgcatagacggcaacgcaggtccagctaaggcctttttctacataaagtgacatcagtgcagggctggtgattttgctctactgtgtgaaagatatctgaggacaccaaacaagccaggacagagtccaccctccaggagttagataacgctgggatcttgggctgggccaggccaaggccattccctgtggggcagggtgtcagccccggtggtggtggtggtggctatggctgtgcccctc

SEQ ID NO: 159928 - DNA, 1000 bp, Homo Sapiens
catttgtaaaaatctctttaataaatatacatcataaaagtaccaaaataattaccaacaatacattatgtacaccatttacaggagggtaacacaaaccttgacaggtagtaacttttcaccccacatcactgaacgcttaacactcctggctgttacatgtcacaggataccactggggtcagtcactcgaagcacaataaatataaaatgtggtccttccatgaaatttttgataaccttctccaaaaaccccacaaaggtgaggtttaaaagaagttttctcagaatttcaatgatctttctcgtcccctacaaaaagttcacaaaagcaacaaaatgagggctgatcctaccacaataagacgttttgggctaggcagtgtgcagtgtggatataagtacaccctttaaattttttcttcttttttctttttttagaaaaataaaactttttttttgtacaaatatacaagtccatgttctttcagcccctttgcactcataacgtcagacgctggcctccaaacacacagtcatcatagggcagctcgtcctctgtgaactccgtgaactctgactctgtgtcatagctctcctcatcctcactctctggcagcatctgaaggttttctagtgtcagctggcccagctgctgctgtatccgggtgcttgggcggccccaggtgagctggtagggagaatagccctggtaggtaactctgttgacatcagccccacacttcaacaggagtgacaccaggtcaggattttgcaggtccactgcgaggtgaagggcagtccggccattacagggctcctgagcattgacatcagcacccaaggacaccaaaagctccacgatgcccaggtagccatggatagaggctaagtgtagacacgtgtggccattgtagttggtagccttcaggatggagtggaggtgcggggtggtgcaggactgagtcaggactcccacgctggccaggcagccctgctc

SEQ ID NO: 159929 - DNA, 1000 bp, Homo Sapiens
gaagagaattcatttttattaagaggtgaaacaaaatgtcactcatgtacaactaggctttatgggaaggtggcagagtggctgtggacacatttgcccaaagcaggctgaccccctcttccacggaagaggcatcttaaagcagtttcaccagggccctggcagggagccccagggcaggatcccacattcctatagccctcacaacaggtgccttcctgctgcttatctgcagggaggtcttcgtggggtggagatactggtggttatttgactgttacctgtggcctgtcctctgcctccttccgttgaagaaggccttgtcagccactctgtataactctcctcgaatatttaccatgtttattctttacctagatcctcagggctcttagtctaacgggaattcttgttccactgacatattgcaaggctctgactccgctttctgtgttcagcttcccctggcggggtctgcggtggcttcatgtgggttgctttcgagaccagctccttggtagtccccactactacagtttgtgctctctgctgtttgtgatccttttcttctttgcagatgttggaatatcttgttcctggcttcccagggcatggctcaggcccgtttctcttccaatacctccactcaggctggcagaggccactctgtctcagaggcatctcaagaaagatgggatctgtgttgactgcactgttcaccatcagtctctggggagggcccatctccagatcattctccacaccatcttgttcacaggaggaggatgaggaggaagaaacagccaggggagcgtgcattgctactttctcctctttaggaccttccaggggcaaaagctgtgctgtgggctccaactctggaagttctctggccatgacttctgaggtcctggttagaggccaccaagtcgtgccacatggcgggcagccacagaggcagccctggcacagtagctggcagcaggcatgatggtggcag

SEQ ID NO: 159930 - DNA, 1000 bp, Homo Sapiens
gtcgacatcatcatcatcatcatcatcatcgaggtcgacggtatcgataagtttttttttttttttttttgaattggaaatatgtttaatataaaacaccgatatcctcaaaacattacttgcacattaatttaggaaaatgaattttaaacaatcttcaaaacatgataaaggacagtgatatctttgaaaaacatacaaacaaaaacattaagaaatcacaagatgtcttatagacttggtttcccaaaattagatgtacaaaacaatagtcacctttaaaagtaccccccaacacacacaaattgggaatgaaatatgtaattatagccatctttatatgaaatatccaaacaacaaatatatttaataatataaagatagtgccaaaatcaacaaaagctaagaatactgaggcttaactgaccccgattcgtatgattttgaaataaaatgttcagactttctagctttatcttaatttgcctttgcttcactgctttatgtagttataatgtaaatctaagagatgcttaaaacagattaaaataatattgttaaaaaacatttttcttatctgagaaaatacaatataatcatatctccctcaaaatactcctgataacattagaaagttctgaagtgtttaatcatatataatgccaccattatcacatgaattcagaactgttacctgaatatttaataaaaaattaagttccatgaggatcataggtctctaaaagctacaatttaaaaatataaaagcaatgagagcaatctggctttgcagatgaatactgggtaaactgagctataaaattatatatttaattctacccattaataaataggactgagggttttctttgttaaagttatgaggacaccaattttatcttctatattagagaaactatacataaattccgtgataatgtgagtgaatatttatatagcagtacctcaagttgagctacatgtataatttttaaaaaac

SEQ ID NO: 159931 - DNA, 1000 bp, Homo Sapiens
ttttttttttttttttttttttttttttttttttttttttttttttttttttatatttgtaaacatagcattttattaacaaaatgtttacacccttcttacaacaaaacagtgatttagcatgttatactctataaaagtgtattatagaatattcaagctaaaacaatattatttaaaagtatggcaaatcaactttcatttgcaaactatctactatgagcataggcatgaaaacaaaaatcttacaacaaaaaacaaaaggtctagttttcttttgtcagcatctataaacaatacaggcatcatatggtttacatacacttaggtccagcccaaggttaagactgcaaaaataaagtcttcaaacatccacagaagcttggcaaaccaccactgcagcattccatgacaggtaaccaggccatgtgtcatgcagtaagtccaaggccataaatttgggctgtttataatagtgctacaaagcggccaaaactgtaagcaactgaattttactttcgtaatagatgcttttataaaaaggcacaaatatcttattcctttcatcaggtcttgagaaggcatgacattcttaggagaaagagagattgctggtaggacggcttagcttttttttttgaaaaatgtctaggctcattgccatagctgtttttcttcaagacttttaatttggacttttacacgcttaacaaatgctttattacaaattcagcgaagttctgaccacttatgttaactatcttattaccaatggtaaaacaaaacaaaacaaaaaaccaaaacccattttgttaactggccgtgttcccacggtaagcgagcgctgctattctctttctgaagcagcggagttcttcacctaacactggcctctgtgtttcttattttatttgttttaatgctctggccggtttttttttctttcaaaaatgttaaattaagagttgtacatgtctttgaggtgcctatgatattttga

SEQ ID NO: 159932 - DNA, 1000 bp, Homo Sapiens
tttttttttttttttttttttttttagtatcagaaaagatttattagaaaattctcacgctgaactggtgtagcatgtggtgcagcattcagtgaaactggctggaggaaataggcttgtttccagagttgtccttatacaaaatgtataaaaagcagtttctggtgtgacttgtgctctgcctccaccccttgacatcccaaaatatcccaccagtggctatgcttacccattttacagatgggtaaactgaggcaccaaggtagtagttgcactaatggttacacagtgcagtggctcttgggagttgcccttctctgcctggccgtggtgggttgtggtggggaaaggggctcagggcaggaccacggcataagtgggaaacatctcaccaggagatgggaaagtctagaagggaagacactcaaagtctggaagggaaaagtctttgggtgaggcagagactccactgccagctttagaggtgggtagaagaaaggccagtgctggtgaggaagccctgatctggaggcctagtcggagacttcgctgtagtaatacttgtgggcagctggcgttgtcttccagccggccgcccggaactcaatgatctccagcagcagcagctgggccagggagctgaggccagttgggagcaggaagccatcccggatcagcacaaagagctcatccatgcgctgcccattcattttctccagctgctccccaacccggtgcagctgcagcaccaaacagtccacctcctcctccttgctcaaactgtctggctgggccagccggaagaggcagtcatagacagggttcaccagggccatcatgggcatgttgttcaccctcaggtagtcaaagatgttgcagataaaggtgacatagcagacccagccctgcagggagcgtgctcgcagctgctcccgagcctggtactcctgctgcagccggttgaggagtccacgtcggaagacactctggcctgcttgtt

SEQ ID NO: 159933 - DNA, 1000 bp, Homo Sapiens
cgtcgactttttcttttcttttcagaggctgtttctttatacaaaggcagacaacatggacacctcagcatgctgctgcagttcatgggggcccatcccaccgcttctggggagaggaatcggggtgggggcgcccgcagcaggggagagacactacacaggcctgggaccgccaagcacaccagctgcgagctcctgaagggcagacacatggacacacggacactgaaaccacgagcatggcacagccacagggaggaatggtggagctggggacagacatcggcagctactgccaactgctgccctcttctgccacgagttccttggcgaggagccttgtccgtgttactaaagagccacgtgactttatctgatggcagaacgtctcgctttctgcatctgtaagctgggccagtacaccgtactccacagggctgccgtgagtacagatgagactgaaacaggggcattgatcaaagtacccaacacagagcctggcacatagaggtgttcaataagtaacttttgtcaggagactcttagggaggaccttcagaaggccaagtgagatgacttccctagaaattctctcagggcatggggaccctggaggactccttggagcctgcagcccctggtgtcccaaggccccagaatacaccgtgccagggctgttcacaggcgtggggggctggatgcccagggaggtgcccgcagaagctgggtagacactggaggaggtggggtttggaccaaagtggttctgcacatagcacaggccggaggcaggctggtacggaggcaaggtgggcatgtgcccgggggtgcaggaggccaggaggccagcttctgaccactggcgtgctgcgtctgggacacagggtggcttggggacaggtgagggtggcagctctgtgtggggtaggagccaggcaccgggttcagtttccggctctgggctgccctcctctcggctgaagaccctgagacgtacttg

SEQ ID NO: 159934 - DNA, 1000 bp, Homo Sapiens
catttctttgaatgtttactaagcagtcagaaggtgacttactccattccccagttccagcccctgagcatagagggtttagggttaggaggagtaccacagactgaagaggaagtagagttaagggcttggcaagttgcccactcctatccctggtctagctgcctcagaactaaaggaggcctggaactaacaagtcactcccttccagattagatgaggccagctggcctttggatgccccaggaagaggtggtggcagcagtggcatgagggatccctctgtaactccacatgccaggtcatctgcactggattagatgtccatttcaaattgtgcgtcatcgggtatctcttcctctgtctcctgctccttcagctcctccagcttggagagaggggctgttggaggagttgtgaccccgggaatctgagggaggcagcaggggggtgtccgggcaatgggtgagttcttgcactccagcaggaactttcggtcgtagatgatcctggtgcctctggttaggagaggccaccatcggccgtccaattctcttcttcggtctggttagctgaggtgatgggatttcccctttgagagcagggactgaaggaagcagactggcctgctgggcatcagtgcattcagttgaattttggataacttttatcatagggttccaagcaggatctggattgtgaagtccattaaacagagggcctcctggaacatcagcaagctgaggatgagagggtattatggtgcctccatacatggaaattggcagacctttagaaaaatccacaaaaccacttgccataggctgatgaaaaatgttagagggggctaccattccagaatcatctctctccattggctgatgttgggagaatgtgcttgggtctgataattgttgatgcattggatggttccccatcacagattgcgaccaacctgataagccttctgacacagcattgacaccaaatgaccagattc

SEQ ID NO: 159935 - DNA, 1000 bp, Homo Sapiens
ttttttttttttttttttttttttttttttttttttttttttttttgatggtgcatgtagttttatttatgtgttttcatctggaaaaccaagtgtcccagcagcatgactgaacatcactcacttcccctacttgatctacaaggccaacgacgagagcccagaccaggattccaaacacactgcacgagaatattgtggatccgctgtcaggtaagtgtccgtcactgacccagacgctgttacgtggcacatgactgtacagtgccacgtaacagcactgtacttttctcccataaacagttacctgccatgtatctacatgattcagaacattttgaacagttaattctgacacttgaataatcccatcaaaaaccgtaaaatcactttgatgttttaacgacaacatagcatcactttacgacagaatcatctggaaaaacagaacaacgaatacatacatcttaaaaaatgctggggtgggccaggcacagctcacgcctgtaatcccagcactttgggaggctgaggcgggtggatcacgtaatcccagcactttgaggggcagaggtggacagatcatgaggtcaagagatcaagaccatcctggtcaaaatggtgaaaccccgtctctactaaaaatacaaaaattagctgagcttagtggcacacacctgtagtcccagctacttgggaggctgaggcaggagaatcgcttgaacccaggagacacaggctgcagtgactcgagatcacgccactgcactccagcctggcgacagagcgagactccatctcaaaaaaaaaaccaacaaaaaaactggggtgaaaatctaacggataattcagcattgccgcatagaaacctccgcaaaaccggccaaacaaacgcggacaggcggccctggcgtcagcgcacgacagtcacgtggggaggggcagtggccaggtcggccttggacgggtacaccaccttcaggctcccttccagatccac

SEQ ID NO: 159936 - DNA, 1000 bp, Homo Sapiens
gagctaacataaaggttttattgaataaatacatgcactgtcacgtgaaattagttgaacagaaaggaggttctctactttttaacccccatcccccaccgctgttctctatttgcagtggggggtccagctggaggtggaataaatgcggcaaccacagaaaaaacacacagctacacacaggcctgcatttggcttatgtgcctgaaaaagaagggccgacctcttgataaagaatgtctgtaaaaggaattcttaccgtgcagaatatattatcatggtaaatacagttacaaggctgcttctattttatttattttttgagacggagtctcactctgttgcccaggctggagtgcagtggtgcgatcttggctcactgcaacctccgcctcctgggttcaagcaattctcctgcctcagcctcccgagtagctgggactacaggcgtgcgctccaccaccacgcccggctaatttttgtatttttagtaaagatggggtttctccatgttggccaggctggtcttgaactcctgacctcaggtcatccgcccgcctcggcctcccaaagtgctgggattacaggcgtgagccaccgcacccggccagctgcttctattttaatctgaacttggaaacaccttcctactttaaggcacaggatcaggataagaacccacatgtacgagctaacagagctgcacttcaaatttactaagttaattaattttcccttcattggcttggctcaaggtagaaaagttaaaattcccttttcttagataaactgattatttaaaactgaaaattaacgttttgacaactcaagagtgtctgacatcgctgggatcctggagtgctgagtgtggcctcgatggtggcttcactcctccacatctgggaggcacttcagtgcctcagaatcaccccctttttttaaaagagaatggaggcagctactggaggccaagcacctccaggcactcaaggccctgggg

SEQ ID NO: 159937 - DNA, 1000 bp, Homo Sapiens
ttttttttttttttttttgtagacagggtcttgctgtttgcgcaggctggtcttgcacttctggcctcaagcgattctccaacctcagcctcctaaaatgccaggattataggcatgagccaccaagcctgaccctcttcttttgctttatttcctgtttcctccacatgaagcaggctccatgaaggaaggaactgtcagtttagtgcccgccacgttctcagttgctcaattcatcaacaaaccagcagggcccaatttaaattagaggtcattgttaatgaaagaagtaatagcaaagaaggtctccagtgctgaaatgattttcacaggatggttctgtatcttcccagtagccagggagccctttgtctgcccactgttgcctggcacgcagagcctgtccgaacactcatggcaatgaagatggcccgatttggatcctgggtggcctttcagacagtgtgagttcagactggtcttagggcacccataccaggttgctgggaggggcaaaactactcttttttaaaggtaatagaaccttctggagcttgctatcctctgtgaaataatttatttatttgagacagagtctcgctctgtcacccaggctggagtgcagtggtgcgatcttggcccactgcaacctccacctcccaggttcaagcgattcttctgcctcagcctcccgagtagctgggactacaggtgtgtgccaccacacccggctaattttttgtatttttagtagagatggggtttcaccgtgttagccaggatggttttgatcttctgacctcatgatctacctgcctcggcctcccaaagtgcttggattacaggtgtgaaccaccacacccggccagtgaaataatttctaatgtgcagtcacagccataattgtccatgtcttctctttcaccaagggggtgtgtgtctttgggcccagttctgccttccctagcccatgtctccttgtgtcatgtaggccctggcc

SEQ ID NO: 159938 - DNA, 1000 bp, Homo Sapiens
atttaaaaaaaaaaaaactttttaattctgattgccaaattatttaaggcaggtataaaaaaggaaagcattcaatatacattttacataaaataaactagattacagcataaaacaagtaaccaggcaatggcgttaaagtctctctcttctaaaactggataattgtaaacattaaaaaaaaaaaaagactgtagaactattcaagtaatagaacaatcacagatgtctctggtacgcaggctattgggttatttgccattcaagattatcaaaaaatgacacctcattattcacagatgctcattatttccccattttaatctttacattatatacaacacagtttttgtggtactggcaaccccatgccttccaaaagtactttttccacaatacacaagtacaaacagtgactacaggaacattttacactggtgcgtctttaacaggagccaccaaatagacatctaaattgtaccaaagtgtcatcatcacagttagcctttctgaggggcttatgggaaatatgtgaaggatatgcaaggttcaggcacactgatacataacattatttatttacaattttaaaggaaaaggaaaagaaagtaagtagccttttgtggctaacactttttaacatgacaaatacatttttaatttcctttactgagtggtttgcgacgtggcagcagaccctgtgtgtgcgagcctggttactgatacaaaaagtaaagaatatatttatatttatatatatatatatgtatatatacagatatgtatacgtatatatatataaaacagaagtttaattacagcaacatttgttactctgtgataaaatctgtaatttacaaaaatgaaatgactggtttttgcctgccattaaggcatttcaaattaacaccatggaactgatgtctgtataaagcgcttccccatgtgatccagtcacatgacaatgtacatgtccaatcttgttattctcttctttgtc

SEQ ID NO: 159939 - DNA, 1000 bp, Homo Sapiens
ttttttttttttttttgtttgataaagaatatgaatgtttataaaccaatattcaaaatagctgcacacatctgttttcacttgaataaaaaaacacattgtgacaaattttataaccttaacttaaaatacatgaatattaacatttactaatatatttacacattttatttacatcatcaacaaatctgatgaaaaagagcatatgtgattattttaacacagcaggttatgaccagtctttgaatattgatccaggaatgtgcactgcatttaattagaaaacatacttttaactttttctgaactcctagggcatatctattcacacaaaatatcgcaaggcctcagtttaaaaaaaaaaggagcagttgtatttaatcttaagggactacaaaactgccttgtttaaaaatatgaaaattcttatgctatttttaagatacttttattacttttatttttcacatcaaaattacttaattgaacattaagcatctaataaaaagttataaatattctatcacatgtgatactatgcacttcatgatttgaaacagctacaaactcattctcatagaatatgaggtagggccagtagtaaccccattttacaaaggaagaaaatgagatgtgactatttactagtgaaaaggctaaagttaaatttcatttctcaaaaactacaccttcttattagcctaatttcttttacaagtgaagcggtctggccaggtgcggtggctcacacctgtaatcccagcactttgggaggccaaggtgggcagatcacctgaggccaggagttcaaaaccagtctgggcaacatggcaaacccccgtctctactaaaaatacaaaaatacaggtggcgcgtgcctgcagtcccagctactcaggaggttgaggcacgagaatcccttgaacccaggtggcagaagttgcagtgagccaagatcatcccactgcactccagcctgggcaacaggggaagactccac

SEQ ID NO: 159940 - DNA, 1000 bp, Homo Sapiens
ttttttttttttttttttttttctgtacgaaactgagatttttactgacatgcagatgtgctttagagttaatgtttctacaaaaagtttctataaacaatagaaaatttctagcatgaagtcacaggatgttaaaaatattacaatgcaataaatacaactacatcctccacagccccaaccagacaggaataggcagctatcaggtttggagggaaacactcttgagatcgccttcacgatccacagaaacccagagcaccacacaggaagagggagcaacacaagactcccaacttctgcttccccagctttgcttcttctcaatctgaccctgcctgtggcccgcaccagctaaaaactgtagcttcagtccacttcggctctcggggaaaccctcttgtcagtggactggatggacaacaggtctgtttttgtgcagagcacatggacacactggtttctgtatggattaactctgccttacggccagtaataacctcagggccaggtcccgtatccatgtcctctctttacagggcctttcagtgacctctagaatggactcacagtacaggttgtgatgtgaaggcatgtattcttttggaaatggcctttgagaaaagtaaccagggacctgaaagaccatgagattgtggaaggcacctggacttagtcctaggagaagaccagcggctttgctagctgctcatcacagatgtagcctagttggtctgtattatccttggatgacaacggtgtcatgtgacactatctagggtactgtggctcttgtgcctgagtggaccttgaggctggggaggccagactgaggggtcattcatggaagggcaagatgtgtgaactctaaaggggatgttagcactaaagacttcccagccctggtccttggaggtactatacttgatactgtgccaagtttagcagtagcctgtaccatggatcccatcaggtgaccagattcttgcccaaagcaaag

SEQ ID NO: 159941 - DNA, 1000 bp, Homo Sapiens
ttttttttttttttttttttttttttttcacgtggaatggtgttttcattggtgttagttgggggaagaggttaatggttacagagccagggcctgggccaatggggtcaggctctccctgccctcaggtgggcagtcggggctcctgctgtggtccgaagcccctcccccattgtgtcctctcaggcagttgatagaataaattccatttaaaatatatgcatttctctctgcttagaaaataacatttacaattgaaaagttaggacttgtgggatctgttaaccccactgcctcccacccctgctagccctgcctcagtgagggaaggcgggggcaggagctgcctgggcaccaccgctgtgtatttacatgtcctctgtacacctacggagagggggcccggccagacacacgcctcctccagcctctcagggcctgggcaggatggtgggtggcaagaggcattcccttggcacaacttgggacatgggctggggggtacagagaaagcacccccaaagccccacccctacttcctccctgaggagagagctcttaccagggtccctgtccaggagcagggctgtcctgctcaatcgatcaaaccctgggaggggctttgctgagatgcagcggaggtccctcgctagtcaggttctaaggtgggctgccccacaagagctgtggtgcccacagccgcgggctgagtgggaaggggccctgctaggaggggcacttcagcctgaccagcccttggcccgtccctagggtggcaggggcctcttctgtgctggggcaaaggcagtggacttcggcaggtcacagtgggcactgctggagggctcagtccagcatggcgtccagctggtcagccagggcgtcgaacatggtgctgatgtcatccagaatgtgcttggtggaggcgctgggggtgccctcttgctccttggtgccaatgctcttctctgcggctctcagtgcagctgccagggacgag

SEQ ID NO: 159942 - DNA, 1000 bp, Homo Sapiens
gaaaagaaaatcagattggtttattgcttctgcttgtatacagagttgaagagcaagtttgagtgagtgcctggagtgggcggtggatgaggggaattatggaagggagaggggttcctcaagtctgttattttttaagagatggggtctcgctgtgttgcccaggctggtcttgaactcctgggctcaagcaatccacccatctcagcctcccaaagtgttgggattacagatgtgaggcaccgcacctggcctcaaatctgttcttgagcagtagagaggaaaggagaaaggaagggacccactggctaaaataaaatacatttttaagaagggcaactctcagtgagtggttgtgatggccgccctgctagggctcttccctcgcctcctggagctcctcccttcatcctctcctgtattgctgggcccagcctagtgtggaagaagagtaaagctgagctagaagtattttctgctggtgccccaccaatttaaacacattaaatttggagtgtagttctgcctttgtatgaggcttttatctatggtgacatcctgttcttggactctgatactgtaaagaaagcagatgccttcacttcacaattgcatacctaaatgaagatttagtacatttcattatggtaatcctcagcccagcctccaccctgcgtagctactggatttataaattacagtccagtacagtggcagttggagtcccaaattactaaaagccagagccaggaaatcttcttggattgtgccagtctcagagtttgctcttgattctgattttctatgctggtatatggaaatcatcttggacaggtctccagggattccagggaaagagcatgggtaagagtggctaagctcacccacttggatatctaagtgcacgttagtttgcatttccaaatccgcttctaatttggatagtacattttacaaagcttattagaaaactggtctaaaagaacacgtttgaaagagc

SEQ ID NO: 159943 - DNA, 1000 bp, Homo Sapiens
tttttttttttttttaagagacagggtctcacactatgctgcccaggctggactcgaactactaggcccaaagcctagtacacccgagtagctgggagtacaggtgtgcaccaccatgcctgggctttgtagcatgtttaaaggaacctaggtgatttagtcaaaagagaacactgcatgaaccaaggcctcaggtgcttcttgctgccttcatttccacagaggagaacacagggatttagaggagatggaaacattttctaggcagttattgaataacggatctttggaggagttcgtggagtagtgtaaccagaaagtctttaaaattaaacccttctaatcgtttgtaagtgtagatggggggacttggaaatctccggggcctaatcatgctcgcaaaaggagtgacattaatagctttggagatggtgtcttcctctcctttcccaggttaagttcaagcagtaacagcagaggttctacctccttccatcgagtctttaagctggacccggggaaataactgttaggaaagaggcaagcatccaacccactcgagctgtgggctgacagtcccactgggatcgtcccatggagacaattgcaagtcttttgcatgagctaaaccccgctccacatggaaccgaaggtgctcattgtcagctaccacgcaatgccattatcacctttcagcccaagtgccacagaccaacactggctatactccaatgaggtgtggcattcgggttcttctgccttcaggtcacaacctttctgactcagctgggctacattaaacctgaagctctgtacaatgtggagagcggtgttgccttcattacaagtggtgcagcattggattttcaagtaagtctaagtgtttctattgtccttaaaatgacatatgtccagttatttaaaaaaattacaaaatacaaatgcccgtgttaatttagctagtctcagacattacattcgacaacatagaaaagccaaa

SEQ ID NO: 159944 - DNA, 1000 bp, Homo Sapiens
tcaggggactgagttcaacaggtccttcaggaagctctctggatcggtgatttctgataaaagaccggccacatcgaggaactctgagaaggtctccactggcatgaactcctcctggaaggttttcagggctttgtcggcagcttcgtagatgggcatgtcgttgtggcggatgtactcagcgagagagcaggaccagcctccctctgtgttactggtaggcaccttcttaaacatgttgtaaatgagatcgacgagggcccaaaagagaagggaagaacggtaagcggaatagtccttcactgccttatctgtcagcctggtggctccacctggagccactgcccgagcctgcgaggtcaccaacagcctccgcaagatttccacacgtgtggctctccactgctcagggggcaggatgtgaagggccaagactgtgaaatagtagggcccgtccacttcaaaggcactctccacccacttctccttgggctgttccagaaagccttggaggttcttctcttctcgggaagttgctcgggttgtgttcaggacgtaaagcacagtgtgaatgatgtacgggatcaggtggatgttgctctcccggccgcccccgccagtgtctgcgctgaacgactgctccatggcgaagcgcaggaagagcagtttgatgtcatggatgttgagctgatacgtgggctcccgctggcctgtacattcctggaggtaagtgttgtgtcttgccaagcaagtggcaaaagctgattcagggacatgaggtccccagaccggaaggagcccgttgcacttggtgttggcattctgcagggcggcactctcccactcttcccggcctcgagccaacctgacggcagccagatggcagtcgtagtgcacaatgttgaagtgggacacggtgctgtagccctgctgtttccggggcttattctccatctcctccaaggctacccgcttcgtgaaggtataaatgcccaggacc

SEQ ID NO: 159945 - DNA, 1000 bp, Homo Sapiens
ttttttttttttttttttttttttttttttttttcaatataaatgtgtaattttaatatttaatttaaaataaaaccaaggctggattggattgggaaagaacgtttgatttgcagaagaatataggaatttttttaatcacgacattacaagtcatttgtgaaaacagccttcctcctgccaccggctccctatacaacctgcttaggaaatatggaggtgaatcatcccccttacctcttccctaccagggcttggttctccccaaaatccaaaggagaaataaatgtcttccgttgcctcttcccatttttacagtcagcttctaaccccttgcaaagccctgaatcagagccaagcacctcagaaaatgaaggtcccttggttctcttattgaagttgggcacatgtggtcagagaagccccaaggaaggccacagggactgacacctttacttttggaatttgtgcagccagttgtcagggctcccaggtgcaaccaccttataaccatatccacagtcacagaggagggagaggaggaaggatgaaaaccctgagcaggaccaagacccccgccactttatcatgaccctaccaaagtccctctcccaggggtcattggcagagaaaccccaacagctctctcaatcaatcactggggcagcagggaaggctgagggccctggctggggaaaagctggtctttggagaggtatgaatgtgcagatataaaaagcaagaagagcatccttatctccttgccttggctaaggcactgacaggaaaaatgcaaggtaggaatggcaaagaggggaaaggaagaagacaaaaatataggaactggaggggtatggggactaccacatgggccccatacttgtgcaaagaaatgggtagagccatgcctgcatgtctgttacccataacattcccctcaccctgctccagagtggaaggaaaatgagttgcaggaatccagggagcacaataacatagg

SEQ ID NO: 159946 - DNA, 1000 bp, Homo Sapiens
tttttttttttttttttcaattttacattgacttttatttaataaaaccacctatttacaattcaaaaagtcctactttgatacactttactaaataaaattaaaggttaactgtacaagcaattaaaacatgatatgtagcaagtgttatcaggagttttcagcaaactatttaaaatagtcaaaaactgagcagttaaaaagtaccttctgaagtgaatgccgtttctaaatgggatcccaatgcctggcgggagaggcagcctcactctactgtgcaggctggacaaaggtcccggccctgaagtcttagactgtgagagtcaacggcatgtgaagtggagtgtgcagacctctggaggagcagcacgtcaatgtctcatttccagtttacttaaaccacacacagaggcagcctctacacttgccaacagcctctgtgccgaggtgttaagggaccctggccggggactcagaacttagaactttctggcctctgaagaggacccaggaaactggcgagacctcatgtgacccctgaacaggtcatacaagccacttctgaactaagattgggaaggtgttccacactggcatgggatcctgttcagaagcggaatacatcgtagtgctatctggagagactgatgtgaaactgcttcaccaggaacacgcagggctgggcgctgaagacacagaagatccccaggggcaatctgaacacactgcacgaggccctttgccgcgccaccttctgtacgacttaaggaacatctttatgtacagtaagaaaatatatacatctttaaggaacggaacgcccgtatcatgaacaaaaataagtacatctgcgaggacaacagcgcacaggcctcaggcggcccctcccacaggcccagctcagaccagattacattcaacatcttgatgtcaggaaatggctacgtctggaggccaccgggacccccccgtgaagacaggacgcctcctccgagaggag

SEQ ID NO: 159947 - DNA, 1000 bp, Homo Sapiens
tttttttttttttttttttttttttttttttaatttacaaacaaagtgtgggtatatttggcaggtttgaggcaagcagaaaggagggtttgggtactctataaaaaaagatctgaaattcaaacatctgataaggccacaatgaagagatttccagcagtgggtgttgcaggatgctggcacccaaatcgccgcaggcttgcaaaggtgctatgcaaggtgaggaggcaggtgaggcaggcagtgcctctcacaggtccatgtctaggcctcctgaggatgtcttcagcggcactgagtcaaatccatcaggagtcctcttggaggtaaatgatttgatcttcccaaagagtgacttcttgctggtaaagatgaggtcgtcctctacatcctcgccttccatgatggcgcagctgtcagctgctggcaggtcacagtccttgagagtagcattcatcaccagcttggagtacttgtactctagtttttgattctttttccaaaagtagcaggtcaagacggtgagcaggatggcagtacaggtgcctgcagagatgcccactttcagccagaaatctatggttttgcagatggtgactctctgctcaggcagagaaatgccaccagagcatagcttgggttctcgccacacgtaagtagtcttctggatcccagccacacagctgctgacgatagcatggtagtcagccactgagcagagcgggcaagcagccgcgctctcccacaggaagtggaagttgcagccatcacaggtcccatccgagcacgttcctggcagcagcaaacttccagggacagttttctgtggactgcacctgacgcggatggtggttgatctcccagaactgcaggactgggtcacatcattggacctataaaagaagatcacgtccggtattcccaaggactccaggtggaaaagttcagctggggaggtgattccatccagagtcatatctgttgtcaccccaataagtcg

SEQ ID NO: 159948 - DNA, 1000 bp, Homo Sapiens
tttaatatcaacgaggcttgtgtggactgttattaccgagtaagtcacagggtctggtcctggttgagatagacatgaacatcatttctcagatatgctcaagagaagcccagcagagccccacaccttccccgctaataggaaacttgcacacattattaatgaaaagggaagtaggagtttccaatactaaatgttcagcagaaaaggagcagggccatcttcttgcactttctagacaatcaaccaacttccatttattttcacaactgtggctaaaccagaggttcatccaatggtgacaatggaaaacctagtaagcaaagagtaaatctggttatagtcaacacctggatccactctaagggaatggtgcttatgtgtgatagtgacagcttcttggtccaaaaggctgacagatgaagagcacgtttctggggtttcccctttcctatcttgtctggtcatgacaagcagttctcatgtatttctttaactgaagtgttaaattgcatggtttctctcaggagcacttgataggccaagagtttctcctccacactttctgttggacaccttatccttcccactgatccattttacttacccacttttgaatcttaagcaaacactctttggaactggcctgcagttctaactgataggggattgatgaaagaaaagagtaacagttgaactctcttttattcttgggctgaggcttagtatcgcacctgcttccgtctctctgggatggccttgcacatcgcctttcgttccatctgagggctcttccttcattcgtatttgaattgtgttcactttttgccaaagtttaggtccctgctggctacacagttcctttcagaagggactgcgggatctatctgcagccatttcaatccacaggtctctttcactaataagctgtgttcttggcaaatctttgagtaaaaaagtatttaaagtgttacctagtcccacatctcacctactttag

SEQ ID NO: 159949 - DNA, 1000 bp, Homo Sapiens
aattggccaaacttcctagttccttttcagtagtactttagcactgaggcttgagacttgtggaagtggtgtttcctattgtgtgatgttaacttgatgccaaatggtcactaagtctcaacgaactagaagtttgtaaagtactgcagcaacgaaaacagcaattaaaaatagaggacctgcacatgcagcaaaatctacagtggtgatgaagattagtcagcagctggtaaagtcattggctcagtgactcctggttcactgtggcaactaaacatttaaataattggctattctacttgtaaacagaaaatcacataagccaaaaggagataacaattatgtctatgtagtgtgacgagaatttcaatagatggcaatttgcaaatatggcatcaaacacctccggcatttgatttgtattggctatatgtctttgtttttgtacaaacaaagtaaaagtactgtttggggtcttgggcattatagagcttagctaggatgagatatcacagtataagcaacaaaacgtcaggacacgtaagcttcatctcctcactctgctgcgggacatacccaccatatgaactttcagggcccctctcacccttctggtcttccccattgaaggctcataggtttgttaatgcaatcctcacacaacttgtgatctccttaagtacccccatcttatcataatacaaagaaggcacaattgaatggacaaaaatcactcacaagcctatgacgcattcaggaaaaaagaaaaactaagttgttttctactctctgaaaaaatcaatgaagtcctttagtgttcatggatttctacacttgatcttagccaaaaggccgagaagcaatgtgttcatggatttctgctttctttttttagtccaaatgaggctgagaagtcagatcaatttaataacaaataaatacactggtgaggcaatgcaggtgtgtaccagtaataacttatttcaacatatgctgcctg

SEQ ID NO: 159950 - DNA, 1000 bp, Homo Sapiens
aacagttaaacttttatatttacaatattctcttcatcttttgccaggtttaaaaatgtgtacagagccgcaaagggttggggtagggataagggattgtcgggattgttttggggagaggagctgggcattggagtccgtggctgaatcatggggtcccccagcccccctcccatgccccaattctgagggcatctgtctacagggttcagggcccaggtctctagcatttggagggcatggctgtttggagaggagctagaccaggcaggggaaaggatcagaaaataactaattttccatggatggaggtaggaagagaagggacagtcaagaggcaaagttctggggactcaagaccagggattctggatttgggtgtcagtggaagacagcaccccagcccctattcaagtttggcactaacaccccacaaaatgccagcagatgaggactctcccctcgtccactgtgtcccttaagcccttccagacatcattcttttcccaaatgcccaagcccaaggccctccggggagtcacctcacacatttcaaattattcctgctggtgtctgcccaagccctgtccccactgccccctccatctgttccccagcaccgctgacctcattctcccaacctgtccggtgagacctttctccccactgcctccctccaccattcaaggctcctttctttcagacaaggagggggcgtgggtcagaggagggtggtcagctgaggagaaggctggtctgacactgagatggggacagcttcaaagagggggacggagatgaaggggaacggagaactgaggcagggtgggggagacatggtgaggagaaggggcacaggcgggagccccctcacctgccacatccctcgccctgtatcctgcttgcccttagtttcccctgccctgcctgggactgggaaattcttggcacattttgggagtctttccgctcaaatccacctacccagtttggcacggat

SEQ ID NO: 159951 - DNA, 1000 bp, Homo Sapiens
tttttttttttttttttttatacaaaacagaaaaaaacaaaacactttattttccacaaggaagagcaataggaaaaattaaatcatttcccacatattgttttcttaaaacagagcctacaaggacatattcagcaccaaataaaaaaggaaaaaaagagaaattacaaacagccatagaatataatctataaagcaaacatttaatattgcactttgttttgctaacattttggattttacttttcctaattgaaaaatcaggaatctatcttgaatactggaatacaactgtgaacctcacatcttatgtcaggaattgaccaatatttttaaaaaagtaatgcctctaaagaaatacattttaaaggggaaaataaaactttatttgataaagttttatacatttaaagttttatcacattttgtgatccagtgccaattatcagaatattggtcattcttgcttcatgtgttatttgtaagagtatataatgacaagtattccaatgctatgcatatcaacaattgttccctagtcagttagacgtaagagagaaaagggattttctgacaatccccctcaaacaaaaataaaaccaccaaatgccctttatgccaaatattccattagctttttttgagggggacattcacaaaatgattcaacaataaaaaaatatttcacccccatttccttattatctagtattagtttgctacgggagcccaaactctttaaccgaatcacttaaaacgcgattcatttttacactgggctttcttcaccctgtcagcatttgtcaaacatgaattgtcttccatgttttcttaaaggccacttatggaaaagcctatttgttttgtatgagctttaagacagtatttaaccaggtcaagcaccaagccagagctactattattttcagccactttattaactgtggggttaaatggcaggatagatgtaacacccattttacacgtatgttgcaacatc

SEQ ID NO: 159952 - DNA, 1000 bp, Homo Sapiens
tatatttaatgaatcatttttattgcaaagggtaaattacatgaaattgacaaaatttagtccatgtaatatctatcaaaatacatacatgtaagtgtgtgtatatttatatatgtatacagtacagttttcacaaaaagcttcaacattcctaagaaacacagacatagtcattctggtacaatatggatttaaaataagttcatggtaatccttcctgatgccaattttaaaatgaagaccgtctaaatttttctgaccagttattagttgccctgcctctcggaaatgtgtttaaacttttctttcaattatttgataccttttgcccaagagattactatctctctcttttttttttttcttttaagacagagtgttgctctgtcactcaggttggagtgcagtggcacaattcctgatcactgcaacctctgcctcccaggctcaaacgatcctcccacctcagcctccccagtagctgggaccacaggcacataccaccaagcttggctgttttcttttctttttgtatttttagtagagttgggctcttgccatattacccaggctggtcttgaattcctgagctcaaatgatccacctgcctcggcctcccaaagttctgggattacaggtatgagccagcatgtccggcctgagattactctctcttataagaagtttcataagtttttccactgaggaaagtgatgcttgtttgatttcctctaaatttacttcttcacattcgaaaggagactcttttcttccttagaacttgaagattcagtgtgaaagggcatttttctttcttatattattaaaaaagttactttttaaaaagtaacatttttatttttattttatttattcatttttgtgagacggagtcttgctctgttgccaggctggtgcagtggtgcaatctcagctcactgcaacctctacctcctgggttcaaacgattctcctgcctcagcctcctagtagctgggag

SEQ ID NO: 159953 - DNA, 1000 bp, Homo Sapiens
gagatggagtttcactcttgtttcaccgctggagtgcgatggctcaacctcggctcattgcaacctccacctcctgggttcaagcaattctcctgcctcagcctcctgagtagctggaattacaggtatgcgccaccacgcctggctaatttttgtacttttagtagagacagggtttcaccatgttggtcaggctggtcttgaacacctgatctcaggtggtccacccacctcggcctcccaaagtgctgggatcacaggcgtgagccaccatgcctggcctatttatcttttcatactgctgtcaggtccttcaaggctatgcttctgattgcccacacactttacttctgagtatttcatattttacgggtaggtagggtaccaacttagtatgttagataaccattgtatagtaaaaaccagaaatgaaaatataataacccttataactccttacatataagaaagacagaaatacatcaaagaaaaaacattttaaataatctcaggaaacaataacaagatcctctccccgaaaataaatataacaaacatattagtaaccatagctaaacaaacactgtaatataagaactccattagacataagaaatagacattgaagccaggttttgacacttattctccacatccagccagttgtcaccagtctagtaagtgctacagggttaactgcctctggactgactgaaatatggttgtacttacacaaaagaacactggttcagatccagcaatgacttatgaacttgcccataggtagaaaaaaatagcttactggatttatatctgcttcataagagacttttatctgccagcctgacccctcttaaaacttttttttttcttttttggtttgatatactcaataggcactggcttttttttgtgatgtggctttttttgtgatgtggctttccacactattgtagaagtccagaatcccatttaataagatgcatgagctattagtcaa

SEQ ID NO: 159954 - DNA, 1000 bp, Homo Sapiens
gcttataaaaaccattttaaattaaaaaagggaggaagcatcagtgcacacagatggggacacaggggcagagggcccagccccaagtacagtgtggtcaccccacagcccagtgggcaccagggcagactcccctcgcagcacagacagctgaggcccgggtgctggttcctctaggtacagctttggtccttgtgggctcagaggtctgcctttcggaaacttgctctgttcaaggagttcctgaggccgggtggggtgggtgccatcagctggggcaggcgctgggtaagcaggggctgcagagcctcccgcaggcggcagtagttgcgctccagctcacggtggtactccttctggtccggcccaatcagggccttatttttccgcagcgcatcctcacatttcttgcagaagtccttgaagcagagccgcaatttgttgtgatgccggaagagcttggggtcttccgggatctctgctaaaaacacctgggccacctccaggggaccctggttcacggtgggccctacagagccctgaagcaccatctgtagcatcttagcatctggtgggtcctgctcggtggcaaaggccagctcccgtgtcttcttctgcatgtcctcgatggccacctccactggcgtcagcaccgtctcctcccggtggcacacacggatgcgagtcttgatgtaggggaaggcgtggtcggtgctgagcagcgtcttacgcttgtgttgctcgggcagctccccgtgtgcgcgcccatccggcgtgaacggcgtgcagaacaggaatgtgcgaagcccatagttgcggtcaaagtaggtcacccggtccttgagctcgtaggtatcaaagtacggttccacatacgtgatctggatgtaggccttttgtgagtcaagcttggacttgtccacagggttagagtctttgataatctcaacgacgtcgtcgccaaatctctccgtgtagaactcctccagccggtgtgaga

SEQ ID NO: 159955 - DNA, 1000 bp, Homo Sapiens
ttttttttttttttttttttaaccttagtgcatttttattttcacaagtaaaacagaaaaggaaaatagtgaatttaatgctattcagcacctttagtaaagtcaaaagactcaacatctccatatatcaaaaacatttgcatctgtatcaccaaacatgtaaagttaattattttgttccatctttaacatgaattattttatgtacattactttttagttcaataaattttaacaatatttaaaaattatctaaattcataaaagtatttcataaatttcaacatttaattattatgtacatataaggaagtccatgaaaaaagttaaaagaaaatgtagtcataaagttcaagcaacattaccaatttagcaaaaattccaaccaaatcaaggcagagggcattcaaacattcaaaaatctttatctgctgccaacatgtacaggaacatttccagtaataaaagtcagtatgagaaataatgttgaaatcaccagtagaaaatatattttaataggcatgaaatatgtttaagcaacagtaatgactttatagaaaacttgtattacactgttttatatgaactacctggtttgattgtatgataaagttgtattttagaactacagaagttgatttcaaaaaatatattgtagcagccataattttatttccagttaaaacacagtaaaatgtgaaaagaaaaatttataattaactaaataatacccccagtattagaaaattttaaatcccatgctattctagcaataatggtctctaatataatgtagtctgatgtaagaattgtggaaagccaataataaacaatcagacacaggtatgggcttaaagtttcactgaaatacttaggtagcaaaatatatgaaaaagtaatagaaaagtaaaaagataaaattaaaaaaatattgcacagccacattacctagaaagtaaagttgatgtttaaaaagcactaaacatggatgatataaatt

SEQ ID NO: 159956 - DNA, 1000 bp, Homo Sapiens
gtattataaactgacttttaataataataaaaaatctatcaagaatttaacgagaagaatctgtacattttaaagtaaaccagtgcacaatgcgctggccctgggccctcccccatttcccgcagcagggctaaagcgggtcctcctttgtctctgatgcaagatacagtgacaaggccactgcctgccctcgtgtatgctgcggcaagagagggaagcgcaccctggagggcgggaggctcggatgccagatgccgggagggcttcaagctcccaggcctgggggcagcagggagcccccacctgaactcaccacctgccaggggtgacaggcgtccccccgcttcctccccagctgtgacctttccctgaaggcataccgaagctggggggacaaactgccgagggggcttgtgtgggtccctcctccccagcaggcagggtggcttcctgtgctctggctggtgatgtcccaatcgccctgctctgagaagttaccatcaagaaaataaatcacagaagccaccgcccggtgtttcccagtgaccctctaacccgtgtgacacggcacctcaggtggggctccatcccctccagctccaaccctggctggccacctctcaggcccttgtagccagtcactcaaagagagcgagttctaacaccggccaaccgctggagaatggagggtgggggaaggaatcacagtcgatacctcaaaacgacaccttacaaccctaatattaacaaacaggaaacaatgacattttttaatttttcaataatttagtttttcttttgtgctcttttttttttagtagaagcgggaacagttgtcaatactaccttctgttggtcccctgttagacaacatacctttctttgaaatgtaaaatgtcaaatatataatcacacaactttagaaaaaacaaactttgacaacaccaacaacaaaaaatcccaaaataaaccagagatttcatgccatataaataaagtc

SEQ ID NO: 159957 - DNA, 1000 bp, Homo Sapiens
cacacctgtaaacaatgtgccaaatgttttatttctctcatatgcaagtaattacctctcaaagcatttttaaaaaacgcattattacactttaccaatgaattatttctgtccctggagattaaatcaaatcaaaatgttacaaatagtatcagtatgatataatttcttaaatatatgggacattgtcaacagctgtgattcatatgaaaaatataatcagatatctcaaattcctaattctgttttaaaaacacaaaacactagaacagttgctatgaaattactgataatgatccctttaataaactgcaattaaccactaatatagaaattcaatttaagcaagaagttttatatattatactttacagaaaaaaataattttgaaaaagtaatgacaaacagagatcaaacatttagggcattagttactgcattctctttttagaatatacattaagtaacactagtaaaatttaaagttttatgaccaggccttaaaaaacatgaatgatgatgacagaaccactatcacacataaacaaaaatagagcaaaccaagcgtgtccacatctccatgaattcagtgatttgaaataaatgttgttatgttaaacattatgagcaaatctaaaggttcaaccaaaaaacttacatatttttgagtattttttaaagttttaatagtttatctctgatcaaggatggagaaaggacaaaaaaaaatactgtcctgaattgattctcacagggcctgctccctcacagaacacagtgtcattatatatgccttatttatatataaaacaaccaaagaattttcattcttcttagtaagtatttaaaatacattctaggcgtgcattaggagtaaatgttaatttgtgatgcccttaaaagactttcaacctgtaagaaacaatttctgggaatataaaaatattgaattttacatatttcagagtcttgagaaacttaaagtgcagtattttcatgt

SEQ ID NO: 159958 - DNA, 1000 bp, Homo Sapiens
tttttttttcaccaaaacaatttttatttccagtgtttaattgggtatgcacacaggcatgacacaggtttggattcattaagtcctcatgcagaattatattcttctcgataaagaagccagttccatccaggatccactatctacacacctatgttacaacattatatcaaatctggtatctgaagaaaagatacacatttaatatgttcatttaagttacgtattttacagaaagattaaaaattcaagtcacacaaaactcaaaaactgtattaaaagtttgaatataaaactcagatccacctggaatgactaaagaatggaagttctgtatccacctgtgttaaaactggtaaatgtaatgatatctgttaccaataaaacgcattcgtttattcaatgtaagtaagttatctaattttaacaatatggcaccctaaaaaccaactgtatttttatgatgaggcacttttgttagtgatgaaaccaaaagaacaaatttgctgcacactgatgccagcgattttcttcagtgattttgggtatatgctatgtagtaagttgcaacaaataccttgctcatttgtatacaactatccgatatatttttaaatatatatatatatatatatgttcttctggctgtagtaatgcactgtaaagctatttcacagtgcaaaatgatgaaaccagcccaaatgaaggctgcataataacaattctgatacaagaaaatattgacagagttactggaacgtgtaacagtagtttttttacttgctagagtggacatacccccagtttaaagacagggatgaaactctgctttactgcctggggtttcagacagtttatgaggttgggcattcgctgcagaactagcatttttgctcacgttctggaagctttctccgtttatttggtcaggtgactgtggtggtatggaaagaaggggcctgtttgttgaagccaaggtgctggaagaactgcctgtgtt

SEQ ID NO: 159959 - DNA, 1000 bp, Homo Sapiens
tttttttttttttttttttttttttttccctgttggaaattttttatttaccactgcaaggtttttgctccaaagtgtcacaccagacatatgactacaatgtctcatgcatctttttgtgctttagttcatgactgcaaaacacacacttagcatttgacaacaggaaacacagagggcagaaacaaatcacaaggactagttggtttaggttacagccacattttacccaggactcctttacatccaagagaaatggaccctgaataactggtctcctagctgattctctgtgcccagttttgtttggagtgatttgtcattcaacccacacaaaaagttgtatctcaaatcaaaatggacagacatatgcaaggtcttaatcaataagtgctcaacaaatagatattgatttgatgcaagaggtggagtcacagattaatgagggcagactcccgattttctatccccgtagaaatctctgaagaaagaaccagatcacctttttgagcaacagtgcattctgaaatggtctctcaccttatttttacctctacctcacaccctttttagaaatgctcactggcatcacacaaggtgttcctttcgaaaatgatgagatacttcacacaggctcagttactataatttgatagtaaattggaaatgtttctggtacaaggtaagctgatgcaaagactactgaaatatttttatttggcagtttgacatctctggataatttaaaattcactaagatggagttttagtggaaaagcagagcaattatattctcttcatctgttgattacatttacatggagagcaatgagttgtcattaggcaaatagtaatactcattgtcatgaatttctagcttgactgctaagacatctgatgcctttaccattgagaactcagctaggactttaatttttatgccatttgcagtgtctttttctgcctactctgccagccactcttaattcattaattcact

SEQ ID NO: 159960 - DNA, 1000 bp, Homo Sapiens
taacaagcaaggaatgttttattgtgtacattttctcaaaaaaaaaaacccacaaaaacagaacccacaaataggagcaaagaacagttttctagcatctctgggatacacagggcaccatatcttatagaaacatagctagtacaagaacaaagtgtactaattaacattaccccttgcttccccagtcaaaaaaggctatagagaaaaacactttaaattgtactctaatacaaatttgttgcacaattaaacttcaacttactcaaagagttattgtattgtaaactgcagaaaatagaataggcattcaataaatctgctcacaattaacaattaagcaatagacacttgaataaatatagcatgtattacttatttgttaagccttacacttacgatgagcagatggtttatcactatatagtaacagattttttttacactttaggagataccatatccaataacggaagtagaagtactttaacgaaaactgattttagaaaaatatctccttgggtctgagctactatggtatttattacatatttgggtcagtttcaccagtttaaaaatataggtactaacaaactgaattctttcatgggagaacaaagtaatacattctagagcaatagtatttctttatatcctttaggtagcaggacagagctaggacatagtaaagagatttacgatgtaatgaataatttgtttctacctaatgctataggggtattgctatcatttgaactaagaaagaacaattttaaaacttgtttataatgaagaatcggcatttccttaccacatatatactagatgtaaatataaggatcttctctaatagtctgtattccttaatccctatctgtacaaattagcctgcatattcaggaatggaacaaccagtaaactgttacttgaagaactaatttaaatgatccatttaagagaaatgcagtcaaaataaggcaataaccatcagcctatctgt

SEQ ID NO: 159961 - DNA, 1000 bp, Homo Sapiens
tttttttttttttttttcctgtgtttttgtgtttattttaaaaagttcacacaccttccccatctttgtcccagcactggttttggtgactccacccctactcccctatgagtcagcccagaatgtgaagccagtggccccagggcaggagatggccacccctcagccccaccgcagggtgaagctgggcccgaagctcctcctgtcctagggccacgctggctgcagtgaggcggcggggacggaatgtgagtgggtggagagctcctggcaggaaggccaggtagcacctctgccctcatggcactgataaggagccaggaagcagggcaggtggggcataggccgtggcagggtacctacatgtcaatcacacgtgatgggtgggcctgggtagctgcatgccagactgggcaccagactgtggcacacagctcaagggtaaccttgcatccaggcccttctgtgagagtaggatgggagggagttgcacccatctcctgtccgcccccccccaaaaatatatatgtatgtcgatatataatatagaggtatatacacctgtacataaaattgttgccaccaaccactaaatggttacactacaccaagacactaaaatggcagggagccctgggatcctggggttggcagacacagggaatagggggtagaggcccaggctaatttctcccttcacagcaaagcagggagagaaaggaaggagattcaccccttaacctgtctcagccctgggtcagaagagaagcctcccgcctggccaggcttcacctaccttagccaaattgtagccagacagacagtgccccctgacctcaaaaaaggaggtcaagctgaaatggccctgaccctgaccgtgtgtccaaaaccccagcgtgagagccagggctgcttcttgacagctgctctcctctgccctgcgtggcactgaaccaggagtaagggcttctctgttctagcctcccagggaagggaaaaa

SEQ ID NO: 159962 - DNA, 1000 bp, Homo Sapiens
tttttttttttttttttttttttttttttttttttttttttttttttttttttttttttttttttttttttttttttttttttttttttttggagattcgaccacaaacagttttaatggtctggttttctccctagttccccaactgtttgttagtattattattactacaagaataaaggattcctgagagcctgtcccctcctctcctgtggcccccttgacaggactcatccctaccaaccccccacccccccgccccggatttctggggaaaaaaagaagtgaaaggcactgcaggggtagggggcttgagtgccagtgagttggggttgggcgggggcgggggcgggggtgggcactagggcagggcccggcctagaggaggaaagttccagtccatgcctgaaggaattgtggagaggtgtgtccatccatgacacccccatcagtccttccctgaacctgtctagcaggcatacctaagtcccatcctcccacccccaggcccacactgggggttctgcagcaggagcataaaattaattagtgttgggctcagaaaggaggaatggagggtccactacactaggactccagggccaaacccaaagggaggttgcaaataactagaataatcctcaaatgctcttcttcttcaggttggagagacaggaattaacaaaatattaatgttaatgaaaactccccagccgagggatcaggcagcagtagggaaaaccaggctccaagaggaaggggctggtcagtcccaggccttggagactagttgtccccaacagccccctgccgagccctgatgaacgccatgccatgcgtgcggaagtgggtcttgaggtttagagggctgtcgcagctcttgccacagaccttacaggtcagtgggcctccagaagcaggcaggggtgagtctccaccatcggggtcagaccttgatggaggggcctcttcctccccatcccccagccccagggcactg

SEQ ID NO: 159963 - DNA, 1000 bp, Homo Sapiens
ttttttttttttttttgccattaattcacaactattgctaaaaaatgtgcaccaaaagcacactgttgtatccaacagatagaaaggacttttaaaaaaaaagaagctggttgctctctgaggaagggagaaagaccatttcaacttattagaaatgtggccacgtctttgctcacttcttcaaagtgcaggtggcaatggcctgtccagtttccaaaagaagctgactagcagtgagggaaccctgtctctgcagttgtgcgatcagagtatcttaaatagtaaggtatggccttaggcctatcagctgcccccagccgaacctgtgaagatgtagaaaagaaaaaacgttccctgcctccctccctagtccctgctatggtggaggcaggccacacacaagctagggaggcaactggactggaatcaactgccctctgaaggcacttgtgcttctggcttcatacaggaggcttgtcttacagttttatgggggtggaccactgatttactctgaatacaaatgaccttggggagaatccaaagtattttctgccaaaagttgaagtgtttatccccaataagttacactctatacaagatccaaatgattctatgaaagtgttagattgttagaacagtgaaaagaagatctggatacaggtacaacaaaaacctgcatataaaactttggaaaaacaaatatgtatacttccacgatatgaatatcaaattaactcactatgatctccctttattctgacaccataaattttaggtaacatttgaatgaaactgaaatttcatcatggtcttaaattttgatggtgtcatgctgctcatccagagcaagaacctgtggtctcagctcgctttgtgtaaataaaactggacacagtggaggaaggagtgaaactgctgcacctccctggggttgccacaaagccaggacatcatgggaggtgcagcatcgctaggcatgggctgcacaaactccggc

SEQ ID NO: 159964 - DNA, 1000 bp, Homo Sapiens
tttttttttttttttttttttttttttttaaactttaattaagtctttatttaagatacttcaagagctggagttaacatttttctttcagattcgtatttccttaacatgaaaagtcaacaatgaaaacagaataagttacttttattacaagaacaaaacagacttgctaattttatgtctcctttcacccatatcacaaatgcaaagtatatattatcataagatggaaattaccaaactccaagatactctgcataaatgaaataaactcaacttgcaaaattagcaagtagaacattcaagtatctacagtcattataaatagtgtaaagtacatgccatatctacagtgtgggaagagtataaacatgggaaaatgagttcttaaggaacaattagaatgtttgtttggacaatttaaaatattaacaagggtactcaaatacagaatcaaccaaaacatttattttttctcttttttcaagaaaaactgtcgagcttcttcccaggcctgctgaggaaatctgttagccagctcaagatagtcttgggaaccaaggcatttccctttgggttggtaaggctggttttccgcttgacctggagtctgtgccaaatcctgaatgaaagtggccagtaaaacacagctcatctcttgctccagaatgatcttgttctgatggttgttgtaacaagcagcgataagtgaagggaacagtactttgatcagccgtgggtcactgaaatactggaagggcaactggcagagcttctgcagcactgtggggtggcggccggactgcacgatcacctggttatctgggtggttgacagtgaagtagcccacacagacgatgacctcatgaaggaggctttcacaggagacttggctgcagtggcccagcagggagctggccatgtgccggaatgcaagggacaagccctctgcccctacaatagactgaaaagcaggcagatgaagagctgcaaagctgtt

SEQ ID NO: 159965 - DNA, 1000 bp, Homo Sapiens
tttttttttttttttattctttcataatttaaatacttaagtaatctccactttattattttataacaatgacttcaaatttacattattttaagtaccattgtaatagcttagtgtataatacagatatttgcgaatatcccatccaaaaattaaaaaaaacttcttcactatatatatatttatataaaaattattctgaaagacaagaacatagacaagggacttggtacagaccatcaactcaattttctatcaccacagttgtaactccaaaatcaacaaatatacagcagtaattaaaagcagtgcaaatatctttggaggttaggataaaattataatgcaagaacataaaactgaggaaacaaaaaaggcaagtacttcaagtacaaggaaccagtcggcttgaggtccatcttagtgtttactgggggcttctttcctgcttctacttctttctctgaaatacattggccaacatggcacctgatgttgtcaactggcccattttgttcaaaaacttggtctttgtatcttcactcactaagcttgcagcaattgacattgagccttgaggctcttggacggtcttgttttcaactttttgttcacattcttttatcatggaacttaaaataacctcatgctctggagagagatgttccatgtcagtccgtaaacatctgagaccaggtaaaaagtgattaaccattaaatcctctgaaatgaaacaacaggaaagtgcactgtaggcttcaaaaagatgcgtagcaatgtccagtcttttagaatccacaatctgtaagttgttcaccaaggctaacttatgcaaatgtggtataacaaactcatctcggaacctgggttctgcgttagggccaactctaccaaatgtttttatgatctctgtatgcaaagaatgttggtcttgatactgaggatcttccaggaaagaagccaactgcattttcactctttccagcaactctctttgaat

SEQ ID NO: 159966 - DNA, 1000 bp, Homo Sapiens
ttttttttttttttttttttttttttttttttttttttttttttttttttttttttttttttttttttttttttttttttttttatagcaaaaagacaattttaatgctgccgtagaaaaaagggttatatgaagagtcacataatggtgcttcattgtcaacaaccaaacagggcacagagtgtgttacggtgtctgtgctgtttacatgccaatattttatacaaaggttctcatatggtgtcagctgtcagttacttctgcaaattaactgccaaaaatggagaagaacagaatcacttggagagccggtaaccacgggttacctttcataagcctaaagataaagctgcagtgtgggatcttgggagaataattaggaagaacaaaacagaaagttaccaattgaaatagaaaggcatcctacaatatggaatagcaaccaagagggcttataaataagtgaaagaggttggatcacagaatgcctcatgacttttaagcaaagtattacagtacaaacattttaaaggctttatcaatgtttaggaaatacagtacaagttctttttttttttttgttcttttttttaaccttttcaaatagacttaaccctttgagcactgagtttattttgagtgttctttgatttctaataaatacctttaaaaatcatgtgcaaaatagttctgatgcctgccagggatgtctttcccggtctcgtttattcagactgctcaaaacaaatgacaatatgatgctaataaatatgtataatttaaacatgaacctctatcaatatagatgtactgtatagcaaaacaaactatcatactttgctttcagataatgtttctgtatactttataaatgctatctgtggtatcttctgtataatttacaatgtttgcatgtaaaaaacaaaacccatagaccttaaaaaaaagaaaaaaagaaatatacactatacataggcacagcttatgcccagagcatagc

SEQ ID NO: 159967 - DNA, 1000 bp, Homo Sapiens
acagtaaggaaaatattgcttttaaaatcaggaaaacaccataattttaaaatgttaaagtaacaaatggataattttaaaaacttacagaaatgtccaacttttcacatataaatgatgtaatacagaaattactgtagctttccaaaactcaataatttcctgttgaatttacaaatgtgtatactgtattaatgcaaaataattatcataagcaacataaagcagtaaatatcccttggttgaatttgtttataaatgagtgtctgaaattgagcacaaacaatgcacatgctccctgactgaaaacagcccacagtctctttggccagcctcctccactctaagcagcagtgccggcccccagctggtcctgctccagagctcccttctcacccaggagcagcagtgggccttgctaacagctcctcccatcttcactccgtgctccagcaacttttcccttctctattcatccaactgcaaagttctcattccttttgcaattttcaaagggaagaactcctcctgtctggttataagaaatagaaggataaagttttcccttcactctgaatgaacactccagaacccttttcagttctttatgcacaacttttcccctctccaacagctttcaaccctgtgttcctcaaccctacctctcaggttatcttatcattagtgcaaaacgctatgttcatttcaatccgtttttgcccttacagaactcaatctattaagtatataaatatcagccaatataaataccattcaagtttttaacaatagtaatagaataaacaatcacaatttataggagacatcaggaaattgttcatattcttactaaagcatttctttaaagcaaatctcaaaagaaacttctggtttatcaattagcattttcacctaaatagcactgggttagacatatattttagccataatgctgaaaaagcattctaactaaaatgtatcagttgttcatccaaacatc

SEQ ID NO: 159968 - DNA, 1000 bp, Homo Sapiens
ttttttttttttttttctttttttttttttttttttttttttttttttttacttaaacaaaaggcctttatcattgcacaagccagttaacaggcagttcctggtaagtggtggaagctaaaaaatgcttcatcacaagcatcgcctgagatcaacaatgtcctcaaaaaaggcaatcctctggaagctgccagcagaactcagatcaggtcctggggccaacactggggtagttatatgcactatgtagccacaggaggaaatgagaaacccccctaagagcttagactactcgtgctttcctccaactaatggaagaactctgcctccctgagcatgttggggtggtgactgatgcacactctgtgggtctcccagcgggtagtgatgaaaaggcttcagccgcagaaactggcagtgacacgaatctggtaaggtccctgggcaggtttagagagtacaacatagctacacatgcttcccacatacctcaaatttatgggaaatccatggatgtttggatacatgagtcacatcagagaaggctcttctcaaaggctagcctccagtgccgtcataccaagttaaaacaaactaacaagcaaaaacacattcacagcatatataaggcctttcttctttgggaaatcttgtgttaaatgtcacaacacaagccggacatggtggctcacgcctgtaatcccagcactttggtaggctgaagcaggtggatcacctgaggtcaggagttcaacaccagcctgaccaacatggtgaaaccctgtttctattaaaaatacaaaaattagctgggcatggtggtgggtgcctgtaatctcaggtactcaggaggctgtggcaggagaatcacttgatcccaggaggcggaggttgcagcgagccgagatcgcacaactgcactccagcctgggtgacgagcaaaattccatctcaaaaaaaaaaaaaaagtgacaaaataatttcccacattcactgcaca

SEQ ID NO: 159969 - DNA, 1000 bp, Homo Sapiens
gaagaaactgatgagtggatcctaaaattcatttggaaatgcaagagatgcagaagagtcaaaacagccttgaagcagaacaaagtaaaacttctcacaacaaagcagcactgatcaaggcactgtggcactggcataaggttaaacaggtcaatggaatagagtcaagtgcccagaaataagcctgtacatttttggtcaactgattatcaataatggtgcgaagataattcaatggggaaaaataatgttttcaacaaatggtgctgggacaactggatatccacatgcaaaagaatgtgggctcttacaccacacacaaaacttaattcacaatggatcaaagatctacacataagagctgaaattataaaatgcttattagaaactaggtgtaaatctctgtgatcttggattaggtgatggcttctgaaatgtgacagcaaaagcataagcaacaaaagaaaaaaacagataaattgctgtacttcatcaaaattaacttttgtgcttcagaggacactatccagaaagtgaaacaacagtatggaagaaagtttttgcaaatcagctgagtgcggtggctcacacctgtaatcccagcactatgggaggccgaggtgggtggatcacgaggtcaagagatcaagaccatcccagccaacacagtgaaatcccgtctctactaaaaatacaaaaattagctgggcgtggtggtgcgcgcctgtagtcccagctactcaggacgctgacgcaggcgaatcgcttgaacccaggaggtggtagttgcagtgagccgagatcacgccattgcactccagcctggcgacagagcaagattccatttcaaaaataaataaataaataaataaagtttttgcaaaccacatgaggatctagtatccacagtatacatataaactcctggccaggagtggtggctcatgcctgtaatcccaacactttgggagaccgaagcaggaggatcgcttgaggctag

SEQ ID NO: 159970 - DNA, 1000 bp, Homo Sapiens
ttttttttttttttttttttttttttttttttttttttttttttttacatatcatataaatatatttgttcaaactacaaagggatggatatcagggggaagcttttattgctgtggggggacctggagagggaggggggccttggaaatggggatacctgggaccacttgttccccccattcctcacagaaggcacaaatacattatttctttccatgtgaggagatgcgaggagaggatacagaatacaggaatcctcaaaaatacaaaaaacccctccaaactgaatacctaaggttatggaaaaggctagggtggggcacagaagtcaatgggggaacagaaagaggaaccaatgaaactgagaaccaaaagggacctgagaggccatgatgtccatgctgctgcctctgtgcagaccccagagaaaactcaggtaaaccaacggaaactccaaataagagagggtagggtgccccaggaattggctttggggcatcagacaagggagtgtgagtgtgagtgtgtgtgtgcagtggctgtgtatcagaagcaaccagggctaggagtggacgattctattcccacaggggaaggcctcctccatcccggttcctccaaaaccactttcaggggataaattcagccactgcttccgaacaggacccctccctgggacaaaagagccaggtaggagaggatgaagtgagaaatcttgggatgaaaacagggcacacagaagcagttcttagggaacagaatatcatggagcccagtgtgatagaaaatgggcatgaaacctaagtgtatgcatgtgtgtgagtgtgtgtgtgcatgagtgtgtatttgtgcatgtacgagggagtaagatcactcaaaggtgaaggggtcctgggtgctgaaaaagaagtgtccatccatgtggtcctccagggcatccttgtcactctcagcaggaaagcgctccttacagataggacactccttccatgtgggggt

SEQ ID NO: 159971 - DNA, 1000 bp, Homo Sapiens
tttttttttttttttcatttgtcttgttggtttattggcctacagagttggacacacacacaaatgcggagataaatattggtcagtttctctaaatctgggtcctcactacgtatagagctagtctgtagaattctaaattttgcgtgctgcggcacagaaccagtggccttctcactctgccaccacccgtcttcccagggaacatggggaaagagggcacgaactgacaagacttgatcattttcaaaagacaaaactgcaaaatcccaaatttccaacatctgaaactcacaatattcaaattccccagctcaaatacatatattttaatctccacgtcgccacaatctcatttgttgcccagaaccaccacattctggaagctattttccttgatcatacttaagaaaaaaaatgtctacaatctcaattctcccaaaaaaaaatgtccatggttttggaattttgacctattctgaagttccaattctccggtccatcctcaacccttccattttcccatgcctgtttgcctcagaggagtatgggttaaggatataggggcactgtcgtcacctctgcccctgcctccaggccttcctcagtctctcttgtggttccgctgtatagatagatagatatataatttgtgtgtagatatatatatatatgtattctttattacgtatttttttgcagtttttctaaagtgccagaaacaagatttgtgggaatttttagtgattttttttgtgtgtttttccccatttgaaacctttcccccccttaaaaattggaacttggtacattcagtaggaaattcgtcactcaggctgtggccaagaccaagaaaagtgcaaagagacagaggaggaatgaaggagtgactcctctgtggttaacattcagggagcctgtctaaaacctccccttttgtatatgctgggagggtatgaggggtaggaggatggtcctggccctccctaaactcacctcc

SEQ ID NO: 159972 - DNA, 1000 bp, Homo Sapiens
ggaaaagagaaagtaaagatattcctaattcagagccaaaggtacacagcagctgttggcgggaggccacctagagatttatcaaggacgcgccaccccaccaggagcccctcttgatcaccaagtgctttatcttccaagtagtaagtcaatcaagaggtttctaaagataatccatttttgataaattagaatggaaacagtgtctctataatatacatacaaaagtgtccagttttcaactgtgagcaacacaggtgcacagaccaggtgtcagcgcaggaacccgacggcaggcatggtgatgccccccatttcccgccactcccgacagctccccgggcatggccccgattcccgccactcccgacagctccccgggcatggccccgattcccgccactcccgacagctccccgggcatagcccgtgattgcctggcctcagccctcggccccctgcgtgggcggctcctccccggcctctggtttcttgtgcctgcgcatgtgcctgtacttgtccacgtacgccttcaccaggttggccaccttcacggggttgatctctccactcttgctgtggcagatcttctgcacggccttgcgcaggatgtccttgtactcctccttggtcacctccctcttctggtagaagggcttgatggccagcttcacctcctccacagcacgctcctgcatgtgcagcttcttcatgtactcctccttcttggttttctccgcagctagcctgggggccggggtcttctcctccgagttgctggctgcagtggcttgactggctggctctgaggctggggtcagggcagcgggcactggggccagggtctgtgctgccccacagcccactagcggcaggctcccctgaaggatgaactggaccgtgggctggctgaccagtgcgcagggtgggatgcttgagggctgggccggggcaggcggcaggccggggctgtaaacctgagaggggtctgtgtctggga

SEQ ID NO: 159973 - DNA, 1000 bp, Homo Sapiens
tttttttttttttttttttaaggtccttatgttattttatttttttttgagacagggtctcactctgtcacccaggttggagtgcagtggtgcaatcatagctcactgcagcctcaaactcccaggctcaagcaatcctcatacctcagcctcccaggtagctgggattacaggtgtgcacacctaattttttcagtcaggtctcaaagagaaggagataatgatcagttgtgaagattttcaggtaaatcaccaccaaggtagggctgaaagcagaaagaactctgcagcagggaactgtccagggaggcgggtatgagtgggagtgaggatgaataaagggttgggagggggaaggtcagggttggtgatgaggcatccatggcggaaacgggaactgcagggtgaggtgaggctggcgcagggcagacaaagtgagtcttccggtgcaggccagcatgcctcctcttcttgctgtggttctagaccacaggtttctcgcctggaagaacctttcctttttggaagagaaaatgcagttttccccctgaaggggcatttttagcactccaacgtcagtgggctcctggaagggttactgtttatctcttaccccgcaagtggactcaggggtgaagttagttagctcctacctgtaccccgttagctgcagccccgctgtgtccagtgaagtcatttcaggcagggcatgggggactccttctgaggcagaggtgtaagcgtttcagtcccagatcggctacagggagtggcgctcagctccactgtggagtcgccaggatgctgtcattttgtccagaggaaaagtccaccgtctcacatgtgaaggcagagcctgttttctgtgtgcacagtctgaacacactacttcatgggtgcttctaaaggacatttccacaaagaacacaaacgattcccaaaagcctagctgatgtctatgtgccataaatagaagctctgcccccagagagaagagttc

SEQ ID NO: 159974 - DNA, 1000 bp, Homo Sapiens
gacagactcttgctctgttacccaggctggagtgcagtggcgcgatctcaactcaccacaaactccgcctcctggattcaagtgattctcctgccttagcctcccaagtagctgggattacaggcatgcaccaccatgcctggctaattttgtatctttaatagagatggggtttctcagtgttggtcaggctggtctcaaaatcccgacctcaggtgatccacctgccatggcctcccaaagtgctgggattacaggcatgagccaccgcacctggccacttggctgttctttacttgggttggttttattttgttgtttcctttttcttgacggaaatacttattcattccctcaacacattcatctgtgtgacaggcctggtgttgctgctgtgggtaagtgaagaagatgaagactgtatccacaaataagatttccttaccacattacagggcattaatttgtcactgaacagaactttgattatatctgacaaggttagatgtgcaggcatctcactgtcattcatttctacatagtctataattttggttttgattttaaacattttattattgaaatttcaaacacatacaaaagtagaaatattagaacaataagtctccatgaacaaaacactccacttaaattatcaacatgttgccaatttagtttccagctctctttgccaattatttcttttgctagaatattttaatccaaatgtgtctatcttcatttcatagtatgtatctcatatcatacgatcttttattttttataatcacactgacataatccctaaccaaattaatatatgtaaatatcatttaatatttagtccatgtccacacttccctcactgtctccaaaatggctttttatgttttgttcaaaccaggtccaagtaatgccaacatactgaatttagttgatatgtctctttaagtctcttttaatctgttaatggttgcccttccccttgtattttcatgct

SEQ ID NO: 159975 - DNA, 1000 bp, Homo Sapiens
actaaaagaaccaaatttacttcagtttaaggcaaattccacacagagactgtctcagagacgggcacagaaccagacaccgtagaaacaccaccaccatgcatgacggggaagcagaggcaggcggaagacgggggcctggcctgcaccaggcacggagaggtcagtgggctgaggagctccatgcggcaacagggattggcatgcatgatctgctccccgagtgggcaaaggctgggcagctgggtgggcccgggagggagatccccttcttccccacctttcccacagcaggggcaggagctcgggctcagatgccagagccccaggctgaaggactagggtatgtttggggtgatgggatgagacagggtgacccaaaagccaaggcggcctcaagtagggtcacatctgttaggagtaggatggggggaactgggcatgggatgaatgaccctcaggatgtcagacctaaaggaaaacctggggccatctggtcaaccctcttgtggtacagacatggaaactgaggcccaaaaggtagaagggccttgcttgggttcccacattaggcagtggggggaggcagggctcaaacccaggactcctgtctcctagcctcatgggatacagggcaaagagcaggagcagtgtgggaacgtggggctgagccactccttactcaggcctccagatgggcagaggcgtgggcaccgagggccctgggaagcctctggagggaggaagggattcctgaagccaggagtcaaccatggaagtacctgtgggcccacaccagggagaggcctccacaggccatctgtgtgtctagaacttgcatcgtactgagttcgagaggcaccagaaagggctctgtgctgagcagcctccacttcaggcccatcacatggcctacggtccatgattacagcaccccatggggtccccggggctcccagcgcatccagtgtccctgggagggtgcacatgttcaggcctt

SEQ ID NO: 159976 - DNA, 1000 bp, Homo Sapiens
ttttaattaaaaaatatggtgggagaaaataatagcttgcaatgtggcaatcatttataatagtttgcaacgcggacaaattttttttttaacctcttcctcctagcactttctagggccctgataagtcttcatttgtagggagacctctagtccttagaacctgaattctcattctggtttcacaaaagaacaaactattcatttgtgcaaactaggattgcgagtttctcagagccaggtaaggtactgtcaggtccactggccccagccctgcacacgccctaaaaaggtttgagtgtccagaggcagaaccgtgcaccaagagaagcccacagagagagctgcatcccccaggctcccaagcccgggccagtgacctttctctaagtgcactgcctggaagcaggtgcattcgtgatctgcactctccttagaacaagctcagggtggaaagcatgtgagtggacaaagtcctaacctttgcagcggcctgggcagaagcagcaatcaatggtcaccaaggcacagacactgacggacatttaattttttttttaactgaggcatcatggcagtttaatagtgaggtatttaattgcatttttataaaaaacattgcaaaacaaagtgacaatagggacctaaattctttggacttacggtagagatgcttgaggatcctaatattctacttctgccaacatgtcaggtaggaagctcacaatgttccccataagccattacaaactggctaaggaaaatcagtcatgactaagtccttgtctgcatcacgctcctgcccctccacacactgtctgagcgtgcacttttctttcgaaggctaatttatgaggcattctgcctgagtcagggctattgctaagtggaaggtttgatgaacctcccagtagaaaatgcaaggcctgcaaaaatgcgaacagctcgatttactatggcttataatcaaggcaaactatacaataagaggttgtatttt

SEQ ID NO: 159977 - DNA, 1000 bp, Homo Sapiens
tttttttttttttttttttgtttctctcactaattttaatgtctgtatacaaggtttagatatttagttttaatttgtttaagctggaaggaaaaaaacacacgcaaagaaatataggacaagttctcctggagaactatacccaaaagaggaacattagcactgatggtaactcaggataaaaagggagaatgagatccaagagtaaattagctgtgttgttacataaatagaatttagttagaaatagagctactactctatttcaaagatatgaaatagcaaatatcctgacaaaaaggttaacatactcttgttcttactgtgtaggacatgaaacaacaaccaattacatatcctttaaaactacttgaataagcaatacttacataaaacatagctcaatatatcagatgagaaaatggcttaatactggtaatcattcacaccgttatagagtacataaattctgggaaagacatcagtttcaaaaattaaaatgtaatgaatgacagtgacataaatttatctgaaaataatagtaaaattttcttataaaaatcaaataaccggacaggcgtggtggctcatgcctgtaatcccagcactttgggaggccgaggcagggggatcacaaggtcaggaaatcgagactgtcttggccaacgtggtgaaactccatatctactaaaatacaattagctgggcatggtggcgcatgcctgtaatcccagctacttggcaggctgaggcaggggaatcgcttgaacctgggaggtggaggttgcagtgatctgagatgacaccactgcactccggcctggtgacagagcaaggctctatctcaaaataaataaataaatccaataaccaggctgggtgcggtggctcatgcctgtaatcccagcactttgggaggctgaggcgggtggatcacctgaggtcgggagtttgagaccagactgaccaacacggagatatcccgtctctactaaaaata

SEQ ID NO: 159978 - DNA, 1000 bp, Homo Sapiens
tttttttttttttttgtatcagcagatttataatagccgaagaagcaacatagatggccgtcaatggacacatggataaacggggaatatttggccatggaaaaaaatgaaatataggttgagcattcctaatccccaaatccaaaatactacaaaatccaaactttttgagtataatgatgccacaagtgaaaaattcaacatacaaatacttaatacaaactttgtctcatgcacaaaattgttaaaaatattgtataaaattaccttcaggctatgtgtataagatgtatatgaaacaagtgaattttgtggttagactctgggtcccatctggaagacatctcattatgtaaatgcaaatattccaaaatttgaaaacatctgaaatccaaaacacttctggtctcaagcattttgggtaaggaatacttaacgtaaacggacacaagctacaatatggatggacttttgttgttattgctttttgagacagggtcttgctctgtcccccaggttgaagtgcagtggtgtgatcatggctcactgctgccttgaccttctgggcccaagggagcctcccacctcagcctcccaagtagctgggaccacaggtgtgcccggccatgcctggctaattttttttgtttattttttagtttttatagagacagggtcttactctgttacccaggcttgtcttgaactcctgggctcccaaagtgccgtgattacaggcgtgagcaaccgtgtccagcctgagcggtctttcaaaacattatgctcggccgggcgcggtggctcacacctgtaatctcggcacttcgggaggccaaggtgggtggatcacctgaggtcgggagttcgagaccagcctgaccaacatggagaaaccctgtctcttctaaaaatacaaaaggaaccgagtgtggcggcacattgttctttaaacaattaaaagactctttaaacaaaaagtagctgtaattccagcacttgg

SEQ ID NO: 159979 - DNA, 1000 bp, Homo Sapiens
tttttttttttttttttttaacacttgtacattttatttaattaaatcagccattgtacacattgcagctatgtattgttagtgttgtatttttttttccattaactaatacatgccctcatagatatattcaattagtgttatcaccatgggaacaagatgctgattcgtcaactgaaaattcacttcttctcacagtattcaagtttttgataacacagcaaaaatcaaaatcaaaaaaaggtgaataaccattatgttgttacacagacatcatctgcactgcaaataacacaacagaaatgcttttcttgagctccagtgaaggttttgacaagaaggccatagggtgtctcaaaaagtttcaccatcggcctctcttattttggctgccaaagaatgtctcatttcctatccaactgccaaaaagtgctagcatttgaggcttaggagatttggcttgtgggaaacctccctcccaggaaattttttctcttggcaacattactttaaatgatgaagtgccattgtttgtcgcatttgtttttgacattcggagcaatgagtcatttttgcacaacaggaaaagaccagataattggaaaatgttcaatccctggaggatagactctgtccttttttatttaaatttcatcttcattgaatatacttttctttaacaaatgactgattcaaaatgtatactgtttatatgaatatatttgtgaatatatatatgttaaaatgctacacagcttcaaccactagaggaataaggaagaggacatggaaattactcagattgttacagtcccttctttgagacaaacaaacagaagtgcacaaatgcacttaagagtttccaagggagtgtggatttcaaataaataaaccaaaaattttaaccaaaaccaaattttcaaggatttctcaatcttgtctgcaagctgaaaaacagacctagctggaaagtgaaaagtgctcactcagggtaaaaaga

SEQ ID NO: 159980 - DNA, 1000 bp, Homo Sapiens
ttttttttttttttttttttttttttttttttttttttgaggatatgcatttaattttaaattttataatttagattcagcatgaattgcaataaatggatcctcagcagagttactaatagaaaaatgagctttgccatcgtcagaaacgtagattttaatgcctgtgcaattgccattaattttatctccagaaatgacatcacagtatgtgccagcaggaagaccagtttgcaaagttaaagaaaatgtccagtcatcattgttgaaaacaatgaatcctctgtttcctctcccaaaagccacttggttgctcccattatcataccagtttgtaaaaggctggccatccactacattgcggaaattaaccatgttccttatttggcgccatcgatgttcacagacccagtcattgccacaagtagtgtctggattaatagtaacttctttaattactccattattatttggtggcccaacccaatcattaacatcgtttccattttgaaactgtcttggccaacggtagcttgacattactcgtgtaaaaccataaggatgagcaagcataaatccaactgccattttatacagcctagcatcccagaaggtaagaatagaggctcctccagccccatgtcctcgttgattgtcatggttatccacaaagacaagtgctctgtcagaaggcatgaaaccccaaccttctccccagttctttaggtaagacatcttctctccattccacttgcgaataactgtgccgagttttgcaccatacttgaattctgtcacccggccatttccaaagtagtcactgcttttaattggctcaccacccagatcaattacctcctggtaaatgaaaggtttacttcctgcagggaaccagttactgtttagattatgcagtttgtccaaaattgcctttatgtctccaggccacatgtgcttggaagcatcaagtctgaaccctgcaacaccaatgtcaatgaga

SEQ ID NO: 159981 - DNA, 1000 bp, Homo Sapiens
tttatttgaaatggctgtgactggtcttcttcagcacagattaagtcttaaaagtgaaaccgtgaagaggtttagggtttgggtattagtcaaagtagaaatgacataggattggtcatgaaaacggcggctttaatgtaaacactacattccatctttttaaatttttttgttttttttttccatcttgtggtatttaaaaatttttttttgttctttttgtctgcagcacaaacatccccacatgagagagcggacacagggcacagaacacaggcaggggtggggaggggcgcacacacgaagggaggtgtcagccgcgaccggaaatccaacacggcaaaggaaaaaaaacacaacccgtttcccaaagactaggaaactgatctgtgggtgggggctggtaatacatagtactcggcgggacaaaagtaaaaacacaaactgaaaaaaaaaaaaaggaaccaaaaaacccctacaaaggctatccttagaaagggggtcggtgggcagattgttttctatggggctggatttccttatacgatgggtgttctttttggcagctactggccagtgagagctgtgctttttctatacgaacctggagtgagcgtgtggcgggagtggcttagggccgccagtggcgtctgtggtgtctgggcggccggcagcagcagggtttgcagtggcctgtgccttctggaaagcccggcctgagcacactcctcggaccatgcaccgcaccggagccccaggcggcagatgggcctcccccagcaggagctccaggggctcgcgcgaggtgggacggggcaggcgtcggtgcagatgggtatgtttgttttgcaagaaaaagaaatatggttgaaatggtgagttttcctttttttaagctacaaagcacatgagaaatgttctgtttttcctttcaaattctaaatgtgaagactcaactaaaaccggattctacagcattctacagaaatacacagccgtc

SEQ ID NO: 159982 - DNA, 1000 bp, Homo Sapiens
ttttttttttttttttttttttttttattttttttttttttttttttttttttttttttaaagaggaaacatggctttatgtctgacaagaagttttgtcctccccaaggcatatggcatcaaggctgggcctaacccagtctcatgaccttgtgaatccagtccacaaacacagagacacgcgtgaagacagctggccagcgggaccttgcgcatactcggttggggattataattccttccaggacccagcagttgtgggtaaagcaggcaagtgggcccccgtagtcaccctcacaggcccccacaggggccaacagtccctcagtgcacatctcactctcccgcacacgtcctcggtgcttgatgttacactcctggttagagatgacattcagcaaggccacatttaggactgtgtcattacccgtacctttggtctcaccccagcctgcaatctcacacttggtccctggaggcaccacataccattcagggggcaggcagatcagggccacacgctggttcagggtcacagatctctccagcttgagcaggacaagctgggagcctgagggcccacacaccatcttggctactgggacccgctgtaggcttggctctccatgctgtgggttctggaacagggtgcccaaccatacctcatagcccgtgagaggcatatggcaggaggagaagcactgccgggcagtcagtatccactgctccttcactagagaccccccgcagaaatgctggccctgccgattccgcaagctgactgtccagggtgagttgcccggatggcccccaaccacgcgcagcttggaacgccgctgatccagccgatccaccctcttgccacacttctcaaactgcacctggtctggggggtccaggattgatggcggctggtcatcagcgcagcgtcgcagggcacagtagtcgaatggggtccttgggtccatcgtgtagcaccagggcccatggctatccccat

SEQ ID NO: 159983 - DNA, 1000 bp, Homo Sapiens
ttttttttttttttttttttttttttttttttttttcagatatcaaataatattttaatttctgaatactttcaattttccttggaatataacacacaaagactcgaccaaacagttcagttattataacttttacagtatacagaaatgttgcacttaaaagaaaaaccttcagtttttttaaaacacaaactgtaaactctaagatactgaatcaatcacgttacctataagtgccaacagtgttatttttgtcatgctgatttcaatggtattttttaaaaagggaaaatatcaacaattataatacaaagggtttgcaaatatacaaacagatataggattttcataacaattcaagaactaagcgggacccaattcaaattacaaaagttcactttttattcaaaacctcagcatgtgtcttggacacattccttggctgccaataaattccacagttcattctctttcttaaaatattttttaaaagctaggtttgtcatggtttcttttggggaggggcagggtaggggaagttaagtgttatatgtggttcctccagttctctaattagagtgctcgacttcacctaaaaattttggtcaccacttgtaagtgcgtttccatcatctttgagttgccttttaaagttttatgtcttcctatggtattttcatggactcagttttaattcttgcagaacatatattttaatgatacacagtttttaagaagccaagattatatcaaaacttattatagaaccacagaataaactggtttggaaccagaaaagtacaaaaaagaacagctagaggtacatagacacaggacaattaataatttggaaaaaaaaaagacttactttctccattctgctaattgtctcccaatctccttaaatgcacttttagcaatatttttcaaaaatttaccaaaaaaagaaaaagactaatttcctttttatacaaaaatgataagtagcaagttgttctga

SEQ ID NO: 159984 - DNA, 1000 bp, Homo Sapiens
tttttttttttttttttttttggcagggagaccttatttacactttattgacagacacaacacgtatgtatgtgcgtcgcagcacaggccctgtgggcaagaccggacgctcatgatcccagggataaaaaatctgtccgcgagcgggcagggggcccgggcagggggagtgcgcttcccagggcaccattcgcttaaagtgtgttaatgacttgtccagcaagtttctttaccttcccacacccctcttctcaacgtccccccagagtcctcaggggggccttcgacctgcaaaagcctcacaggagtgcgaggggccccagctcccagggcggccgatggagcctcacacggtcaccttctccatcacgctttcagccacgtggacttcgtctgcctggacggtgacagctgctgactggccgcatatgtgctggtgatccttccagtccttgcgttggcagaaggtggagcagtagttgaccttgtggcagccggtgcactcgctcatagcctcccggccgcagttaacgcaggactgctccttccgctctgcgtcagcgtggatcttggcctggtttgtggcagcttctcggtaggtgctggcatgcttggcttgctcaaacagcgtcttcagctgctgcgctgtgttgagcaaggagttgaccatctcttctaggtacagccagctccgcggctctgacagctccagcccattgaccaacgcgggaggtgccgctttggtgggagtcgggggtgggaccgccagcgcaggcagggatgtcaacactattttgggatgtgacgttggcaacgcagcttctggaaacggtgcgatctggcagctgtcctgatagccggggtagtgaggctcagggtggctggccctgcatgggggctgcacgctggcctcttggactgtggcccctgcgaagacgtcgccctgggccggactctctgatatgacagcagtggcctctaccgtggacgctcggtcaaa

SEQ ID NO: 159985 - DNA, 1000 bp, Homo Sapiens
ttttttttttttttttgggaatgcaacaactttattgaaaggaaagtgcaatgaaatttgttgaaaccttaaaaggggaaacttagacaccccccctcaagcgcaggaccaagtgcagagtggactctttctggatgttgtagtcagacagggtgcgtccatcttccagctgtttcccagcaaagatcaacctctgctgatcaggagggatgccttccttatcttggatctttgccttgacattctcgatggtgtcactgggctccacctcgagggtgatggtcttaccagtcagggtcttcacgaagatttgcatcccacctctgagacggagcaccaggtgcagggtggactctttctggatgttgtagtcagacagggtgcgtccatcttccagctgtttcccagcaaagatcaacctctgctggtcaggagggatgccttccttgtcttggatctttgccttgacattctcaatggtgtcactcggctccacttcgagagtgatggtcttaccagtcagggtcttcacgaagatctgcatcccacctctaagacggagcaccaggtgcagggtggactctttctggatgttgtagtcagacagggtgcgtccatcttccagctgtttcccagcaaagatcaacctctgctggtcaggagggatgccttccttgtcttggatctttgccttgacattctcaatggtgtcactcggctccacttcgagagtgatggtcttaccagtcagggtcttcacgaagatctgcatcccacctctaagacggagcaccaggtgcagggtggactctttctggatgttgtagtcagacagggtgcgtccatcttccagctgtttcccagcaaagatcaacctctgctggtcaggagggatgccttccttgtcttggatctttgccttgacattctcaatggtgtcactcggctccacctcgagagtgatggtcttaccagtcagggtcttcacgaagatctgcat

SEQ ID NO: 159986 - DNA, 1000 bp, Homo Sapiens
gcaactagtagaataactttatttctaacactgagccttctacataggaatttacagaaatgaataacactgtgctgcttattctccatttctcttcccagattctctctccacccttctctgtgcccacctgggctctccagcagatgtatctggttggtttctccaaagagagacaccagcaatttggcaccacagttctggtagtaatgatgtctcttacaaggtggcccctccttcatgacagcagttcttactgggctctggtaacactgtttccctccttgcccttcaaggctcagaatggcaatggcttcctgctgatacaagtctctgggtgtttcactgtcccttgtttctggcccacaccactgtaatcagtctgccattaaaatatttttagttggagaattctgttttccaccagaaagaaccatggctgatacaaacagccatccctatattaacttgtgaaaagaaataattcttccccctaattaccatatagaacattaacacttagaaaaatattcctctgtgtcagctggaatgccttcagctctaagtatcagacagccctaagaccaaataaaaaacagttattgagggttataaaaagtcccagtagagaacaggtatagagagcagagtagctcggcaacgtcacctctgagctggcttttcccaccttgtgcactgttatcttcaggctactgcccttcagagataaaaacgataagccaataccatgttacagacatgaaaaagcccagcagagtctcttctcatgtcatgacaatgttgtatcaaggagatctttcccagaagtactacacaatacttcccaaacatctcattgctcccaagttcaccccaacagaatcattaaaatggaacttccatgattagctttgactaatctggacttaccacctaagtcatctgggagaaggatgcacaaaaatataaaatttagctcagcaaggatgaagtagggaat

SEQ ID NO: 159987 - DNA, 1000 bp, Homo Sapiens
tgttgggcacctgtaatcccagctacttgggaggctgaggcagaagaatggcttaaacccaggaggcagagattgcagtgaacggagatcatgtcattgcactccagcctcggtgacaagagtgaaactccatctcaaaaaaaaaggaattgagaacttgttataggtttataggttttgccacattcttcacacttgtagggcttctgtttggtatgaattatgtgtaataagggttgagaacttccttaaaaagctttgtcacatttctttatatttgtagggtttgtgttccatataaactctcaaatttactaagagtcgagggctggttaaaggctttcccacattcatcacattcatagggtttctctccagtatgaattatcttatgctaattaaaagtggaggaacatttaaaagatctgtcacattcttcactatgtagggttttcgttcaatatgaattttcttatgtttattaaggtctgaggaccagttaaaagctttgccacattcttcacatttgtaaggtttctctccggtatgaattctcttatgtgtagtaaggtttgcagattggttaaaagctttgccacattcttcacatctgtaaggtttctctccagtatgaattttcttatgtgtagtaagggttgaggaccgtttaaaagctttgccacatattatacatttgaaaagatttattccagtatgtcttgtcttatatgtgtttgaatttgaaaacttatgaaagacttttccatatttatcacattgaaatatttctttctgggtagttgtcaaacattggttaagtccattataacctcctttgtgcaccttatgctcacccacgcttttacagcctttttttaactgtaaattgtcatgtctgcattcttcatatcttctcagcatccctatttggaaagaattttgtatgttctctggccaaaggtcttgggcaaaatgagaactcataactgggggtttggca

SEQ ID NO: 159988 - DNA, 827 bp, Homo Sapiens
acgtagattggaagtccatattttatttctctagtgacatatttacagttcaatataaattaaaggcctgcttgtacaccaaatccaggtcccttgggtggttcagtcaaagaggtaagacctccagctggctcacaagagaagcgtccactccttggccctggttttgggattttgccagccttgagctcatcaataatttcttcaatatccttagctgtcaaatcctcatagtaattgtcatttatttgaaccattggtgcgttcacacaggcccctaaacattccacttctataagagtgaaaagtttgtcaggtgtagtctccccaacctttattccaagctttttctgaatggcctccagtatgctgtcagagtttcgaagcatgcagggtgtagtagtgcagacctgaatgtgatactttccaactggctttcgattatacattgtataaaaagttgctacttcatatactctcattggaggtacttgtaaaacttctgcaaccttgttcatagcagagatgggcaaccacccattctgcctttgggctaaatccaggactggaagaacagctgctgctttatggccttctggatagttttttacaattgcctctatcctcttatagttttctggtgtgaaatcaaatggagtatcagggttattctcaggagtatctctgtgcacaaataaagctcctccagctccattttgcatagctgtcttatgcaaattccttacatgtcttccccagtgggcggtgaggccagccgcccgggcccggagcgccgcggagaagaacatggcgggccacactgttcc

SEQ ID NO: 159989 - DNA, 1000 bp, Homo Sapiens
tttttttttttttttttttttgttcagctgctttctttattagaaacaagtgagatgtattgagcagaacaacaatgcatttggtatttcctccccgaccctggaaatggatgcccccccacagcccaaagaaaagccaagacaaaaaggtgaagctcccccgtccctgttcccagacatggcacctgcctgccagccagtcagtattttttaatttaatggaatgaaattgtcctcaacagcctccgtaggtgtagtcggcttgcaggcccgccttcattttgcagcagagtaaaactgaagcctcaggcctcccctggttctggggaaggtgggccaggccatcagaaggctgcctcacaggtgggtaggcactgacgggagggacactcctgctccctcccctgatctaacatctggttcccctccttctcctagagtgcagctccatgcagttgtccaaggcctttgggcccttaggttggttaaatgctggtcgtctttggggaaagaattcaggaccacagggactcccctaggcttctgagagccagcaagtaggggggcgacagcagttagacaggagttgtggggaaggcctgacattttccataaacctggtgttaaagtagctgggtgtgggctggccttcaaataagacagaagcctcttcagaaataggcatgtgtggggaaacgagccctatacaggcctcgatccggagtggaggcctcctactcagctctctccctacacacagactggagtccgtggtcaaatgcagagtcaatccaaaggcaggaggtaaaggtcgtctttgaaacatggcagctgggaggactgggtggcagagggtgggggccaggcccagggaggccttccaacagcagttgctcgaggatggttagcgtgaaggcctcagggtccttcctttgcttggtttgagacagccatggcgctaccacactgcagggctcctgtggggaggccctgacccccg

SEQ ID NO: 159990 - DNA, 1000 bp, Homo Sapiens
ttttttttttttttttaacttctcctgtgttttaataaaatggcattctgcttcctaccatctatattgacaaatttactaaagtcatatcaaacctagagagctgacaagccaggccctggctggaccagatcacatcatacataccaattcttgaggcccctgtgaatagcataattacattgcttataaaaaaaaaaacttgaaataccatttctttgttattctgcaattttgcctctaaatcagcacctcaaaaattagggccatcagtcctaaatggcagttacctataaaggaattcccataactttgcatacccacagagaatgatctccattatacgtgtgtattttcatggtcatttggagacaccaggccagctccagcaacactgcacaagttttaatgagttcactgatggacgggcagacatagagtctctggggccttgtttaaagatgtactggaaaaccagtcctggaacttctgtcattggagaaaggtggaggagatcagctctgatatgctgctatctctcttgtctaatccagtagaagaaaaaaaatgcttcaagacagggccaggaattggggtcaggacagaatctagggagtcatcagagttttgtcttcttggtctctagtttgatcatgttcccctggatgtgaggaatgtgcttatctgctggaccccgcatatcctctgtctttacaggaacatagtagtagcccatgatggagaagatcaggcagatcaccagcaggaggcaggaaaacaaaatgaattcggcccactgtaccaggccactgaactgtgccacaacaagcacgatgatattcccaactgcaattgtcaatagccaagctgcctggagcacagatttcatgccagagggagcctgagaataagaaaactcaagacctgtgacagagaacatgacctccccagctgtaaccagggcatattgtggtagctgccacgcaatggacattttgtt

SEQ ID NO: 159991 - DNA, 1000 bp, Homo Sapiens
ttaggaagtgttagcaaatgctaccatgtggaacactcaactttatttgctttatttatatatttaacaattctaaagtatttacttcttgctttgacaaaaaatgaaaaatataggagcactgactgactcctctttaggagaaaagggttatatgtacagctatggagagttacggttcctcctttaacaaaggaaaatattaataaaaaagtgcttcatcgatcaaaaaagagctaagagctgcaagcatttattcacactgtacatcagacccaagaaacccgtatcataacctcttggcacctgtcactaggaaatgcacaatcttcaattagaccaactttttccctacctgcacgactagatgacacagaatgtggaaaagaactacaccctgtttcaccacgttcaaactgtgttgccactggaagtcagagacgtgctcagatgctctgggctttgcctggactgagagcaccagggaagccttctgggccacgccttaaccacacccaggcatgcacagaaccaccttcctgagacacaccttgcccttggtcagggaactgctaccaaggggaagaggaatacagggcagggccagagcttaagcattccctgaccttacccctagtcctcaccatgatccaccctgtcaccagttagcagctttcagcagagtcaagcatggcctccccaagagggagggcaggcacaaaacatggatgccaagattacaaagcacaaacctaactcttctccaaccttccccacacctacctccacaaatattcttgatttaaggctgtttttggaccatatcaaagctcactgaggaaaggtgccctgaatctcctcaaggccatgtcacttctctaaggaaccctacgaagtcaccaagtggcccttcactgctggccagcagccagacaagtgcccactcagacagccaggagtggcaaagggggactgctcagcagttattcctgtcccaaga

SEQ ID NO: 159992 - DNA, 1000 bp, Homo Sapiens
tttttttttttttttttcctttttttaaattaaaaaacaatttattgaaaaagagtaatgctttatacaaattcctattataaaaccccaaaatgtctattggtctgtttccaggtgtggtagaagaatataaaaagatcaaaattggataaattctattgtaacaatttcgttggtcattttgggccataaaatttttttgtaatgtttggtaactgatatccacatggaattacactcacacatcatgaagatctatgtatgtggcaaaagccatttaaattttaacttccaaaagcatatattctcaggtttggaaggcacactaaaatttattaggtccaattcctcataagacacagtggctgactttccttgtgtagtttattatgaagtaccatttccaaactaactatcctagcagcgtcagctgccagctaacagcaagagctctgagggcatcactgaacagatagcaccttatgagttattatgattcaaaaatctcccttgctgttggatttaccaacacgtaggcttttatttcttcccattacatctgtttagccacagaaagcatcgggccatactcactgcagaagataagacttcctcagaatcttatttgtttagtgcactcaattttacttcactgtctcatcacttgagagactggttaaggcaagaaacccatttcttaacattttttttgttttcaaacatttgaaaagcaacaccaaaacgtatgcagttaattcctcaattctttcccttagtatagcactttttaaattacaaaaccacacttacatgtattctatctcactggatccccacaacatcactgtgaggtgggaagatcaggaattacaaaccaccgcttacagatgaagcaataagcttacagcagccaaatgccttgctcaaacacagacggtgattgatagcaccaagactcaaatccaggtctccagacaccaatgccaacaccctttccatt

SEQ ID NO: 159993 - DNA, 1000 bp, Homo Sapiens
ttttttttttttttttttttcacttttaaatataataaatacagggaagaaaacagtaaacctttgataaagagtctaaacaaaagacagtcgacattctggggtttcaatcaagtgccacatggtctctggatgaatgtctcgaggagattgtggttgagttcacaagtccccttctcaagtgtagctctctttagatagaaacctcatactctctggtttcccctgtctcgtaaatggggttgtcaaactcggtttccacggtgatctggctgtaggggtgggagtacatcagaggcaggcggaggttggaatagtagcgacatcttgtgatgtaaatgtaggctcctcccagcagtaaggagatgatgaggaccgggatgaagatagccagggccatgttccccccttccagcgacgtctctgctgccgcttctgctacttctaaagcatgttcaaaactgtcttgattaactttacacacgggcaggggcccgttccagtgggatggctgtcccaggatgcagcggatggtcacttcacccatgagctcaaagccttcgtagcacatgaaggtgagggactctcctggcaggtagagtcgcttgtacaggatttggtatccattttcaggcagccctgggttgtcacatgccagggactcctccgaaacgcagtggggcaggcgagacgtccagatgggagtccctgtttcacggctgtagcaggtcagaagagaactcccttcaagcacaaaaccggggttgcaggtgtattggatggtggtccccaccagcagcacaggatccgaaattaagcgggtcgagtgatccacctctccggggtcggtgcagtacataattttctcacaaaatggggggtcgctgctccagctgaggtcccactggcaggtgagggtgtcactccccacgatgtcatagccggggtcacactggtaggtgattctggctccccgcaccaactccgtgtgagaagtggt

SEQ ID NO: 159994 - DNA, 1000 bp, Homo Sapiens
ttttttttttttttttcctcaagacaggtcagacatttataaaacaagtgaatattcacaaacaaattgtgggagaaacacaccttcccagcaatagaaaatctctataaagtgcattttgcctgcaaccatctcttccccatgctggcccttgggtcaggatttgaggcactgttccgagggagccctcagggccacctgagctgggagaagggaggcatgaagccaccatggagctccaggctactggacataccctctctaccctgcccttccctcttggctccaggagtgcactgcctgactccactggcaggttgatctgggaacgggctggcatgctagggatggtggagaagtaggcggaggtggtcctgccaacctgtaccttagggaagagagccagcagcagacaggcaggaaaaggaatcatcctgctacccgaaggcgctgctagtgaatactaaatctgggcctcggcctttggccttcccactctcagatttgcccttccaggtttgcttgactctctttctggcagtggcccgattctctttcctctcgactggggctgagggaacagggaagcccccaacccaatgctctgaatgcacaccatcccctgtgccctgctcccctcccacgatgatgggacatttctagtgaaggtgacatacgtacaacagttggactctaaaggcagctctctggctgagaaaacctgaggatatctcaggaagaagcctgtcagtgtgatggacagctacaggagatgggtctgaccccagggttctggtccaaggacagaggacagtgagggacagggctggggccaaaagaattaacagatctgaggctaggaaaggtcacaggggaggtagaaaggaaaaggcccaaaggccagcttaatgatacacgtgaggacaaaaatccaaacaggaatcagcctcatagccacacacacacacacgtaccacacacgcacacacacacacacact

SEQ ID NO: 159995 - DNA, 927 bp, Homo Sapiens
ttttttttttttttttttttttttttttttttttttttttttttttttttgcagtggcaacctcccaggttccagtgatcctcctgcctcagccccctgagtggccgggactacaggtgtgaacactgtgcccagctaatttattaaattttgttgtagagatggggtctcattatgatgcccaggcgggtcttgaatttctggactcaagtgatcctcctgccttggcctcccaaagtcctgggattataggggtgagcccctttgcccggcctaaatctggctcttcagattccgagagagagggtacaggagcctctctgctcagcctgaagaacacccagaaggagggaacctcaaagagccccgagatggaaggctctcctggcagcgcctcctgcaggggtgcctgtggaacaggctggccccagggctaggagagttcatggcccagtctgcttcactgggctgccacagtgtgaaagctgggcctagacctggctcctgacatcctagtgagggctgggaccttagtggttctgaaagacctttactggatggttccttccagagtggggtatgggatacacacacactgcggccaggcattacgccagctcccggatgcctcagcctcgtgaattcggggtaggacgctcagggcccatggtcagcacagcgggtgggtgggtttcagcgtggtcacttctccaggggtgcataattgagcagcttctcgatcaggtccacgtgggccagcagcatccggcggcagcagtagcgcttcaggcccagggcatccagcgcgtccccctcggtgtactcggcctgcagcagccccaggtaagcctcccacttgttgccgacgatcttgccacaagtgaagcagcgtacagggatgatcatggcggcggcgcgtcccagact

SEQ ID NO: 159996 - DNA, 1000 bp, Homo Sapiens
ttttttttttttttccaagtttcagcaaaataattttatttcctaacatatggtaacatatacatccaatatgtgctccccttgcacatctattcacaagtgacttccaaatgacaactgctttgatatttaagcatgtgctaaaagttatcttagttgagatatgaaaaatgctttagatggataacattctgagtatattggattagtcacagcagaatttactttagttagatgagttctacaaatttaaagctttgaaaagctactacttttacttctaatacatccagatgaacacgatgtagcaatatcagcttgtattccagagaaatctcattagtttttctggtgatggaaccacttatccacgtctgttggtactgtgcaggcagattcacagggtggtggtaaagcatccacaatggctctggcagcatcaggatcacacttgaaggggctctcagacaaagttgtattcatgcaactgattccttttccattcgttttcttagtcactaatgctttccaatggtcatgagtgcttttaataatatcaatggcaaagtccttatctttaaattctgcattaaacgcaaactcattttctggttttccatcaggaaccttataccttctaaaccagtccacagtagcttctaagtagccaggtttcagccgtttgacatcattgatatcattataattggctgcatcaggatcatccacattaatggcaatgactttccagtcggtttccccttcgtcaatcatagccaatatgcctagaactttcacgccaattatttcacctcttgcacataccttgcttccaatttcacacacatcaattgggtcattgtcaccacaacagccagtatgtttatcattgtgccctgggtcttcccaagtctgagggatggcaccatagttccagatatatcctttatacgggaacaaattcgcaacatagcgaagttttccttttttcacatcttgt

SEQ ID NO: 159997 - DNA, 1000 bp, Homo Sapiens
tttttttttttttttttacaggtgcaaaacagaggctttaatctgaacagcaatgagggtgcaaggggctgggagcccatagggggatgggggagccaggaagggctgtctggccctgggagagaggtggacgctgggcctcttctgagaaactgtcactgacctttgggactcctgacccagcctctgcccagaccatcaccggatcccaggctgagcccctgtgctgtgcttctcagtgctcccccttcctgaagggtgtgtggacccagacacaggagggggcagtggagaagggcaggcctgggggacgagcctgtaagagccaggcccaggaacagccctaggagaaacctcggcggtggccctcaatgggcctgcccagcccccactgggcccattctgagtgccaaagcctgggcttgggaggctgtctcttacctcaccctataaaagcaatggacagttcagggaggtgggaggacaaggtgtgggactgccaccttctgggcccacccatcacccaggggagcagagaagcagggcccaggggcccagggtgaggctcacagcagcgcaaaggtagcagaagtggccgggcctaagactgccaagaggaatccaggctctccagatacaatgggccccaagcccctccctgagtttctgccatcccctccctgccagggaaagttctggaaagacatgcctcaccccatcatctgggccctcccaggagcccagcacctacccaaagggcagcttccattggctaggttacccttagggagcgggagagatgtggctacagtcaggaaacccagcagagccaagggctagagaactgaagagccagggggaggcttggacacagggggcctcaggcccagggggcagggtgaaaaggagcctgggaggggcaccagccaggacagctaaggcctctccaccacccgaccccacccaccccaccccagcccacagctggcggccagcctca

SEQ ID NO: 159998 - DNA, 1000 bp, Homo Sapiens
gagtcatttatgcctttaatgttacatgtacaaaactgtgtattagtgacgacttatgagggtgctgaagacagaggtgactgggtaccaagaagtctgtacaccaaagaggaactggaactcaaggcaagaatgaggacaagaaaaaaagagaataagggctttgttattttcttatttagtaaaggagacaccatccacaaagatgaaagctgacttaggtagaaatgggaaagaccgaaaagttacctaagtgttttaatataacgaaactttctctctttgaggcttgcaagtagagaacagtgaagtgatataattctaactactgaagtaaatttctcagtttttgagtttctaaaggttcactgatatggcagagattgggccaaaaggtcttttcttcatgagaccaccaccataactcactgcttaaaaggagtatgaagggaaattgtgctccccttcccaccccacttaaagaaaaccacctatatacagaggcagagtaatgtggtaactagaaggcctcaactaaaaagagaagtgagtccgtccttacccatggttttcctaacccagctgcttgttgggaggaagcaaatgctactgcttgctcaacacaagttgtgacagctgttggaggatcaggcaaaggaggactctggaaagggttaagaaactcatcaataaccatgccatggttccacatgagacactaatcacatcacaagggctgcaactgtcactgatatactaggtcaagaaaagatctactttccagaaacttcaaagcatgtatgtaatatacaaagatcagtaagaccacagaaaaaataatacaccaaccagaaaataacaatgactctttataaacttgtatggggtctaaattatcccttgtaatatatatgtgtgtattcattccacagagaattagatgatccgcctccaggtaacctgctgggaatttcttgagattttggctccccttgaatgg

SEQ ID NO: 159999 - DNA, 1000 bp, Homo Sapiens
caagctcccatctagttggtttaatcaagaacaggctcgctaatccgtagaaacaacaatgcttgcaatacaaagtagacctcttaaaccaactcaatctatagaagagttgggcatcagtgagtatttccagccataacaacatttattagttctctggtaaacattttaacatttctgaagaaacagcaaagtgggcatgtatctttaatgtggagcactggggacatatctggagacctacaactctgaggaacagagacaagtgatttgggggatattctcgattaacaagccaaagaatcaggaaaatgggctggaagcgggtagccacacacctctctccctgtgtggggcctctaatatgtgactgatgccttccttttctgtgcctttgaaatctcatgcaagattggctataggtgaattgtattacgaaaccatccaagttcttctagattttattgtcctatcgcaagtctctcttctcaattcaaaaagcagttatccagaggttctttcaccactctcttttcttgtgtttcaaaggaagtgggacaacagaaagcttctcccattgcttccactaaaaggatttctcatctattaatggtatgagttctttcatgttctcgacatgaactggcagaataaaggctttgccacattgcttgcattgatagggtttctctccagtgtgagtcctttcatgatatcgaatgtaattggaaataaaggccttaccacagtgcttacattcatagggtttctctccagtgtgagtcctttcatgatatcgaatggaactggaacaagtgaaggctttgccacataccttacactcatatggcttatctccagtgtgtgtcctttcatgtatatgcaaggaagagaaatacctgaatgcttttccacattgcttacattcacggggcttctctccagtgtgcgtcctttcatgtatacgcaaggaagaaaaatacttgaatacttttccaca

SEQ ID NO: 160000 - DNA, 1000 bp, Homo Sapiens
ttttttttttttttttgtatcttaagacaaatattcttttatttctgttaaactgaatatacaattgttccctaggcaaccaacttttgcttataactacaatttaatttcacgttgacaaaacacagtgaaaagacaactttgtgaagatctaattacaataataaataaaataatttatacaagggtttttttttcttgacttttctataggggtcatattcattaaaaagcccaaaaggctacctttgccttaacccttctgtagtacaggaatgattcttagatttgtttccttttgttatagaagcaaatattgtttttttaaaatagcctgagatgagaggttatattgtaccccaccagctaacacactaagtggatgacaaactattctctcggtaatttatatagcaaaacatctaataaatggtcatggtatcaaggataggtaacattacttccttcctcatttagttttacttcaaagtgctaactttgtaaactaatgacagtggtttctgagggggtgaaaactgcttagattctggtgggttttgttactatgcttatccatattccctttaaaagtaacaaaaaacctgtagtgaattttaacttttaatgctttcctgtttaccctgcctaaatcagctcccactgccagcaatgggttaaccaaatgtaccaccacaagaccacctcctaggtctctatacttgaatgctggtcaagtctcaaacttagtcttcttgaagatcagaagatcactggtaagctctagaccatgttgaagaccatgttgaaaagactcatctgaactacaaccaggcttgagaggagacagtgccatgtctgatctttagagaaactgtactttaaaccacagcagttaagctttcgtgattctaaacttttcttagtggctgaagtgaatgaaattccttattcccatgtaacactaaacagggatttatgcttaaaactcccagcctccact

SEQ ID NO: 160001 - DNA, 893 bp, Homo Sapiens
ttttttttttttttttggaataataaatacgttttctctgctacagtctcggcaaaggccacggccctagaacggggcgccgcctccgatgcagtctcagggccacagcctcagcgcagccacggcctccagggcccacccgggccctgcggccccgccctgggggcggcgggcagcgcccgggtcagacccggcagcagcggcggcgcgagcagagggaaggggccgccgagcgatggcagcagcgggcggcccgcgtagacctcgggcgctggggcctctgcgggggcagccggggacagcgaggccgggcggcgggagggtcccagctggcgcaggcaggctgccaggtggcccagcaggcgggagcgcacgtcggccgggacgccctcgcagccggccaggaagcggttcacctccgccagacactcgtggaagccggcgcggtacttgcccagaacggcggggtcggcgctgagcgcggccgtcacctgcacgcgacgcaggctccgcaggtgtctcacggtcatctccaggatgtccgccttctccagcttcgagtggcgggagctctcttttctgagggcgtccaggatgagggttttgagctgagcgaggctctcgttaatacgcgctcggcgccgcttctccatgaccggcttggaggacttgcggtgctcggccgcgctccggggcttgtctggggtccggctggcgctggccggcgctcctgccatcggcgaggcgctcggtttccccggcgtgtctgcggccatggtgcgccccgcgcctccccgtgccgggtggagcgcgccgccacggaccacgggcgggctggcgggcgagcggcgagcgcgcggcgatccgagcccctagggcgggtcccggctcca

SEQ ID NO: 160002 - DNA, 946 bp, Homo Sapiens
ttttttttttttttttttttttttttttttccaggctcaatattctttattgataagcattagtgaaccccttgccctgggagctcagccagtcctgctctcagattcctggccttaggtgggagagcatcttttcctcatggatcaactgtccatgtctgactgtgcctaacttgccagatcatgggtcagggagacaggcagcaggtattggaaggtgatggccaggtccttttccccagtgaccactctccatctagaagcactctgcttcagctgcgcaggctcttccggggactctgggagcctgctggttagatggaggagttgagcctctgacacctccaggttctgcctgccaagggttcctccgcagccgggctgagctgagcaggagcaatgggctctcgcttctgtcctgaggttcttgggtggtgagcaagagagctaagggcaggaggtcttacgtggtgcctcataggggatagagatgccagagactgcactggaagcgggggtctccggggtgggtcttcagcacctgccacacctctgggggaggctccaagcccatatgcttggcccgacaccagcgctgcagccgtgtgatcccggtgcagggcccgtactgccaggccaggtcaaactgcctcagcagctccagctccgcttcctcctcgtcgcggggctggggctcctcccctagctcgggtgccagctcccccttgctgtgcccagcgggcccctccctcctcttcacaaccgggtaggaatcagtgatgagccgcttccggcccatggcggccacccaggcaggcagagaaggaggcaactgcggggaagaggagagaccggccagtgggcgcgagaaagacagctgctgagagagacagacggggccaggccagcggcgggcagacaagatgacccagacaaaccgagagag

SEQ ID NO: 160003 - DNA, 1000 bp, Homo Sapiens
tccaaataaatataggcaacttatatttgataaaggtgcaaaggcaatacgatggtcccaaataaaaaatataatgtatttggagatcagaatcaaggccagagtaaccgagtgtagcaagggaaggagatcagctacagaagagattagagaagtcaacagggtttagcgatgcaacatcccttaggctatgaaaagagatcaatgtttgtagcaggattttattttgagacactgactgaggtttctctcattctcctaccacctcacacagtcaggtaccttcaccatcctcaggaaaaaaaaaaaaatatatatatatatatatgtgtgtgtgtgtgtgtgtgtgtgtgtgtgtgtgtgtatatgtatatatgtgtgtgtgtgtgtgtgtgtgtgtgtatatatatatatatataatatatatatatatatacatatcttatatgcacagccctctaggagaagaggttgttcaaggagcacagatattagaatttttgcctttgagttccaaaacacagcctttaaagtcgtggtagaaataacgatcttgaaagacaacattctttaacagccagactttctgagacaggaaataataatggctccatatatttagcattcattgtgtgccaggcacagctctgagtcccttatattgagacctcaggaaaaccctgatataggtaatgctgttgtctccattatatggttgagggaaccgaggcacagagagaggaattaacttgctcaagtcacgcagcagagccaggacttgagcccaagcagtctggctccagatcctatgcctctgaaagtaagggaagagagtcacagagagaacgcactgggagggggagaaacaggggtgggaagttggtggaaaaaggaactaaaaatttctgagagcctgccagggtggaagctgcacccctttccctttgttctgagctgaggactccagtcttgggaggacattcccaggacagatgaaggg

SEQ ID NO: 160004 - DNA, 1000 bp, Homo Sapiens
tttttttttttttttttttttttttttttcaaggggagattcaagtaatttatttttttgcagcccagtggcagagagtctcttactcaggttgctaaagggagaatgtaacaagagaattgacatcactcccttcttcaaagcaacaaggcatcttgaaaactcaacttcctggtgaagctctgttgttggtagcaggaattatttcatccatgtgaaaagacagctgagtctgggatgaaaactcttcaaaggaaaacctcccctcaacagtcagaatgaagaacttcagccaacacataatcaaattcacttttggtctatcccagaaatttgcagtgggaagagaggtaggtacagtttcccagcccacagtcattgcttcattccttgtctgatcagatggtagttagaaaagaagctctcctacatccatcttctataccaggaaagaggaagagtggcaaaagcagagtcttgtgccttcaaagattcattctggttctgttgtgggctaaggcatcctgttcccagtatacgcattttgagatcagatagagttgctcttccaggagtcagcacccacgctcatgtccgtctttcagttaaatctccttggtttagtaactcttgtggatttactgcagttaagacagaaacttcatatgattgcctccctgactgcatggtcaccaggtgatgtgtcacatcaggcactgaagacagggaacgtggggatccttcagcaagcacctcatcatcaactcccaggatagaattggtatttggtaggttcaaggactctccaccaaggctgggctgggaattcatagacaccaggtttttactgggtactgaagcctcttcaagcaaactactgcccattagtggctcagcagtttgctcctgctcttgactcccagctgctcccagctgcaggtgatgctttctcatatgcacattcctgcttccactctgagagaaggtcttcccacagact

SEQ ID NO: 160005 - DNA, 1000 bp, Homo Sapiens
ttttttttttttttttttgttagaaaattaatttttaattgtgccgctttcaaactatactgaattttacatttctaaagatgtaaaaactcaactaatagaaaatatacatgaccattctgtctacatagataacagaatctatgaatcttgaaactaagtacatcaatttcaaaaagtattggtcatttaaacagaatcaacaattcggattgacaagaactgttcaaattaatttgacctgtagattctgagccatgtttttattaaagtcagatctattcctaaatacaaaatattttgaagatttattaaaactgaatattacaatgcaaggtaaattaagactaaaggcacataaactttggtcccacctggttgtcagttttagaaaactgccacaaaattaatcttcctgcatattttcgcagtacactttctttatctttgaaaaatacatgcaccagttcctggaactagctagaccagtctgcacatgctcagaaatccacaaccatattccaaatcttaattacaaactaagggatggcaatatatatttaaatgcacgtaagtcatgtcaacttcaaaaacatctacgaaaaatattcagccacaaacaagacattacttagtgctgacatttatatgatacgtcccacaagagtgtgtacgaaaaggttaagattccacaatgctttccacatagggctcaaacttacagaaatcactttgttgtcttaagaaattaatactctgcatcttgttaattttaactaatgcctacattcataactgaatctagaccagaattgtgagatacaaaaggccaatgttgttttcaaagcaataaagcctaaggtagtaaaaactaaaaatgctgctttattctttcaatatcatgtatcttatttgattaaatagaaaaaaaggtgacaagccagtaattcaaaataagttccaagccaggagaaacaaaaacttaacctttttacacacc

SEQ ID NO: 160006 - DNA, 1000 bp, Homo Sapiens
ttttttttttttttttttgaatttcgatttttttccatctttattgaggtatatttgacaaataaaaattatatatatttagggtgtactacatgttttgatatacatatacattccaaaatgattaccacaatccagctaattaacatatccatcacctcacgtagttatcttttttctttttttgtagtgagaacatttaagaacatttaacaattctttgcattttcaaattaaacaaaaaaaaatcagtagtaaagatgctataggaccagatggagttgcccctttataacagagaatattttagctttcataaagttaagcaaaatctaatgatagtcaaatccttcctggtttgaactacacaaatactaattaaaacaacagaaactgcctttagaaattttgcttcccatattgatcctttatattcctaaatttattacaattttaactatgagatcatgaaggtaaattgtttcataaaactaaaaccaatgtatacacataataacttgagtatttcctggtttgtagcgaccatcgatagcagggtatctcaaaatgagcactgatgacatttggactcaataattctttgttgtagaaagttataagatatatatattttaaactatgctactcctcatttatttaggaaacctcatatgcatagagagtgcaaagttaaactgcagccacactggaatttccataattgcccaagaaatcgagtttaatgcagaggctcacacagaacatattacacaaagaacagacaagataattgcagcaatgactgggaagaaagaatacgcccatgtggtacaaagtgcaggggtgatgatctgaattacaaaactgtgctatagatcaaaatagagctaatacccaaacaaagaaatagacattattcttttcagcatgagcagcatttagctccaagctagaagcagaaaacatgccagtcagagattatctgtaacttgttaagact

SEQ ID NO: 160007 - DNA, 1000 bp, Homo Sapiens
gctttaaatatatttttatttgtttttctttatattaatttttttctcccatagaggaatagcattacagtctaacaatcagaattctgttacacacatacacaggcatgccacatgacccagttgaggtggttgtctccttgagtctgttgacacgtcacatggtcaaagtctcctcatttcagccagtctcaacacaaaacacccaacagggatgcactcaacttgttggttccatgtggaactaggtggcagggcgagagggaaagtagtagaagggggctatggtgtgtctgcattcagtcccctcacataaagccacatggatctaggggggtatccaagagctctggtggggtccgtgttgcacctaagacattataggtcagagcaagttgctcagagggttccaggcagggggctggggagcaggcatactctaaaacagcaccaaactgcattcatacacggtgccctgctggggctagactggcaaaggctggaaagacacccagcttgaaggaaccactcagacttactggggaataactggaagtcactgtttgatgtaactgggactcactctagaaacgggtccctctgacagttttggcaaagtgctggtagtactgacattaatactcacaaattgatacaaactcctctagggcctcagaaaacatcaatcaaaacagactctctaaccccctcctaaggttgcataggactttgaactctggttccctcatgtattcaagttctgtggtttaaaaaaaaatcctgaagcatgctcaaggtgaaaggcacgtacacagtcaatacagtatgacaagggctgatgcttcaggagtcagactagcaggagactgagtagtgttggttcttagaaatctatacacaattaaaatattgccacactcaaatgctacagaatctataggaaaggtacaaaaaaatatgagccttgcaaccaagcaggtgagagattgggttctagaat

SEQ ID NO: 160008 - DNA, 1000 bp, Homo Sapiens
tttttttttttttttttttttgaagaaaaaatgcttttattaatcacaacatgaaattaacatgacatcgtattagaattaaaccaggataaatactgctgttataaaatttacatttctcacatccattccagaggaaaatcttacatattagggctcatcttaatgttatggactgatttcagtaaaactttttaaatagtaaatagcaattaacgtattctcaaactgtgctaagtagttagaaaggcaactataaaatctataatgataacacgtggcaggattagaactgttctgttaaacattaagaaccacatctctgttttagatgttacctcagtgcacctttttcactggtaaggcaactgcttgctgtgggtgccacaatgattaccaagtttcttcttaagtaaaagacacttgtttgatcaagactcaagtgagttttctttcccaattttgttcttttgaagcagaaggaaataccttggtctttgatatatataaggaggcaaatatgaaatacagctgttataatcttctaaatcacaagggcaatgaattattcattttctttgaaaatattcagtctttgaaatatttcatttttaaaataacaaggcttctgaataatttctcaaaactagctttccattttagtacacgatttgataaacatagcacattagataggtatttagcaatttcttctaccaactacactttgccctcactaagggtagagtatgatttgaaacaatttctacatataaagcatctttaaataagttttgtgttcactgaactgagactctttcacttatgtacctatggaagttaatctgagcatacacatatatacatacttgcatacatatgtgtacatatgttttttaagtaagttacttttaccattagaataaacctagacactacagggacaactctggggaacagggcggtctgccttaacaacccttctctaggttgaggaagg

SEQ ID NO: 160009 - DNA, 1000 bp, Homo Sapiens
tttttttttttttttttttttttactggcttcgagtacactttatttaagcagttactagtttaaaagcacctgtaataacactgagatcatcatcatcaaattgccacccaacaagcctagcttcttgcagaaaagttaacttggataacacttggctaagttttctgactaatgctggatcaggtagaaattctttagtactaaagtcaaaaaacactaattgcttaagattctcaaatacacccatgaaggcaagccatccatcactgctcacacgatttcccgccaaattcaactgctggaagtttttcagagggttctttccaaaaaatgcacctaaaattctaatctctgtatctgtgagtctccagtttttcaacccaagcttgacgagttgtgggacctcctccaaatgtttcaacaggctgctcaggctgccttgcacgtcacagccccagggcagcatcagtgcggtgagctgttctagcacgttcatcctgtcgatcagttcatgaagagcttcatttccatctttttccaggtaattttctgataaatcaagaatgctcagtttgaccaaattgtgaagattctgagctaggattttcactgcatttgcagacaagcagcaggagactaattgaatttcttcaaggtcacagggttcacttgacagagacttgactatgtaatccattccctctccaatgtcagacaagtgggtcaaatgaaataaacacatcttcttcaggtttttcaggccttcagctagttttatagcatcttcttcattcatctttatgttatccattatgagctttgtaaggttcttcaagttacccaagctgtcagtcagaccacccggcagccgttgattctgtaggtcatgaatactcaaggttttcaggtttgttacagatgtgatgtgcctctcatcttctatggtgaggggactggcttccaccatgagagaataaatgttcttacaggtgctgagg

SEQ ID NO: 160010 - DNA, 1000 bp, Homo Sapiens
cacattaatcataacttttttaattaacaagtagtgaatcggacactttaagatattgtttactacatactgaaataaacagatctgtttaaattcagaaacccaaacatttacagtaaaatgtgcttacacataaatatgaccaaatttatttaaagcccctattagatagatcctaagtacatgcaattaccatgtaaaaacaagaccatgaagttgatgtaaaaaatgacaaaatcactaagtcaccaaaactagaaaaaaaaaaatgaaatggaaactgagaaaagacagttaataaaacataaggaacctaacaaagcagctttaaaaataggccatactaatccttccattttcaaaagttcttatcaagtaattccaaaaacggccatttataaaatgacattctaaaaatctacacttggaatttcaaagtatctcaattcagaaagctttgactactgtttctccccagcccacaatttcaaataatgcaggaaaagtattgacgtaaggaagaaaatactccaacagaatgttatagtttttagaaaaatgaacttactgctttccagaaccttttaagacccacagtcagcattaacaatcatttttcctattttcatccattattttccaatatcatgttagagatgaataaattctttgagcccataactaaaagatcaacaaacctggttttattatgacaccatatttttgtcattggtactgcacaaaattatatacaaagaaatatatacaaaatgttcaagtattagttaaatttcaattcaaggcttctgtttcaaaaaagctacatttaacatatttcataaagatagcacaaagttagtcatttcaaataatctttccaactacttttggtttatatatatatatatatatgtatatatatatataattcagtaggcactaaaaacccatgcagctgcattgtgaggggcttgctcctgcccttaggtataagcaggtt

SEQ ID NO: 160011 - DNA, 1000 bp, Homo Sapiens
aaaaaccactctatatttattcattatagaacacacttttcttcccagaaagaaaacaaacagtctgaggtatcccacattaataaatcccattctgtggctttacatcctgaatttctgttattaatcaaggttcagtatcattatacacagtgattaaaatttttccctgagatcatcaaggctgtgcctttgacatagaaatacttaccctaccaaaattcaggagaaagcatagaaaactaaaagtctttttggtggtagaaaaggcagacaacttaggcagaattcctgagaaaaaggtgcagagtcattaagccaccagttaaattttacctggctgtgaactgttatcccttctacatttctaaatattctgggaggaaaattcatcttattgcatagaaagatactttttcacaaggctatgcacaaagcatctttgcttttgctagctgccacagccatcttgacgcctcagtttccagtaaaatgcaaagcttgagaggtacaggcagcctttcccccagtgacatatggaaaagagaaatcatccatttcctcatggatgatgaggaaaaatgtggttgtcgtattatgtgtccggtcaggcctctgatacttctccaaatggtctggcatcataacagctactgatcctccacaagtaggaacgaggaaagacttactggattatcacctcaaatcccagcctaatcagctccacaaagcataaggcaaatggacattggcacgtcatccagtttgggtgcactgaaagtcagctctgaacgaaatgccacttccagcagcccctcccaagctggaagaaatcacaagctgcaaaagagccagcccgcccaaatagtcattcttaaattttgttgtgtccctccgcccacccatccccgtaaaattgcacaatggaatgatcgtgttccctactgaagacttcccctcctaatagtaagcaagcaaaggtttccctagtctgccccat

SEQ ID NO: 160012 - DNA, 1000 bp, Homo Sapiens
tttttttttttttttttttctgtattatttatttgtgtacaccagtgtcagggagtgtggaacaactggaaatgccagaacattagcaaccagtagtatcaaataacaaaattaaaagtatggcctaaaaggccccagagaaagtgcactttggggaacactcttatgtgtaaacagagcttcagtcggccttaggaaactcactcgaagttactgatatggtctgttggtgcttccctgtattcacatattggaaacttgatccccaatgtaacagtatgaagagggaggacctttgggaggtcatgaggtcagggcccttgtgactgggattagcacccttataaggggcctgaggaagtctgctgtttacaaccacgtgaagacacacatcaagacacaagcactacctatgaagaacataccccatcagacaccaaatctgccagagccttgatcttggacttcccagcatccagaaccatgagtgacaaatttctattgtttataaattacccagtctaaggtcttttgttacagcagcaggaagggacttaagacagttgccttcacatttagctgcaaaaatcactataaaaataatctgtgctcagatgtatatacttattgaatccatgcatatttctttctgaatatcaaacctgctgctgtttcttttccttcttgcccctcccacaatcactgaagccgattttgaccagacaactggccaaaacagaagactgtttaaaataacatagtctcccttaattaaaagttttatttttaaaaaacgtaacagaccactctaagaaactttggcattcaaagcagtagttactgttatttgctaactctgaaaaaaaaatttttcccctcacaaacaaccggcaaactcctgccacttcctagcttggtggctgccagcgtgcactgcagggaaacggtgggtggagggataggaaggccctcacgctcccaacccacggagaaaatgcag

SEQ ID NO: 160013 - DNA, 1000 bp, Homo Sapiens
ttttttttttttttttttaacaggaaaaaattatttaatagtataacaaaatgcaaaataaagtacccaagttacaaaacataaattcctttggttcatgatcacaccactatttttaccttccacatagctacagacatcacaccctcaaagtgaagtcaaactgtccccctcatactgaagatgtcatgccaaaaccatcacataccccactgttcagtgaaactgttggcaacttacatggaacagagctgtggggtaggaaaaaggggaaagggttgcgttaaaaaaaatggggagactctacacatgcagaacaagttagtgggagggagtgctctgctgggtcaacacgccatgaaccacacccctattcgtgctacatgaggctgagtccttgctacaaccacacagaaatacagacaatcaagtgaacctgagcacccccagggataacagaagaaaaatacagagaagcagaggagagaaagaatggcagcaagaggcagatcacagaataccagggaacacctagtccaaaccctgttttacagatggggaaagtgagacctggagtagtgaagtgtcttgccaaaatacatagtttatgggagcattagaactccatgcttccttttaatgtgagcaaggaaaaaaagagattgacaagaaattgataggcctgctaaggcaggagacagacccaggcctctcattccagttctgttgtctttttggaagagtgcctatgaggtcattaaggcctttctgggtgttttcttgattctcaagagtcagggttctgggtggctctgggacagagggatccaaagaaacagccaggccacctgatcaggacagaagacaatggcctctaatctgttcccaaactagatctgaaacagtcacaataagctaagaatagaaattcagccatctctgaatcaaacaccatcacctaaatggtggcagaaagaaaagtcaccgagctgataatctg

SEQ ID NO: 160014 - DNA, 1000 bp, Homo Sapiens
tttttttttttttttaatgtttcatgaaatctttaatgaaattggggagaggggcacaaacagaagggaggggcactggggacaggcttgggggcaagggaggtggacacggggcagggcagggcagggggctctcctcttccctgcagcaaccctcccccagtcatcccactgacgggggagggaggtggggaggtggagccataaatacgtccagagtttcaaagaggtgaggggcgaagagctggccagggctctcagagagggggcaggggcaggcccgggccacccttgtctgggggccctggctccttgggcggccgtgggggccctggggggtcccctggcttgcgaccgtgcttgcggaagtagcggtagcgctggacgtaggcccgcaccaggttgctcaccttcactgggttgatttccccacttttgctgtggcagatcttgtggacggccttcctcaggatgtccttgtactcctccttggtgatgtccttcttctgatagtatggcttgatggccagcttcacctcctccaccgcccgctcctgcgtgtgcagcttcttcagatacttatctgtgtccccacggccctcagagctgctgctgccctctctcttgtcagacgtggcagccagcccggtgggggtggggggggtcgaaccgcagccccccagagggaggctgccaggaagcaggtagctggaggggccagggggcagacccaaagaggtgggcacaggagctggggtcatccccagacttgagggtggctttctgtggctgaggatctggttggtggcctggatcagctcctgggccttcgctcggctcgccaggttggcttcttccatcttgaagagaagtgcagtcaaggccaggacgccgctggtggtgcagtccacaccagctggcagattccagggcatgggcgggggcagcgtgggcagctgggagacacgggaagctggcccgtcctccgcccccgagtcac

SEQ ID NO: 160015 - DNA, 1000 bp, Homo Sapiens
aaagcaaaagtgctggaccattctgtgattccgtttaacctcggccacttcaggaacgctgcttctgtcagcttcctcctggcgctgctttaacctaaaggactgaggaaatcagaactcccagaagctttttcaaaaagtcataaaacagaaaacaaaaatctctttctgtctgcaaaattccaatggtgtgttgaatcgcctcttcctagggacaagccgcccgctgagctagcaaggaatgcatttcagttcatccacttccggcagttcacagctccacagtgacacggaatcttgtgctggtcatcttcaaagtcaaacttatagtcatagcagagctcttctcctttctggattctccgactggagctgatgataattttgtgtcctctctcaaaagtcaccacttcagccacacaattaggtgcacacgaatggttgatataccttgcgggccctcctgtgagcgtcgcgtcaatcacatggtcgttatccatgcggaacatgtacacaccacggttctgagactcataaagcttctctttcctgttggctacttcgtttcgaatgatagtcccgatgtactcaatgaccatggtgtgtttctcaatgtctcgagcagcatacaggcccagcccctgaatccgagaccgtgccagatacacattggatttccattcagttttcatcttccggtactgcgatgacttggagtgaacaaactgtttactataaggtgcgttcagttctccagtgactgtgctctgaaatgactttgaggtgctggtgctgtttaaggtgtgaggcctcttgacatgggcactcattttaggttcagaacgggcacaacctgtggggttaacggcaagaggaagttccatgagaggatttcggccgtatcggaaggtataattttcacatgcctcaaccccaggaagtgattccgctatgcgtgccactgcagagacggtcaggccaaacagatcctctcctttta

SEQ ID NO: 160016 - DNA, 1000 bp, Homo Sapiens
attgagaaactgtttttcttacagaagtggcagtgtagaataaataacgcgagggacagagagtgtgaggtaccaagaggctaaagaagctgggaggtttgcctttaaaaggagacaaaaatcccagggaagctgcaagcggaagggagtggggtggcccggaggcggaggactcaacttacagaggtgaagtctgcaaagcccgaggcagaggccttagaaggtttagctgcagaggaggggacaaatgggtcttttccactaaacgggtccccaaacccctttttactttggaacgggtcgccgctgtcagccccgagtggctggaatggatcgggggcctcgggaaagtctgcggaaccaagctggcttacaggtgtacttttaccgctgggcggtttaggccgtggaggagcaggtttcttcggaggcagagcaggagtgtcctgtttacttttaaaggggtcatctgagaatcctgcccctcccaaggaggaggtgaaaggcccagaaggtgggggcttggacatctggctgaagtcggcaaagccttcagcactattgaaggacccacttccgaagggatctaaggttccaaagggatctgatccttttgaggagacactggaggatgaaaagggatcactggattcaaaggggtcgagcttcgaaggtaaggaagggtttttcgtgaatggatccgaggtaaatgggtcattctttgtctgtttcttgaagaagtcgtcagtggcagagccacggaatgggtcactttctttgaaagggtcccctccaaatggatctgttgaagttgtctgctgttctgcaaaggggtcattctggaacgggtcgcctttgaaggggtcagctcctttaaatgggtcagatttgaaggggtcttctgtctggaaaggatccggatgcaactcttgcgtgttgttgctaaataacaaggctttatttttgaaaggatcatccatggctccaaaactgcccctct

SEQ ID NO: 160017 - DNA, 1000 bp, Homo Sapiens
cagaataaactctgtgcagtttattctcattacagtgttcaaccagtttgacatataaagataacacactttaacagtaaatgttgggaggcacacatatattcccattctgaaagaagacatgttatatatacggaaaaaaatgcagcaaatattaaggtattcaaagtaatttttttgaactcagatgtgacatatttacaagaaaagtgtgtacgttttaaaataattaaataatttccatagacttataaaagaattgagataaatattaggagaccctgacaatcaccagaacattttcctatgctatcgaacaaggatagttctattttaaaatgtcccaaaacagagctaatattttgccaccatgaaatatatcaaattgcaaatactaaagtgaacatgcaatgtggaagctgtaccaaaattaaacagcattaggttcttaaatattgcaaagtgtctatttaagatttctcgggtgtgttcatgaaaaaggaactttcaaaaaagccattaaaatgaatatatcagctgaaaaagtgataactcattaaaatctctttattctatcactttcaaatgtagctgcaaaagagaaaaaatcttaatgtaactttaaaaaaatattagcttatgaataaaaaagttgagtggtgcattctttatgcatacagatttttaaactgatattgtataattctaatacatcttaacctctggactgcactgctgtagtaggaaatttttctgtctcagacaagaagtcatctaagaaaatgaaaacgagaaattttcaatgatatgcatgaattcaaaacaaaacagtactgtaaaatggcaaaatataaaaatagcagcatgtgaaattcaagactgttttcttaaagcaaatgtttaagactgaacctcaaaaacggtacttatgggccgggcatggtggctcacgcctgtaatcccagcactttgggaggctgagatgggtggatcacctgaa

SEQ ID NO: 160018 - DNA, 1000 bp, Homo Sapiens
tttttttttttttttaggttctgccagaccaccttttattacatcagaaaagcaacactaggcactagatcttgcaaaatatgttctgaccaactctaaactgtctgaagttataaccatatcagtaaggtttttaatgaacaaaaaagttaaatacaaactttcatatgcaaaatagattattgtataactggcaacctcagagccaagtactaaattttcttccacaaatttcagtggggatggagtggggagatgttagtcttaatgagtagaaaacttaatttagacttaatatatagaaaacaaaaactctgaggaaaaatagctttaaattgaatagtatcttttgaaataaacagctcaggccagcccctacaattctgaggtttatactcaaccagatctgggatgaaaatgaagatttagggtttacagttacttcaaatccatgaatccagtttgaagactaagccaagtcaccacatttccagaaggggaagtctctttaaggtgaccacaacactcttcggaagatgcttggataatcagagtcccttgggcacagttccactgttcacggcactgtgccaacgctgtagtgtcagacttcctctgaaaggcaacaggagccctatcccacagcattttcatttctcccagcattttttgagcctcaaaaaaacaaaaacaaaaaaaatcccaaaccctccagcttcatgttggcagttactgctccagctccacttccttccgcccccagtgagagttccctcctgctcttcagcagggagtggcagcttgagtaacattcctttcagaaataaatagttcaaacaagtaatttagagctaactgtaaaagagcagcagtaaatgaccactgcccattatgtttgcaaacgagtgagtgaatgaatacgctgaacaaacacacagaaacaaacaattcacagaataaatcctgcatttcccacattcatagggaaaagaatctctta

SEQ ID NO: 160019 - DNA, 1000 bp, Homo Sapiens
tttttttttttttattttgtccatattcatatatttatagagctagtatgtcaaaaactttacacagtgacaccattagcccctggcccacccctctccttcccacttctgtgttcgaccctacttagaccctcgcacacaaaggttgatcaaaggcagtggccacctcagactagtgcaatgccagtcctgcaggggagaggcctggcaaggtgagggtgagtctcccacagtccaagacaggtcccagaccttggcccacccagcgaggacaaaggggcctcaggtctccaaacttagctcatgtaagagcaactgcccaccattgtccctgccatgccaacttatataggcatgaccctggcccagcagtgaggcaggctgagggcatggcgggctcaggcccgagagctgagggtggcaggtgcggagtagcgctggcgggcatgcttctcacagtacagctcgtcacccacccagaagtgcccgcgcatcttcaggttcagcccacagtcggcacaggtgtagcagccggggtggcggtaccggccctcctggatgcgcacagcctggttcgcgatgctggtactgcacttctcacaagtgtggagcttgggaggggtggccagggccctggaggcgggcagggaggactgggggctcagtgagctgggcaagaaggctggcgtgccacctctctcctcagcctccagggcttcctgcaagagccgaaaggagctggactgtcggggggccgcccgtccctcgcgattttcctgcagcatcttgaagacttccgagtcctcgtccaggaggaggcttcccccttccgagtccatgctgggcctggaggaacgagggcccggggaaggcggcagcaccagcaccgccgagtcgccagcgcggccgaggccggcctgtcggcttccagggcggcctgagtaggacaggcggtcagcagcggggaggcccggggaacatgccagactctggaagctgc

SEQ ID NO: 160020 - DNA, 1000 bp, Homo Sapiens
ggtattagacatggctttcgtaaataatgcaggtgtttttgtcatgtgtcactgctggctctgtggcttccaggtaagctggcggcagtaccttatctggtacctcaacaggtgttggctcttcagatgttagctcggtggacgtgacattggtagaaggttctgcagtttcgggggaatgttccgccgacagttctgtctcctctacatctttgacttcaaactgtccaccctcttggtcatctgcatgctcttttttggactgcgggtgaactgacaccttgatggcaatttgctgaggttgctcgtgcagcgatgaggcgtccgagtcagcggcaggggagtcgctccgcttcagagagttggggattgtgtagacctcatccctgtctgcggcctcctggccctctggagtatgcctcacaaaattctgcccctgctcctccagcccaaccacctccataatctcctccatgatagtcctgcagttcataatgagaggcggcagaggcacgctcctggcaagctcttcgatgtagcgggcgaactccatggttttgaactgggtgactttggcaagctctagagttttggcggaggtgatgatggggatgcgcttggcgatctcaaatgccttctgcagcttctctgcaccttcggtcctaaagaactcattgatggccttctcagtcttctttagatggctgctcatcatgcacaggcgggtgatattgaggaccatgacgatggtgaaggccaccaggcacacgaccatgtagtagacacccatgtctccagaagtgaagatgacgcgcaaggtcaccgtgttgttcacggtgccgtagatgttagaagccacacacgtgtatttacctcggtctgagaaggataccttggtgatgttcaggaggccgctgtcgtgcatttgccattttcctcctcctctctccttctcatcctcttcttctttcagcagcttgccaatggaattataccactt

SEQ ID NO: 160021 - DNA, 1000 bp, Homo Sapiens
tttttttttttttttaaattatttttattttttgatgaaaacaagaaatacggtagtgacactttatttttccttcaagcacatgggagaagacaaaagtactaaatgatcattgagtttgacagagaaattctactggtacttacactgcttaggaacataaatgtcaagtacattactagggcaagaaatatcaagtaagacaacagagtcgtatttttctttttgaggttattttcacaagacatagctataatttgtaaaatattcagactattgaaagatcacattcaaattatatttctaagaatagagccatatatgaacagagagcaaaacaagctaatacattaatgaatattcactgaattcttcatactgcacaggacacaaatttggtatttttgcacatgttgtcaattataagcaaaaagcaggcctgtaaacatcaattttgtcataggctgaaacagagaaaggaaatggattttactcaaaaacagtgacataaggagcatataccattaatcttccacacatataaaggtcactcctaggataattgagagaaaacatcgacttacattttgtttacaaaaatctactggtgaattcaaggacttaggaaaaattgaaggaaaatcttcctccaagcatgctatttaaaccccagcccctcttccctggagagcacctcaggggcctcccctcccacccctgatcctgcaggttctttcctgtgagcctttccaaacccacgccacagcaggctcattcctgctctggacttttactcagtttcccaacctagattaacctctccactgtgtgtgttcagacctcctaaaccctcaggtagcttagggcaaggccttcaaaaccaaaggggaaaagggtgatggtggatggtctttatcaccacacatgatcataactaagccttgacggcatcactgtcccacctactggaacttgtccgtgaaaatccacacagatgctg

SEQ ID NO: 160022 - DNA, 1000 bp, Homo Sapiens
cccagctcagctgtgaactattggatttgagacaggaacagaacaaatcagagggccaggggagggttgtgggggagacagagtggtttaaataggggaggaggggaagttcggtgatgggggagggaggcaggtatttacaagaaggctcagggggccagaggctcatcttggaatattttataacaatataaataagattctggtttgcttttccttttcgtctcgtaaaggagagagaagtgcagagttcgattctgtacaagggggcagcggcagaaggccggccgggcgggtcactgggcgtccacccggaaggacagcagcttctcggaatgcatgttgttcagggtccgcaggtccggcagcttgagcagcagcttggtgaagcgggaagtctccaagggccggttcttcagcaccagagcccgaagagcccgcagcagcgtctcctggagctgctccaccgaagcggaattctccatgcccgagcggtctgcagagacaagcaccaccgcggtgaagaggcccagctcctcctcggtaagcgccagggagttgagcttctcgctgaagtcgaacatggcactgagcaggtctcccatgcccatggcaccaagctcctgcaggctgtaggtggtgcggcttaggaacatcactgtctggtccttcacgttgaacaacgaagcaaagcgcaccatcagcacctcaaaggtgccagccttaagcagggtgacttggtcatgctgagaaaggtcacggaagcccgggatgtgtttggcaaactctaccacctcccgcacagcgggcgtgaagctcatggagaaatcctcccagatctcctgcaccgttcgcccactgcgtccatgcgggtacatgttcataggacatgccagcagaacattctttgagttgccctgccggggactgttggcaggtgccttgccttctggggctgcatacacgtgggtggggcatagacggtgcccgttgctgttgg

SEQ ID NO: 160023 - DNA, 1000 bp, Homo Sapiens
ttttttttttttttttttttttttttttttttttttttttttttttttttttttttttaagctcccaaatcattatattcttttatttatagactctgagagcaaggacccaagcacagcctggtgctcttggatagagaagaaagcagctattgtccacactcagaggttgctgaggtgccctcccccactgatctggaatgatctacactgctagtgaagaggagggatggcaagctgactaaataagaaggcagggaaagaaagtccgctttagttctgagggctgtgacattagatgagagtggagccctgggcatgtcagccagccttctgtgtaacgcccgcccaggtcccattgtgtctgttctcttggtcctccactgttgcccacatcttcctccaggctgcttaagtgcccctcctggagtgcatgagtaggtcgcgttgcagcccagcctccaggctggaggtcagtctggctgtgggagggtcggtcagcagagtcaatttgttgaaaacacctctgccaaagtagtcagcaatcacagaaaagctgtcattggagcacttgagctgatgctggaattgatcatggagatctcgtttctgttcctgggcccggatcatatccatgaccttccggttttcagggaggcaggtggggcagtcagcatcactttccgagtaactctcaaagcagtgttggtggaaggagtggccacacaggaagtggactgagggcaactccaaggcactgttacagatgctgcacttggtcttttggaaaatcttaggactggccttgagctcttggatctcctggcggatacgggtggtctcctctcggtaccgccgcacccgcagctcatcctgtgcaatctgctggctctgtttctgtagtttttggaccaggtagtccctgatgacggagagtgtggctgtggagttgtgggccagggtctgcaccactagaagaggtggcatgaggttcttgttc

SEQ ID NO: 160024 - DNA, 1000 bp, Homo Sapiens
ttttttttttttttttttttttttttttttgatgcaaatgtttttatttgccacttaaactacagtttccctgtgctatcctgatggtgtgggggtgtggaacaggctgctggaaccatggtttacagtagtagcaggtagatgattagtagcatgagtggtgaaatgctgcatctaagtgcctgtcactttgctcccaggggaatatcatgcagcccaggaatagtgttagactgggaaggactgtggcaggaacagtcactgtctctcctcattttggtgaggaatgggtcccacataatggagagctcaacagaagcatccagtcttgttctgaatggagcaggtcagtggcagcagcctcttgctttcatttacccctttgggctgcttgcctaaagtctctcttccttcacctccccaggccttttggcaagagggaagacactgccattcctggctctttccctggatcagtgtctgatctggtggaggtagcttgtggggcctgacttcctccagttccggcggatcctggcacttttcttcctagagtgcagatactgctcactggaggctgtctctgtggcactctgtgggttggccagtgcagagtggggctccaggattctgaggcggctgcagtggtgtagcgagtggcccaggggtttctgccttgggggcctcttcctgcgcagcctcttgagggcctcagccacacggtggtcccctgcacattcccagatgatctgtgcccgttcctcggccagctggtccccgctgcgttgaaacaggccttggatctgcagcagctcggcgtcctggaagatgttggccgaggcctgcttgcggccccgggcctcaatcggggcctgccaagggggtggctcactgaccaccgaggctggggtacccattgtggatgctcacactgaagggcagctccgacagacctcaaatggggatggggcaagctaagatgcgcccactccaacctctt

SEQ ID NO: 160025 - DNA, 1000 bp, Homo Sapiens
agtgcaaacaaacatttattgtgaaatattcatcctaccctttattaggtattacatcatcaaagcactttgtggcaatgaaaatagctttttttacccctctaattcacccaatattccattaaagctgcaaaaaatgtgcaatctgcttgaaaaataggttgctcttatttactcatttgtgaaaagtcaaaaattaaaaaagaaaatgatactagcatacagggcctctagagccaattcacctttccatttcccaactactccccaaaataattaacaaagataatttgttttaaatgcctttttataaaaccaatgcacctttccccatattataatcatacaaattttaaaaagccgttatttactttcttggaaaaaaggtggccagccgttgttttttgattgggagcatgtgtatttcctgggagttcactttctttaactttatgctccggtttttgatgggtttcctaaggggctctgcatttcccatggactcttccccttggctgttgatgtcatagccctgaagcacggagtcttctcttttgaaggagaagtttttggtggacacccctgagaggcctttgatcttgccacagaatatggtaggcacagcatcttcgacagagacaatgaccttggccgcctgggactcgcccaccatctcaatgttattttcagccttgacttcgccgctggggtggttgggctggctgagcatctcggtagcagcatcactgctgctgatgtgactatccatcatggctggggcctcatgggacgtggcaggggcaaaagaaatttccatgccactgggaagtttctccatcactgtgtgacctgagctgtccactgatgcaccactgtcatacagtgtctcagggggaggctcggatttccggtgggctgccactgacaggtctagggctgcatcttcctggaagattgggggactgacttcaccagccttgagccagggcactgacttcat

SEQ ID NO: 160026 - DNA, 1000 bp, Homo Sapiens
ttttttttttttttttttttttttttttttttttttttttttttttttttttttttcagaatccaaaaggactttattttctggcactgggaggcgccctgaggccacagccttttcccagggctgctggcagggtcccagggctgctggcaggggttgtggtcctgttgagcagaggagcgacgccgctgccctggcccccgctgtccctatgatcctgcactctggggtgggagctacatatcatccttggacaccaggcagtagaagtctgtgcgggcactgtagtttcgcgagccgagatccgagacgtccacttcgctgctccggctctctcccagcgagaccccactggtgtgcggtggagctgatggctctccaaaaacaggcccccggacacccaggtcgccctcagggtccgggtccacctctgagtccagggcccggccctcagggactcggcctcgaagaatcagcatggggtccttgtcgtcctgcagctgcgtctgggggtctccttccaccggcctgtaccgcaccttccgcggcagcgccagctgcacttctttccaaaaatcggaggaaggagtcacggagccgggcctccagagcagcaaggtcaccaggtggcggtgctggcgcagcaggcggagcgccgggtgcgcggggtcgcgcctctggccctcgaaggtgatgaagatgggtctgcgggtgagctccagcagccggcacaggccctcccggaagctgtggctgcaccaggcccggctcaggaaggcgtccgaaagcaccacgatgaggcgtcggcagcggctcaggttcaccaagaggtcggcggagggctcagcgcgcggcaggaggtcgcggtcgtccaggaagagcttgtagccccgacgccgctccagctgcggctttaggatgaagttcacgaacttgcggtcctcggggcagtcgctgtaggagacgtaggcgtcgtagagcttcccgtcgtttatctcca

SEQ ID NO: 160027 - DNA, 1000 bp, Homo Sapiens
tttttttttttttttttttttttttttttttaagcttctcaaaacactttttaattctccatttttcccatcaagaccaaagttgtacaaacaggtacaaaatcccccaccttcagggtgtgaggcatcactgtgtgtggtcaaagtcccatctcctcccctttccctttccacgagttttcaagatgtggcccagtcagtgcattgctgccttctatgacctatgaaccatgggcagcaagaggactggtgaccgggggacatggtgaggtccagtgtgccaggaacatggtaagtgcccacattgcgggggagggaacaattcagagacaggctcagctggaggccgcacagaggagaaatgtcactctgtcccatcttccctgcattcagctgagctcagaccaagtgagcacctaagaatcatttacccccaaaggatgtttcaagtgagatgcaatgttctctaaccattattctctcagaaattaggggtggcggggcgggaatcaagcagatgtttgaattgcctttcattcctccatagttgtctaattgtctggctcttggtttttatacagcagaaataaaacaaaatggcaataaaccaacctacaacctgtgtacaagatacagcatacaaaactgtcccagggactgggatcaaaagacttctattcctagccctaaattagaggttctgttttggttagggaagtttgttgtaaacagcagctgagaagccatttatttgattttggcaatagagacagacagcaatgcacatacacttatttcattgaactgtaaacggataaggtcaggagaggaaaaaccctactgtttatgtaatagaaccctactaaatggttttggaagggactaaaagttaggtagcagcctactttcctactttccaaggctggaattatatatatattgagtaataaatcaaatattagtaatccatccacttgtttttcagagtccaacaatttga

SEQ ID NO: 160028 - DNA, 1000 bp, Homo Sapiens
cagtttacaatgcataatgatatgtctttatttcatcaacagaaatggtgtctagacaaaattcagttaacactagcaattcaattgagtgaaaactttttttgcacaatagtgtatttacaatgagtaaatgaagttccaattccattagttcatagcaatgcttttttcccccaaaaggtaaaattcttagttacagagaataagcatcaacagcctttcattttttacaataaaaaccacgagaaaaaccacaatcacttagaaaaaaataaggacaagcctaagaactagtacaataaaatgatgcattgaattaaattacattaatcgcatagaatctgtgtaaaaagtatgtagaaaaacacctgatgtaacctgttacagtcgttgaccagttatgagaggtacagagggttatacaggtagatatgtgtgaaaactgtccgtattgttcaacctggggaggaagagaagaggggctgcagccccttgcatacactgagaagaccctgttttgaatatggcctctggagtttgtaaggcatatattagaggtgcacttgcatcagactggttctggaacaaattgtcaaattgtcacaggctctcttggcctcactagcaaaggtggtgcttgccttgaatggctcactgtgtctaacaagcacctgaagctcccaaatgcatatggaatcttcctgatcactcactagaggtgccatgtctttatgtcagagcgtgaaacgggcatcccaggatttgcacacacaaaatacattgttaggacttaaggggaggtcatagttctgcctccaaacatgttttggtagaagactgagcatccatctgtaggaaaacccctctttgtccaagtcccttcactctttcgcaacatatgcgtctgattattcccatgggagcacttggcactgaatgtgagtctacctgaaatgaatggtcttggtgcacacttctgcttctaagaagggccagtgtt

SEQ ID NO: 160029 - DNA, 1000 bp, Homo Sapiens
ttttttttttttttttttttttttttttttttttttttcacaggtaatcaaaaatgttttaatgattactgtttagacatttaacaatgtaggtatatccaggtgagctaagcacactttgacagcacactattgaatgttatagtttctgtattgaaatatgtaaagacatctgcaaattagtacctagcaatgaagacatacatttataaatatacacattctaggtttgataaggtaaatgtaaacagatgccatgactccttttcaaacagaaaacccacaagactaatagagaaccaataggctccctatagtacgaatgtgcaaaattaaagcatggtaaactgatatttacataaatatcaaaccaacaattagtttatacattgtcaatgaccttctaagatatgtcatgagtggttccaagaatatctttcccccaatggagaaggtattcagaggctaaattccgacactttaaaatgacacacatcataggctttacctgtttgaccactgcctcaaatgtgtgagatgtgattttatgataagcagtctattatttttaaacaagaggttctaaacacatctttagattctaagcagaaagaaattacaagtactattagatttacattaaacaagttacctctatcaaatttctcgattctcttatgctgtagctatatttgattttaccttaaaaagttctaaggtcctttccccccctttgttaattttggtaaactaggcacattttacaaggaaatctgtgtcaaaacagataacagtgcataaatcaatccaaatttagaccctggcaaccagttccccattgctcatctacgggactctgtcaaacggtaaataggcaatcatctctcttgaaaagtatacatcctctctcgcactggtggaaagcaaaattgactttttgtttgctgtataaaaacacttagcacttcagaaattaaaaatggcctactcaccctacacc

SEQ ID NO: 160030 - DNA, 1000 bp, Homo Sapiens
ccacaaaaatatatttaataagcttgttatataaaatcaaacacttaacattgtcaacatttcttcagttattcaaactcactgatatctaactgggagtagtttgtattctggaagacttcctaagctaaaagtatatttacatatttacaacacatgtaaatataactgaagaactacttcaaataatgttgaaattcacagaattctagagatttatagttatagtttagaagtatcaccaatttgtttgcaatcaaatgtacagcactaattatgaaaaatgttttaactattaaaccaaaaggggagaaaaactgggagggaaatatatggtgttaaagtcctgtgataaatacttagaaaattaaaaagtaataatatacattcgatttaatgaccaaaaattttttttgaatccctggttgtcatttttggtagcttaacccagtctgtcagaaggcagtatgctatgctgtcaggaactctccactgcctcgtcagagccatgctaaatgcagtaacagcactggctgaaaataaggaagatgatgttagcaactttgagtttcacgcaccttcccaatacaggctaagtattcctgcttatatgtattcctgaaagattaaaaggcccgtcacccattcataccaaaaaatactttctcaacatgctttaaaaggattccttattttgtttttatttttttattttttattttttgagacaaggtctggctctctctctctcaggctgcagtgcaagtggtgcgatcttgaccctgcaacctctgcctcttgggctcaagccatcctctgacctcagcctcccaagtagctgggactagaggcacacaccatcatacccggctaatttttttgtattttttgtagagatggggcttcaccatgttgcccaggctggtcttaaactcgtggactcaagcggtccacccacctcggcctcccaaaatgctgggattacaggagtgagccacca

SEQ ID NO: 160031 - DNA, 1000 bp, Homo Sapiens
ttttttttttttttaaactcagtaattcctttattttgattttaaattaatcacaaccatcgaagtggtaagaaacagctgacaggtgtacttaaaaatactgaattgacagctacattgaatgcagggtttcccagggtagttcttattttgtcacttactccaattacattcaaggtcgttatgcctcatctttttcctgagctgtggcagctctaactggggcacccagagagatacataccaggtaatctccacttctacttttctggtagcttggccctggcaaaatgagccccacaatctagaaagtaggatgctaaacaaagttgaatcaacatatctttttagaaaatatcaggttagagaatactcctgaggacctgtttctaaccagagttgacaaatgtgaaaaatgcatcagctagacagcagtcatgtgaacacagcccggaactgcaagtcaaggaaatgggttctgggcctgccttcccaggtaaccaaaaccattattcaaaagcaactactgaaatgccagcttgtggggaaagaaatgggaaaggtgataaaatcacaattaaatgcatgtatatacatgaataccaaagctattatgtagaaataaaatcaaaacactttagaccaagaagaaatcagagacctcctagtctattgccccagtgtaaaaattaaaaaactctggagtaatcattgccattaagcattagtatgagggaaataattttaactctgaggaaaaaaaatgattttttaacattttcaattttatatcaaattagatactgatcacatatatcataaaattaataaatcaagcagatttttctactccataattcatgtcacatttaatagtctcttcacggattctttgtactgagaaatggaattttcattttcctcctcatttttaagactaacaacagactttttgtactcttcaatttctttagtaccaaggagctcttctttatttatt

SEQ ID NO: 160032 - DNA, 1000 bp, Homo Sapiens
ttttttttttacagaaagatttagtatttcattttattcctctacctacaaaaccgattcaaattgtcgctggattagtaggtttgaaacttttctgtgtattgagcacaatcttagtactttattcttgaaatataaataaatttttgattcaaagtaatgcactctaatttttaaaagaatctacttggtcaggagtgcattgctttgctggtgtctgtgatcagctggagatggtggtgaacagcctgtttgcatttcttggaagaagatcttttattctgaggctcaacccaggtctctgccttccttagagactgaggcccatccttcagttttcctgattctggagaatggcccgcagcctcccactcaggtcttggctgtgctcatctagtccatcccagggctggaagggacatccctggtggtccacaaaggtgtcccagcagtgcttaaattcactgtatgtcattattgaaattttggccccagcctcggccagggtgcgcagcccctcctgacatcttccttgatcatcatagatgcgggcagtgaagatgcacaggctcacgtgtttgttttttgaaatgaatttagccatttcctgggcacagctgaagcaggggctccaggaggtgaagcaggtaaccctgtagtcctggtccaggtccagcttccaaaagggaatcacgtccaggaagcacagctctgcatggcggccttcaaggaaaccgtgtttatgtggagcctggttgcatagaaagcccctgcgctggttcagcaggacccaggtgtcattgtgcatgcgctccacctcataacacaggtaagtctcatgccgtcctctgacccaaggttcattgttaaagttgaaagtgaatgtgggtggatccatcgagtgtctgagaatctcccccagcatgatgtgcagtaatatataatatttaggcagattattccaaggctcaaatagctctctttggctgtacacgaactt

SEQ ID NO: 160033 - DNA, 1000 bp, Homo Sapiens
ttttttttttttttttttttttttttttttttttttttttttttttttttaccattttagttatagtttatttcataccctaaggcaattttatcccaaagggtcacctggtgaagtcaagtgctgttgagataaaggctgtggaggctgctggagcactgattccagccagtaggcttcctggtcccctcaaggcacctctactctcagtgctctcagagcccacatgggatgtccctcacacctggcctggaagccagagggcaggaagccagcctcagcctcagctccaaatacgcagacaagccctccccgctgcagccacaccaaatggcaattaagtcaaaagctgggtagcagagggtttctgggccagagtgcatggtgtctctggatctacttcccttggtcatgtgtactggggggtagggaggcacagacacccaggcccctgcctcaggtccagcaaagctgaaaggatgagaacagaggaaaccaagaagcaggcaagaggcctgggacccagggcagggtcaaccctcctggctgcttacctgtcacttgcataaagggatgtgtcaacttagcatccaggatttcctttttcccaaaatgagacagggcattgcagtaaatgctaggaaagctctctggcatatatgcatgcctagttttaacttccattgatttgacatttactacgttccaggcactcagtggcatgggtattctgcacacaaaatttcactgaatcctctcaacaactccctgagggtaggataacaagatagctgaggtaagtgaaggtcaggaaggctaagtcctgaaccaaactgccactgctagtaagcggcagagctgggattggaactaggggctgtctggcttcagatctttatccttaaccaccatgttatacggggactaaagagtgccggtgagttgtgaacccagacccttccccagccacacctggcaacaccccctgatctctgggacc

SEQ ID NO: 160034 - DNA, 1000 bp, Homo Sapiens
caggcgcttaaaaaatatttattattgccactattcattacagatgaaaaaagttttgtacacaaagtcatggagcagcagcagggctgggtcagcagcaccccagcagccataatgaagctggatcccattcccagcccctgtgcagcaggttctagccctcaggaccattcagacaccttcactgccatcagaaactagtataggaaataattgggggtgggaggaaagcaggagtgaattcaataagggcttaacaagcaatctaatgaaagcaccaaacctaaacaatgatttttttctctgaggtaaaaatacgcagtttcacaatcacccccaaacatgtaaaagataaaaactttccccgggaaacgaagagccaaactttgagttttacacaagcaaccgggagccaggcaggaacttgttcaggggccacaggttgctctcgcccacgttggaggtgcgcctctggcattgcttgcagcgccgatacttctcacactggtctaggagaaacagcttgtctgaagcccgttcaaaagccttgtcctccaggtctcgctgcttcttcatcgcagcactcctttcccagtcctcctgtaagcattggttgactctatttactcgctccagctcagcggttctgtctgccaagtgctctctttgtgtcctctgaagcatttgcaaatcccgcctctggtccactagttgatgcaggatggctttcctcttgtggttagcagctgcctccagctggtgtttcatgtaattttgttctcgcttttgcttttccaccatcagttcaccctcattcttaccaaagatgggctcagaggagtctggctcaaaggggggcagccgagagggtttgttctttatctgtgcatccaaagctctcttgtaacactgtgtttcttccatcttatcttttaaaaatttcgctctttgcgcagcaagttcctctgtgagttgcacttgttccaggcggtccatcaac

SEQ ID NO: 160035 - DNA, 1000 bp, Homo Sapiens
ttttttttttttttttttttttttttttcaatggaaaaattttttagtaaaactggaaaaggctctataaaatgtcctgactccagcagtcttgaggcagcacacaatggcatcagtgtctaggtggcaggcactccgggctgacagcttccttctatggctctatgaccaagcaacccagcccgaggcagctcccaccagtgaggccctgatattgcagggctaagcacctaggatccaattctagtacatgccacctcatgctaggctctacaaagtggggagcagaggagcttggtacccactgtatcaccctttgactttgaaagcctaggctggagtttcgcatgaagtccccgattcccctccaggttcatgcggcctgacctcactgccttgaatctgacctgctcattcctacctcagggcttggatttccttttctctctgcctgggtccccttcgccggatgttcacgtggctctctccttctagttgtttaggccccagctcacatgccctcggctcagagacaccttttcagaccacttatctacactagcctgccagcactctatcgcatttctattttctttacagcatttttcactaaaactaggttttctgctaatttgttcattgcttgcttgtctcttccgccagaatgcatgcaggcagggactttatctctcttttcagtgctgtatatacaggacctcaaacaaagcctgagcaacacagtagtttctcagtagtctgctacattgaattttctcactatggaaacctgctctaggttaggcccctcagactgagaagggcacacagctcaggaccacaggatagaggagcccttgcagagttttatgctccagcctatcctatcaggctcatttcagtgaccagctctgcacggccttcactttgaacgcttggaggtgtctggctggtcgggagtgggggcctggcctgagcaaatctcagagttctgtgtcgtagc

SEQ ID NO: 160036 - DNA, 1000 bp, Homo Sapiens
ttttttttttttttttttggatttttccaaacaacttttatttcctcagagtcttccttaatcctatggaacaagaagctgccactgaatagggcccagtataggggcttgcttttctactccctccccccaatataaaaatatagacttttttttgtggtcccaaaatcttgtgctgcggagggagggaaggggtggcaggtccctgttttgttctgtctcaaggtgatactctgtaatgccttggacagcgtggctggcattccaaggacttaacggctgtcacatggaatcagcggcctggaggggaactagcatatttcccactgttaccccatcttggggctatatcctgggattgaacataaaggcattatcagacccggggagaaacagtcagtgggggagatttagggacaaaacaaacctcaggttggcccaagggacccctgctgtaacaattccaggatggggagtcagatagactacaggatataggagaaaaggcaggggcagagcggggccgtgggggcctggcctgaggcagccctggtgtagcagagcaggatcccagctccagctcactgctctccctggtccggggggtaggggatgtggggcctgaagagcctttcatccctctgcgagtcggcggtgagccccggcccaacctgggcctagcctggggaatccgggacccctcctggcggaaactctcctcggacaggtctgcaatcgagtcttgatgcagggcatccgagctccagtccctagcagacctttcccgattaccatgacagcctctggtttgtctccagaggacaagagtgagcaactgctccctggtatgttgaatgaatcaggcagtagacaggagcccagcttgtgtgaggaggctgggccagaactagtaggagctggggatggagcgaggctgcctgcaggacgatggttcaggggctgctgctgccgtctcctgtcctggcttcggggctctctg

SEQ ID NO: 160037 - DNA, 1000 bp, Homo Sapiens
ggacttgagctgcagagcactgagctttatttacaaacttccacagaatccctcaccctccaccccagggtcctccctctctggaactcaggcagcagacaagcttgggtccacccacctgcccaacctaggacagctgggcctgagctgggcgggcaggggattccatctcctgggtgcgcctgccagaggggagaggctggaggcggcgggaatgctgttctcccccaggagtcagtcctcagggcttctgccgtgggacgtggggccgagggacctggggcactgaccaggtcggggtcgggggcagcatctgcattggtgaggccgggtgaaaagggctgctggtgccggacagcttctggtgctgggcctcagcggagacagaggaccagaggtccaggttcctgggggctgagcttttctcagacttcggaggaaaaatgtcccagcccagcaggcagtgccggggcagggccagtgtgtcagaggcgtcaaagctctttcgccggtggatgtggtaccggtgcgggggctccaggatcgacagcgggatgctcaccctgacgtgcgctggctgcgccagggtcccagggccctgctggtctcgcggtgtcctgcacaggcggcagggggtaccgggatccacaggcaccgggaacaggcgccggttgacacggtaacagtacacgcattcatggtcttcctccacgccgctgccactgctctcacgcaggcctggcaactggggttcaggatggctgcagatacactcctccttgttggtttcccgaaactcctgcagcttggagaagaaggcctcaggctggctggtgatggaagagctggtgtccagagaccctgcaatccagtcatagcccaggtatggcctgaggcgccagctcctcttaggaactgcagactcctcagagaaggtcaccctgggcttggacagcttgctctgttgagccaggatggacctcggggtctgtgcctcctg

SEQ ID NO: 160038 - DNA, 1000 bp, Homo Sapiens
ttttttttttttttttttttttttttttttttttttttttttttttttttttttttttttttttttttttttttttttttcagcccaaactcatgttctcaactttattccccatcccagtggtggctcttctgtacagtggagaaagaagggggaccccaccagggctatggagagacagtagaggcaggactgaaccgtcagcaaagattaaaaggatgacctgaggctggcaaccacaaaaccaagaagccagcgggggctgccccttccaagtctcaccaatgacccagagcaggttccagagcccaaaggcccaaaagtgcaattcccaaaagccaaggtctgggagccatcaaggagctcccagagatccagcgacgctcagagggcaagggtgtctttgatgagcctgcgcatggtggtggtgactgaggtgcccagggcatcagtgatctggaaggagatcttgtacaggtagggctgcacgtcccgcaagcctgtgtcaaacacgttatccacctccgactgtgtgggcatcttgggcaagtactcatgccgattcatcacctccacgatgttgatgatcttctcgcagagtttctcacccaccttctcccggcagatctgccgctcctgctccgtggccagggctaccacatgcaccttgaccgtccacacttcccatgggatgcactcgtctgagaatggccagcgagacttcttcttctggtagaactccaaggacatctgccccagcccatcgccaccagagttgcgcagtgcatccttgaactccccaacaaccttgcgcagggcacgatccagttcctcagaagagacacgcacataagtgaagtcgatgaagtcacagtcaacatcctgggtgcccacggtgccaatggagtaggtgccctccttcttgtagtggaacttgcctgtgctgcggtgcagaagcaccgtgtgcagcacagccagcatggcctcctccacctgccgc

SEQ ID NO: 160039 - DNA, 1000 bp, Homo Sapiens
gccattggtttaatcttttatttggaacaaaggaaaaaaggactgacaccagtttagcctttgagtgtgcagagctctgccctccctcccacccctcagccccaaatccaagatttcatagccctaacacccacccatgcagcttccctcacacatgccctttgttttcttcctctcttctatggttccttagggaaagccttctttagggatgaaaagctaactacagcccagtctggcctccagcagcccagggtcagctcagcctccactggaggcgagggaggagggcaaagggcatgggagaggtagggctgccctccaggagccttccccttccctaggagccagtcaggattggggaggaaggcagaggggtcctagccagctgtcacatagaggaataggggctgggagtggggatgacaagaagtacaaagaaagagaaagtttggggagatggataacaagctcagctgtgtcagtgatgtggaggggaggtatggtgggggaccagccatggccctatccaaccccaggctccacaggccccaaattggctttgcaaatccaaacattttaaggaagtggtttagggatggaagagaaacacggtagaggtctgtgctgtggattttcatctagggtggtgggaacaccagagatgtctcctctgccattgttttagttggctcctggacctcatcccagcagagggagggtgactgtcagcaggtcagtcccaccgccactgtccccctcgcagtgggcctctgtgtctcaggcctggccaggctccctgcccctcagagctcctcgtggacccgctcctcgtcctcatctgacttcagcttgagctcgtcgactgtgatcttgccgtcctggttgcggtcctggttctggaacatgtctcctatggttttctcagggtcctgcccaggcatgaggcgtcctttgccctcactcacttgagccttgatgaaggtggagaactcctccg

SEQ ID NO: 160040 - DNA, 1000 bp, Homo Sapiens
catacgattggtttaatttttttttcagcaggagaaaaaagaataaagttacaagattcttttaatattttcacaatgttaaaactaaaactgagctctaggctatgtgtgtaagtaaatctagaacacaaaagggttaaataagattttctcttttaaagatacaagaatttaagctttccttacatttaacaaacttcacagaacagatactgcaggggaacaagccccaccccccaccccccccagctctaagtcaggaagcgaacatgggcttcgctcccccaggccagctcccctgggctccttcccatggctgcctccacgcagcaggcagaggagggggcggggggccctggggagggccgggaagggctcgcacagcctcttcgggaccagagcttggcggaagcctatggggggctgcctcactgaggatggcccgtatggtggccaagggctgtggcttgacagcagtggtaaacgctgggcagacctggcccctctgccctgggttgccctagagcaagacaccggtctgggtcctgaagcaagaattaaggctggggattttgcagcgggttccactctggtgggtggagggtgggaagagcatgacttcctatttcagtacgtcggatcaaaaaacatttgcagttgcaggtgttcagctgttaatttgcagacagagttgaaccatttgttgttttataaaaaggaaagttgctgggttaaactattccagtagcctatgtgtgggcagatccacgctgccttcgcaggggcctcctgccctcacccacctggatctgatgcggcactaggaccactgggactgctcaccctgcctgggctttcaagggaatcctgatcctgtccacccagccccagccccacctgactggtagtgatttcctaacatggggcaaccaggcccacccccacccttccccacctggcgtgcgcagttgcagctgctgaaatcctctgtgaacatgag

SEQ ID NO: 160041 - DNA, 1000 bp, Homo Sapiens
ccattttcttttttgttgttgttgttttagcacctgtacaataaaactgtaccatctccaaccagagccggccacggcgaggccctcctgcctttggatggtacatactctacaaggattgttcggaaaaatagcaattggtagaaaaataagagtgggagggacaatgccacagagggggcggggacagggaagcaacccaagctcctctctctctctcactcgacaaacccagcgctggaggcccagaggccagggggaggccaggtagggataccactcagccccaggcccccaggcatgagtggagcaagggctggagaccactttcctgcccttgcctaggaaacagctgacgcctggatttcacatccggcagtgagtcccagagccctctgcagattcccaaggagaatgaggggctgagggaggaggtgggaggagaggaaggaaaggggtgctgtgagtctcagaaggggcagggatgggggtggctgagggctgggaggtgagaggctcagtatcttgagacagggaggccagaacggggtgggagagtggaggcaggaacaaactcgtattgtgcactctgaggggggcagtgaagaaggcgtgaggaggggggccaccctcacccctcagatcccttctccacgctcctttattagagtaacttattaacccctcacctcacaatcctcccctccctgtcaacactaatctcaagatagcggggctgctgcaaagggcgggaatgggtgggtgggggagcaccaaagcctcaggatttacccccaagcccccagccctgggccagcagcaaccagcttcgttagtcacaagtccatgttcccccaccccattccacctcaccccctccccagtgggggaaaaaaacaccagggaatagctttgtcagagctcatcaacaaagaaaaagaaaaggaggtacagaaagtccctcaatacaacaagttgtctcaaatcgtcacagtgatac

SEQ ID NO: 160042 - DNA, 1000 bp, Homo Sapiens
agatgaacaccgttttctcttgtttatttaaatttgggagccaaatggtatggagaaggtaatgatggttttcaaaatacagtaagtcttcatttaacattgttaatagaacaatgaaaactccaacttttacgtgaaacagtgtatagccagtcctcaaataactgccttttgttcaacatcctttccttgtaacaactgatgagaaaaagtatggttttgttatacatcatttctcttgaagtacaagttttcaagaacctattgacaaggttaagtgtgggcttacagtttaccaatcttagcctcagattgggctagggcagggatgacaaaccaggctcttgcatgggtctttaaatggactgggcaataaatgaagactttggcctgtaaattcctaaatagcttctttgcttttgtcctttaggaatgcacagcctcattgctacaggccatcttatgtcagtagatccagacagaatggtcatcaagagagttgttctgagtggtcatcctttcaaaatttttactaagatggcagtagtacgttacatgttcttcaacagaggtgggtatgaaggaggaggatgggatctgattgcctttgtggtataaaggttgggtttacattttgtgggtaaatgtttcatcttggtctttaatgtgtttgattctaagaggatgtgctgtggtttaaaccagtggaactgagaacgaagtggggccggagaggacatatcaaggaacctttaggtaaggaaacacgggatttgagaccatgtctgcatttctgcagtgttgctaaatgactgttgggttggaagtcattgctttaaaattttctacttttaatttgaccgacttgttctgatgtctttctaggtacccatggccacatgaaatgcagctttgatgggaagctaaaatctcaagacacagtactgatgaacctgtataaacgagtcttccccaaatggacttatgatccatatgtacc

SEQ ID NO: 160043 - DNA, 1000 bp, Homo Sapiens
ttttttttttttttttgtccaccttcgcttttattgagtagttagtgttctcaagctggctcacacccatgcggtcagctggggcctagggtggctctttgcaaagctgaggggcaagctaaggaagccaggcaggtcaggggccctttcggccttctcaagcctccacctgagttctcgtcaatgccagtctccctggtatgattggggacattatcagagaaacatctaatagcgcacatctgggcacccacactctgcttcagttgcatccatcctcccaccccaaattcaactcctgacccaatacaaaagacttttttaaccaggatttcttcttgcaggaaagctgacttggaaacacggggaggtggcagggaggggcaaaaaggactctggcaagcagatccacttgtctgggtccctgcagtgaagaacccaagatccaggtacctcagcctggaagaaaccgtgcactgcaggtcttcccttctatcaaaactaaaagcaaggaacagaagtcaattgaaaccccaggtcatcctacccaccttctggcagtctctggataatgatctaaggaaataagcttacatttataattagaggataatttggagaatttatactatttacacggaccaccctgcaaagatcagggaaggtaagagactgctgggcagagaatggaaacaggctggggggttcctaatctcttttcaccattgcctttgttgttcccacccttcagctcctggcagggacagcagaggaatcagatactcttggggaacacaaggtcccagcagtggctagggtgtgactgctacttttgcataatcaggcagcagggagctatgaggagcagaacagtccctgcctgctgtcctcactcagaggcttggggtgcactgagccttggagtgcccgggatggtggacagcttgagcacaggggcaagggcagggctctactgtagctcaggaataaactgggacca

SEQ ID NO: 160044 - DNA, 628 bp, Homo Sapiens
aaaacatagttctttttaaagaactttaagcaatatttattggcaattatgtgttaaaccctgtgccagctatgttaagaaaaacatagaatgatgggttaccacaccccaatttttattaaaagtttacatctataaatttaaaaattcacgtacatgcttagtagtaatagtatgcatgagaaaaattcatattgttattaacatttgagatatttccaagaatttgtttaattttttttctttttgtttgtattatgaaatcacacagcctcctttgagctccttgaagggatttttgtcctctgggatgccctttaccagtggatcctcgccagatcgttcttcaacgtaatctcttacttcttcacaacatttggaaactagcattctttccagtgtcacttctttcttgagctggtcaacttccatcttcaatttgtccttttctgtcaggtcctcaatattgattactggcatctttttgcctgaaagtaaactgttctttgttttattttaaatatcccacgataaccaatttcatatgagctctctctcttaacaattctagcaatgcacactagccttgggattttaaagcttcttcctaatcttcactaatatgatt

SEQ ID NO: 160045 - DNA, 1000 bp, Homo Sapiens
tttttttttttttttttgtgattttgggttatttattttgtgcatctgtggcaataaatgagatctcagtggtggtatggatttgactgatctctgtaactgtgtatggcaaaaggaccggaaaatgaaaaccagatcccagtaaggggtagagaggggccaagagaactgaacatctgggctgccggagaaatcaaagtctaggaagtaagaggtaagagtgtactacaggggacataccccaatctctttgctccctccctcttccttcctctcccagagacccaggtccctgggactatattggatctgtctctgaagctgaaaaacaaaaggcagaggagacagtcggctctaagtgaccaatctcaagccagctttgtcagaaatcctaaataacaggagaagggtgggaagaaaggatatgattatttcttattccattttccataagaggtgagaatgacaaggacctcttttctaactcctcttgagggtgtgagaagggttagcaggaggagaagggctgggagctctgaggtctcctgtaagacctcatatctcacaggcaaggactaagaattaggattaaatattttagtgggatagctctaaaccaggattagcaagcaaagttagggcgcaaattcctggaatctgactgggaccctggcagtgaaagctgggactgttgaaaacccaatttaagtgttcgctactcatgttgagagtgcagggccaagataactagatcccaggacaggcagtttggcagtgagaacaaaaggaagacactgggaccaaggtgcctagatccctcgagagagaagggtgggtattgggaggaaaaatgaggactggggaaacccaggaggctgggttctggaatagcagcaagtcagaatttcaggatctctgttcgtcctcctcttcctcttccctctatcaggcagaagagagggaaggagggggctggagaagtagccacatggatacattt

SEQ ID NO: 160046 - DNA, 1000 bp, Homo Sapiens
tttttttttttttttccatgaatattttttatttgggggctgcctattctcacttctctccaccagaatctaagtcaaggatagaagctgattgcgcacgaagttagataaactatcttgcatttaatcaatcattacaaaaagtattcatgccacatacaactttgtaacacccaggtgcgtgaccatctataaaggggggaaacccaacctctatcccttttccacgtgggcaagccaagggttctgagggctcatccacagggctcgccggcctggcctcctgctgcgtcccgggatgtggaccactgacccagaggcttctgagtcctgagcacagataagggctcctttcaggcctttccttgagctgcacgtgaacctgtgtgggcaggcagcgtttgcaggcgtgtttacgggcaggcagcgtttgcaggcgtgtttaccggcaggcagcgtttgcaggcgtgtttacatgcaggcgtagcaccatgtgagaccactggtccagggtttcagaggtcctgctcaggtgaatcggctgtgttctcacaagttcacggagctgagtgggtgtgcaacatgaaatactagtgctgtgagggacagaagggacagaaagaggctgaagaccatcatccagctgagaaaagccgaggcacaggtatagctgggcacctggaagaagctctgccaaatggaatcctccttggcaggagtggtagtgctaaggcgagcagagtgggctacaggcaggtcctgcaggccctgggtagagctcatcctctgtctgtccattcctcccagaccccagcgtggtggagaagacacaggcatagtaaacgaaggtgaacagaaacacaacatccccattgtaggctggccaggctcaggccctggggtgaaaggagacaggtgctgccaagaccatacatcagtcatctggcagcagctcgagaagcatgtcctccacgccgtcaatcttgatgtggtacactaa

SEQ ID NO: 160047 - DNA, 1000 bp, Homo Sapiens
ccagtgctctggggagggcaggcgtcacccccttaggagctgatctgactcagcagggctgagaagtccatgtccgcaatggaggagaagtcttcatctcctgaaaggaggccattggggagccccggggcccccagtggagcaggagctgggtcggggggcctctgggcccctgtcactaggcgagttatagcctcagggtactccatcagcatgggctcagttgtgtggggggccacaggtatgccctggttcagcagctgctgaaactcggagttgtcgacggatgccaggtctgtgaacacagctgggtctgtgctgttgccaagcaaggcccccaggtcttcatcatcaaactgcagctgcagcagggcctctgacagcgttccttccccagcctgggtgggcttgggggcaggtggggccacagcctgaggagggcctggggctaggactgggacaggggctggggcctgggccagagctgataccatggctggagcaggggcaggggctggagcctggggcaggacttggggaggggccggggccaaggccgaggcctggctgatctgcccagaaggaaacaccatggtgggaaactcatcatagttgatggtgctcagggatgacgtaaagggatagggctggggtgctggcttggggacagaagctgagctgcgggaaggcacagcaatgcgtcgaggtggaggccgggggtcggtgggtccgctgaaaggactcttcttcatgatgctcttgaaggtctcatatgtccttttacgtttctcctcaatccggtgacgatcgtctgtatctggcaggtactggaattccatgggctcactgagctcccggtcggaaggccgccgcagctgcatggagacacgcacaggagcctgcaggctggggtctgcgtagggaggggtccggaacacaatggccacttgtcggtgcacatcagcttgcgaaaaggagcctcgggcctcccagcctggtc

SEQ ID NO: 160048 - DNA, 1000 bp, Homo Sapiens
ttttttttttttttttgctttgctgatatatttatttacatatttccccatttcagatgatggtgacaaaaagtagatggagaccccaccctatccaccccccaacaaattacagacacagatttcacttagcatatagaagcattggggcatgtccaaattcattccactgggttactacagccaggagagatttgatcttgggggcagtctgagcacctcaggcccagaaattgagctaaagagaggtcgccattctgggccttgccactggtgtgccagcagaggtgacagaagagaatcatggtgaactgagctgtctagccctatcatgtggtctagaaggtgacagtgggctcttggatagcttccagtgagatccacagtcccacagaaatctgtgactcagggttttcatctgcaaaatggggataagaatcctgccctaaagatgtcacaaggctatcatgaagctccaatcagacacaacttgtcaaaagtgctttgccaaagttccagtgccatacaaatttaagggaatttgattgattgattgtgatggttagagtgccccgggtataacagtggactggtttatgggtccaggggtcaagcaagtgatagaactccgacagtgtgccctgggtgggcaccaatcaatggcgagtaatgcctgttgcaaagccgagtttccttagtttcttggccccaggaagtcaccaaggcctagtgcctgggtcagggctaggggaagtcactgggaaagttacagaaagagtcacaggggtcaaagagaaggaagagggtggcatataaagcagggagtagttactataatcacacacaaaaatagatacccattggatgaagggcattgaattggtagtgcagacgaaagatggagccagcaaggagagggagatgtcacagcagcagagagagaggaatgctgtcccaaataggctctcttgctgcccccccctcttcctaaagggataat

SEQ ID NO: 160049 - DNA, 1000 bp, Homo Sapiens
tcactaggaaacaaaggatattttattccttttttctgttgttgttgaggatagatcacgatacagagaacagcaatgggtcacagcgcacggtttggttggtttccgcgggaacacagaggacaggaggggcgggatctgggttgagttcccactctcgttatgaccttcaacctctcactgttcccaagggctgcacggagcctgctgagtctccaacccacctcgctcaccgctctgaccaccgacaggcagagcaaaggatgcgggagttgcctctgctgcccatctaaggggacgtaggcagagaagcaaaggcctctgctctccctccatccatcccggtgtgctggccccaacggaacaggagtccttcaactattgcctgccagagacccaattgcagggactgtagtctgcatctggatgagctgggctgtagattgaagtctcagaagcagggaaggttggaaggggtagggtcccagagcccatggagttattgctgagaagatatgcaggggacacattccccaggggcagagtagaagccctgggcctggaatccccgggcgctctgtgaaggggcggggcagatggggactcctcgtggaagcccctgggaagaaattaaccacggaagggcatagcctgcctgacgtcaaacgctgggctcaccagctccttgctttgtatctccagttgctaagagaccttcagactgggatcaggtgggataaggaagcaaggtttttgttaaaggagtgaaaggagtccatgaagaatgatgacaaagtgctgcaaaccttcccaggtcccaagacgactgaagaccactgcccgtgctcttaccctacgcatccctaaatcaggggagggggctggtctcgggcaacaagcagcctcctaggagcagaaggtgatggagggccacgggggcagggaggagcagatggccatgtggctcagcccctgcctgggaaagcgagtccacagttca

SEQ ID NO: 160050 - DNA, 1000 bp, Homo Sapiens
ttttttttttcaaagactaccaaagtatgtatttgattttcacatgcaaacaacttaaaaccttataaatctcatgtcaactctgcatgatgccttgaaggaaatgacatacaaagtttgctaactgtgcaaaatattaaattgctaaaacattttacataatgaaataatacatgtaaatgttgaagttgacacatgaaattaacatggcataagaacttatcacatttcagatattttctttagtaacaagtttttgtttttatagttcctggtacacagcaaagtttatcacgaaagataaaaatccttttaaacaaatccaacaggaaattcttgaggcaccttctcatataaaacacaagatgaatgcaattatcaatccatctgagaaaagttttcaatctaaatgaacatcattttttccatttaagtatattttacagaactttaataaggcaagacaaatttgtgaaaaaagatgtagatacaaaaatgatgtaaactaataatttatattaaaaaacccaaagggataacagtggagatgggacagctcaaacaatgcctttttttaacctaaaacagaattgtgcacaagctgaagatgacaaacaacttctagactctgcacagttttggtttttttttttaacatctttatattacatgttttaaatcatatcaggaatgcaaactagaactgcacactacttcagtggaaaaaagttcaatattgtgcaattttctgcctcttaatagttaaaaagtggcagcaatccctgcatttgtgtttgaaacaaggatctgagaaactttatcaaaaaaggtaatgaaggcaaaaattggcagacatccagcatcttgtttctttttaaaacaatgtggatgataagtaatttcatgattaaaaatgaatcttttaaatgaatacattgtatctgacatttgcactgactgatttgataaatctttaagtaaacaacggctttactacact

SEQ ID NO: 160051 - DNA, 1000 bp, Homo Sapiens
cagcactcgaagagagacagcagtatttatttttgaagtgactcacaggagaagacaatatttaatccaaggaatgaaacaagaatgccaaattatttttgttcacaggagtcttgaatcgcatcaaagttagtcctagctagattgttaattacaaatgagccgagggagattaaaaacagacaaaccaatcaaccaaccaaacaagcagaagtagccaagaaaggtaagacattttattttacatacaaaaagggtgcaaactgagtcctttcctccccaaactggggaagaggtatacttaaagatcacatttgtgttttccatggtgccctaggaaatgggctactctgagatcacatatcagaacccattttccattttctccaaagaaggctacttcctctgcagagaagattttcctaatggtgcacaaatatctctcctggaggaaccatttcaaatacacttgaaattgacattcatgtttaaaaatactacaaatttcattttcacagctgagctttgtgaccagtgccagggtttatgaaacattatacatctaaaaaaaaaaaaagtaaaaaaagaggcatttaacaataatcagacacatccacacattaaaactgatttccactgctgatttatacattatctagttgtttaaaaatcgcaatcaacatcccaacatctttttaagagtacaatgggcaaagatcaaagacagataaataataatataataaattagagcatgtaatacatcctatgggaattgctgaatcaacattattttccattggggggtatatatttttggtttatctttatcttttctgctgttattttttttctctgcttgataaaatggggctcattcctaaagccagcttgctgagacactaatttcagaagctcacttgtcacttgtttaacctctgagaatactcaggaacacatggttcccagcagcttgggctgggtctttatggaagtgaaa

SEQ ID NO: 160052 - DNA, 1000 bp, Homo Sapiens
ccttgtaaaacattaactaaaagttattggtagtaaatggtgactgttttacaattaggtttcgttattgacaatgtcaaaaaaaaagcagcaatctttaagagttcaaattagtgtaaggaaggactgcaaaacaatctgatttttcagttgtaattaaagtgctccttttcttattttaagtaaaataaaattaatcatcagtcactggcaacaatcattattaagaggtcttttagggcaaaatttaatagtatgaacaggtttacaaaaatagattgatgttattttgaggaataatactgtaattttttctcaattcagtttagataaattgtacctaatatagaaaaattatcccaaattcaaacttgatataaaaaagggagagatgaaatgaactcagctagataacagatctggcaaaatataagaatgaaaaaaattctacacagggcacttatttcatatccagatgtaaaaaccattttcaattagtagcttatcttcctcctgtaagcaatcacagatttgaagttgatcatgcagtacaaagtcacagcagtcaaaatcttctgtttgatgcaacacaaaaagttgtttctgtttccttattaaaatgcgaactggttgtctatttttctttatcccatttattcgtattcacaagttaacaaatagttaacaatattgtaggtgaagtggggtattgctggatcaaaggctctagaagacgtctttaccgaccgaatctgaaggtttattgagttcaaccctcacacctttttcacctgttagatattttactttagctcgtgctctctcatctgcatcaaaataccaaacagttattgcgtaccttgtagcatatgctggttgtacttcatgagggttgcgacggtcagaccagaaaaacagcagtctatcaaatttgggttcaatgtcagcaaactgggctttgccttctggaaaaattcgaagtatacctccacttaccttg

SEQ ID NO: 160053 - DNA, 1000 bp, Homo Sapiens
ttttttttttttttttttttttttaacgtgtaacgtcactctttattatgaaaataaaatggtgatcatgagtggggcgaatacacagagcaactggctctttgggtggttatgtcacgtggcctgcaagttaacgttggcttcctggtcagccaggccttaggctggtgaaaagaggaaacaaagaggatgtgaacgaagacaaagaagacatcggagggctccttttaggagatttgcttgaaggcctctgcggggatcttgccctcggtctggagcatagtgaaggcctggccagctctagtgtagttccactcattgtcctgaaggcacttctgagaccactccagtttcatcccagactgggcagagaaagcctgcaccatttcctgctgctcctgggagagggagggctcagagctggaggagagtgtggacactgggatggagaaggcactctgagtctcttgggggctggcatccctcacaaacagctcgtcattcacgatgcacagactggaactgctgccaggggtagcaatgaaggtccgggtgaaggcgagaacagaaccctgagactgtccttccacttccttgaaaaccccattgacagaaaagcagagcatcctttccgtctggcaccacacgtccaccaggatggagctgaggtcatgctgagttttgggcaacgcactgagggagtccacaatgtcacgttttgtgcgcctcagcagttcccccttcaggtaggggtccttgagtgttttcatattcctgctatcctcaaagtacttgcacaagctgctcggggctgagtccttggggtcgaagggaatagccaaggagaagcaggcctcatcgtggtaagcaccgaggagaccctgtcgatctccagagtcatagatcgagtaatactgctgcaggaattgcaggactaaatgctttagggtctcagatccagtaaagttttccttgcagggtttcattgtctcagagctgt

SEQ ID NO: 160054 - DNA, 1000 bp, Homo Sapiens
atactaaaagtctgtatttacctaatttagcagtttgaaatgaatattgtaggtaagttttacatgatcatatctgtaaaatggaacaagggatattaaatcataaaataagactttccaacatttggtctggatactgaattagtatgacacataatattctaaaactttgctttctctatgctggcttttctcaactaaatgaaagcaagatatgatttttggatgcttaaatagtagctaggtattctcttattccagaacacagaaaaaaaaagccattaaatgtgccaccataaataaaattttgttactattttaagtctaaaaataacagtaatataatcatgattcattttacatgtttctgaatttatattatcaacccagagaaagtttatatcagacaggtaggaaacctctgacaacgacagaagaggtgaactgacaaaaaccatgctgagtggttctttacctccgctgggcactgagcagggaggtgccgacacacctggtcttgttcacctgcttgttttatgattttccggagcccctttcctgtcagaaccaggaaatgtacatctaatgaaaacgatttcccatgttaccaatcctctctttctgctcattaattcattcaatcttttaaggaggaatggggaatgggaggaaaaccaaacaaatcagttcttagaaggttcaaagttatattatcttgagttataattgtctgtttaatacaattacaccattttctcttctaagaaccatctcataatttaaagaatgacatggctgagaaaaatacttaggaagacatttttaggcgttgctgaatttaaatcatcttccaaatactacattctgctcctttctttattgtaatagtttatctgaaaatacacaaaaattaacaaattgcttttactatgcaactctgaaatatcaagtctgcctccaattaaaaaaaaaacagtaactacttttataacattaaggt

SEQ ID NO: 160055 - DNA, 1000 bp, Homo Sapiens
ctaataagagttaatatctttgcttttgagtttttttttccaaccttaaatattacatacatacaccaaaaattacatagctgcaatgtgctcaacagcatcctctcggcctggagcttcacattatcaaaagcttagaaaacttgtaaacctctgggcctgtctctgggcactaggagagcccccgccggccgtccccttcggattgagcctgcagtttgtaagcgaagggctgacagtaggccttctagtccaagagagggctggctcgcttggagttcagtgagctgcacgcctgtcccagtgtgaccatgtgatgggggaggggccctagcacttgccctggccttgtgcagctgctcttgcccccagcagcctccgacagaagagcaaggcacctatagctgttgctttccctgcagctccctggtcctcaactccatgtgcatgtgtgaaggccaccacctctcctgggcgtcacccggaacctagcctggtcccaacctctcttagagagcaagttcaacaggcctgagggctataacgtggtcgacaggccatgtatagccgggagtcagtgacagcagctacaactcccaagggatagtgttgacgctggaggactagggaggacctgggtggtggtggcagcaggagggtctgggacacagggaggcttgagttgaactaaacaggttgaaagggaccaggggaattgttggcgcaacccacacttcatgcaaggcacatgtgctctcctgcgggtctgcagggaaccggcccagagagccccgcggcaggccctggaacacccgcctctgacctgagaaggggcagcaagggagcaagtgccggacattctgctggggtgacaaatggaaaatcggcaacagggttccgattttctttgccacaggggacccgcctgttgaaagctcgcttcaaaatagaaacggcagcatctcaacacacttcttgcacttcagcatcaaactcacct

SEQ ID NO: 160056 - DNA, 1000 bp, Homo Sapiens
ttttttttttttttttttaaaacaacagacatttattcttccagttctggagtctggaattctgaagtcagggccatgcttccttctaaggcttgtggggaacctgtcccatgcctctctgctggcttctgctggtggccggagatccttggtgtcccttcccttccggctgcatcactccaacttgcctcttgtcccctggtcttcttcccactgcatttgtgtctattaccaaaactctctcttctcctaaggatgccagtcattggatttggggcccaccctaatccaatgtgacctcatcttgactatatctgcaaagaccctatttccaaacaaggtcccattcacggggatgggggttaagacttcaccatatattttgggggaacacaattcaaccacaagtagcatccaaacagcctgcttattctgttcttgtctaagcacttctgataaaaaataaaaaaatacatgtacagatgctttatccttttggtgcactatagagtatatccaggggaggccaggccagccccggccccattctcccgaacaagaaaacaaactcagcgatgtttgctcactttcctgcaggtccatctgtattttcatgcatgttaagcctctcattcaatttacattcatgacttctgtttttctatgtctctcatgtcctggttccaacatgtacaataagtgaggtgtgttttaagcatcatctcagccaggaaaggcttttgctaccattccaaagccaacatgaaacttcgaaacttcatgtcaacaggcccctgaaacctcctgagatgatacagagggagtgcaggggtcatatgatagatattcgttttcaagtacaccttaatttctaaaagttttccatttcttcatttgttttattttatgtacatcattaaggtcatacccttcatgacaggtacttgctgaaattgagactcttctcccttttgagcagaggtcattttctcttgacatt

SEQ ID NO: 160057 - DNA, 1000 bp, Homo Sapiens
ttttttttttttttttttttttaagaaagactctcttcgtttatttagttgatcccccttctcaattcctaatagtctgacacttattgccatgttttatttaatattttttatttaatcttttaattttaaaaaaaaacccattaacagtacattttggtctaaaatggtccctctgctgaaatgctaggtgctagccgtaattctggctttaaaaccaaaaccccaaatatttaataaataaaaattagaattagttgccattctactccaaaccagctagcctagctgaagagaagagggaagggggaagaggccagagaaaggaggaggcagtcagatcttagacctgtcgctacagggacagctgaaagaagtagcactaagaaagatcatccgagcagtccccagtacagcccccactttttggcagaggtagggtaagggttatgtgcaccctcctcctaccctcaattcatttgtgtcatagagggagaaagttaaaagctcagctttggtttctggcccaagttagggagcttagaaaggttagccttggtccagctttggcagaatgaggcccacagatgggacaataaggcacaaccctggctctggaggtcagggagtcaaaggcaaacagctggggccaaattctcagaataaggaatgtgaattgtaacccctacccacagagagctgagggagggcctcaaaagcagtagaaaggatgacttggcgggtagggaggaaaatacgaccgtccccctctaacagaatataaccaacgtccccctacctggggataggctggttagaatttggtttaaaggcaactgggtgacaagcaaggagggaggatgcagagaactctcctctcactttctcctttttccccagagcttaaagtgaccctatagcgcagggagcggggtagttccttggctttatgcattaatctgggaggcagctggaataatggttcagtcattcttacgat

SEQ ID NO: 160058 - DNA, 1000 bp, Homo Sapiens
ttttttttttttttttgctaaggtagatttattgttacacatggttagttttcataacgtaatcccctgccccagagcaactcaggactccatggagcaggaagcctgctcttggtcatagctcataccacagcaggcaggtcacgggggcatgctgtgctgccaagtcctccaaaggaagtcacaaaggtttgcatttggacatttaaatccacaaaatcaggagaaacaataaatgcacaagggctggtgcatatactttggttacagtgacgccaccacacacggtcacgactgtgcaaaaatgctttcaaatcattaaataaaaaagaactcacacaagctataaaaatgttgccacaaaaagcaaaactttcctctaagaaatattaactgactttgactatgaactaactccagatttgctaaagtacaagaattgtaccataaataattatattttgttcataagtaacattctataaatcttgaagacctagctcacaggcatcttgaaacatggcactgtcctacatccatgggacatttaaaggaagtaagtttgcacaccactaactgggcttttctctcattcttttttttaatcttctggcaggtctcttctagccattacaattactttgattcttttcatgtgaaatattaaaaacaaaaattaattcttaaccccggaactggtcccagtgtttattgcaatacaaacaagtgaccctctaattgacacaacaaaatgttacaaacattattgttaaaaaaaaaataccccttcagacgggtctgttggagtataatgatgaaagctaaacataattgcccgaaaataaatcatgtagtttttactttaagtggtcagaccagaagattctttaaacaagtagaaacaaactacttaaaaccagaggactcaagctgcagaaccactcctcacaccccattttcacaaaagtgcatttggctggttgtaggatatattaggtgg

SEQ ID NO: 160059 - DNA, 1000 bp, Homo Sapiens
ttttttttttttttttttaatcaaaaggattctttattatgtagattgtatcataattcatcaaaataattttataattaactgccatactgtcttataaatgatgccttctgaagttaaacataatatagattcagttttttaaaatgatctacttacaacatactaaacaaataatagaagtttttttttttttttaaagcactatctcctatgaagtctaagaaaggaaatcatgacaagttcctgatcagataaaaaccactgcatcattaaaggggattaaaaagaggcataaataaatctgaatagaaatatccattttcctgggttttatccttctgtacaagcccaattctagagttaaaatgatactgtggtttgcctctataagcaagaaattccttaacagcagctcaaacatcaccttaatgtccaggtgaaacatactcacttcttcacccgtggacactcacttcttcacccgtggacactcagagctcccgtctctgtcagacacgtgtcacctctgctaacacacccaggcatctccgggaggacagggaactgtcatcttctccaagatggttctgctccacccaacccaggctttcctaaagccccaaactccacaccggaggcaacgcctgatgaagcaacgttcccgccacagcatccaccttaaccttccaaatgccactgctgtgaagaggagccatcgcagatcgccatggcgacagagcccttctgacccaggggatccactgctctcaggcacagtccaaccgacacctggtatagccgattgtttttcccaaaggtccactgctgggatcctcctgacccgtggcatttcacgagccgtggcgggtctgatgagcgagtctctgacatatctagacaaaggagactatttaaaaccaattcatgctcttcattatagatccagatctgatttgggtcactgtagtcacaggccttaagcaccacgagacctccc

SEQ ID NO: 160060 - DNA, 700 bp, Homo Sapiens
ttttttttttttttctttgtacttaaggtttttaattacagattaaattcctttaatagtcaaatattcagattttctatttcttcttttgtccattttagtcatttttgtcatcttagtcctctgaatctgtcagaagctctgctcatcttctcatcctcctcttttccatccagcctcctcttctggaatggacaattcacttctatctgctttgcagcatgtaatatatcttttaagtcttcatttatactttgcattttactcttctccagtttttcattcaaaaattttattatcttcttccatgtcaggcccaaatctaaaacttgttcatgaagtttagatcgctttatctttaagtcagccacttcttcattataattatcttgcttggtgacatttgaaaaggaacgcaaggctcctgtgagacgaggtaaagccatctattattcaatcagtgatccatacagcaagaaacctgaaactctcggcctggctcacgcgtttcccatcactctgtcagctcctgccaccgcgccttcttccctttcggttttactttaacttcccacgccgggtgaggagctgagcgcagggccaaagatgcgagcgggcagctgtatcgccgcgccccgtccgccctccaagccgcgcttgccggggtcgcgcccagtcacagggaaccgcgtgtgaggac

SEQ ID NO: 160061 - DNA, 1000 bp, Homo Sapiens
tcaccttttcttcagcatcggctttagctctctggaatcagcgacgcctcccttaccagcttctttcattgctttcctactgttttccacaaactccatcagcactttatccatatagaattctctgccagggctcccatcattgtattttgtatcaatggcaaaacacaagaataatacatccactaccatttcataaatagacaggaagcaatgagcgactaggaaagcaaagaggcagacgatgatcagaggcagcacccatactgtgtagtcctgctggtagttgagcagcataatcccagctaaacctgtgctgcagactatcagcaccttgccaaggaataacataaaatctcctactgtgttgatggtagccactcgcaaagcattctccaccagaatgacaaaggcatcctttgctgaggtgcagaagttggtgctgttgatagctgtggctgtgtatgcattctgatttaaataatttaggcacttttcaagacaccaaaggcaacaaatgcaagatttcagcacacatcgtgcacaagcattttcctttcctttgagctgactgtgaatatacataaggatcattcgcggaattttgactaatgtgataatgaaagatccttttgccaccgtacctaggtggtaacgaataaggcgatttactgatgccaaaataggtgtaaatggcaaattccttttatccctagtaaaatagtatgttaccacagctcctgccactgtcatctgctgacatgctagaataaattcactgatccaaatcaggcccaccacatggtaccaccacatgtactgcagaggcccagaaattttgaactccacaaagccttgctcattctgaacaggactgccggtagtgccaagaaaaagaagtgtcatgatccagtacacccaaaacaagacaagagcaaagaaagtccagaagggttggaagactagcagtggcaagtgaatgaagaccttgccagctacg

SEQ ID NO: 160062 - DNA, 1000 bp, Homo Sapiens
gtatccagcaaacacatctaaacaaatcccaaacatccctctgcagttcttgccccgagtctcccggaacgcagctcagtagctgtacatctgctgctgctgctgctccgcctgcacctggggctgggccgcctgctgtgggggtgcctgcggctgcgagggtggcaagacgtcagtctggggcactgcccgccacgtgagcgggtgctggtcactaagctggctccccaggggcgtgatggagttgaccagggtcgtcaggttgatgaaatgggccacagactgtgggttcgaggcttccggctgggggtggatctggacgtcattttggcggttgtgcaacatggcagagccgctgacggtatcaaaggtcacggtcaggattgagttgtccagctgtaactggcgttcaggggtggtaaggtgccccacggccaccggctggagattggtaaactgagtcgcggccgcagtggtgatgggggtcacggtgatgttggttaagccgactgagctcgatggtgtggtcacatttgggtcacccagggtcaccactacctgctgaatgctctgtactgcggaattggtctcgtcgcctacactgcctgtgaactccgtctctttctctgagtattcgctgaaggtggcgtcctcgggcaccggagcacccgcctcctcttctggcttctgctttctcttgtgacttcgcttggcagctttcccgtgcttcccttcggccaaatcctcctgctccagagtcagctcaggctggacgatgccaatggaggaggcgtcgatggtggtggtctccgggaggtggtccaggtcatcgatcctcaccgcgagcacctcggggtgcttgcgccgcatgtgtcggctcatggaggccctggtggacaccttggtcccgcacagctggcagctctgcgcctccaccttgtcgtgtgtgagctgaacgtgcttctgcagcatgtactcggtcacgtacttcttgtcgcac

SEQ ID NO: 160063 - DNA, 1000 bp, Homo Sapiens
tttttttttttttttttgtcattgcttttctcttttctttccttttttttttttaaagagaccattccactttattataacatctggatgcataaggactcatgtaaagcagtcatacaccattatcattaaaacccatatggtaaaatacatacacagtccaacaaaaggctaatacatagtaaagcctaagcatactactatgtaatattataatacataacttggagactttagttagagtactatgttatctattcagttttgaaaacattcattaagattttaaatgcaaattcattccttatttggaataaaacaaagtcctctaagttataacaagtattggtcataagttttcagacctattcattaaattacaaagaacccaaagaattctgtgatgtccagtagaagtatgtaataaaaacattgcatatgtttctagtgtgatgtctttagcaattgtttactgaagtaaaatgcaaacatcaatctttcaaaatacaagatcagaaggtagttttcttcttttttgtctatttgtgaaatccatcttcatcacattttaccaaaaattgtttttacaaatatgtaaaagtacattagataatactaatgaaacacaggtagagttctagcatatgcagatcaatgatcagtcaaatcatcttctccaagaacgagattcattgtcctcttcttcttcatcatcatcttgaagtaatgagtcatccaccaaagactcttcctgaaattcttcttcatcaggctcaacttcttctgtttcaacagctgaaatattagttactggtttattccatgccagttttagatcttgccctttgaaacgagctccatgaactgcagctgcttcagcttctgctcttgtcttgaatgtaattactgcatgaagtgaggaatcatcaatctgacaatcttcaatttcaccatattgcgcaaaatgaggaagaagatcttctctatcgctctccgtaaa

SEQ ID NO: 160064 - DNA, 1000 bp, Homo Sapiens
tttttcactggagaataaataatttattgaaattggaggaataaataagatatgtgggcagggttacaaatacctataaaaatcattaacatttatatacacaaaagcgctggggcccggggcggggccggaagtcgtgggggcggggacatgaggccgttgggcggggcctgatgccttggaggcggggcctgaggccgtcgggcgggtcggggagggggtttcctttccgcagcagccgtccgggcccccagaggtagaggtagatgagcctatttacggcgggggaaaccgcccgaggccgccgcagatccagatccagatgtggatctggccgcctttcagatccgagccccgcgtcccgctgcgccctaggagcgcgcggcggccccagagccctggctcggtgccctgagggccccacccccctgagcgcgcccgcggagctgcaccccttgcacgatcttctccacccaggagcggtgcgcagagaggctgatgtagaccccgggcctgttgcgctcggcacagccctcgccccagctgatgatgccggccagcagccaggcgccgtccacctggcacatgagggggcccccggagtcgcccagacaagcatcccgctccccctccaagtagccggcacacagcatgtcctcagtgatgggtccctgtcctgctccccgccagtacagatggctgcagacttccgagtcgatgataggaaccttcagcttctgcagggtctgagggtggggcaagggaactccatcttggatgctcccccagcctgagatccagcagtgggtgtttggagggaggtggatagaggcatcaggtaggcagatgggcaggacccgctctgagaactgtatggagcgctcgagacgcaccagggcaatgtctgcacaggcaccttccttccaggaatacacagggtggggctccacccaggcaacacccaccttctgggaccgagagccagggttccccagctgcc

SEQ ID NO: 160065 - DNA, 1000 bp, Homo Sapiens
gcacgagggttttttttttttttaaacattctagtcacaggccagaaattaagtttaagaacccaaattatttttatgtgcaagtaagaaaatcttaaaatcttaaccgtaaaaagagaattaaattctgcataaaattctaaaatactattccccctattttttaaaggaattaggaacagaaacaaaaaccaccctatttcatttgacttagtcaaacagggcacattgtttatgcttgtctctttccatcttgatcatatcaagatctttatgaagaaaccccaatggttgtcacttgagaactctcttgaccacaagactgagtattctatggcagaggcatatacacatgaaagacatcttaataaagatgcaaaggaaagcaaaacaacccaacacacaccttagaagaagacaaaacggcaggcaactggtcgtctgaccctctgaaggcaaaaaataaacatatctttacacgaaagaataagtcaggtgaaagaaagagggggtggaatggggaccgtcgtggcgagagaagacgctgacctgctcgaattcaaagtgctagaattaaaggtctaaacgaaaatgccgacgatgcctcctccaagcggggcctggccgggcccaggacgggcggcgcctcagtcctccttgcgctccagagtctgtgccgcgtggatgccgttgctgtagacggggaagggcagcgtggagaagagtccctcggccgtggtgaacacgttgccggcgggcatctgcgtcaggctagctgcgctcactgcgccgccgaacggtcctgacatgttgagccggtgcacgtggtggtagagcatctccatgggcgtcttggggtcgaggccaaagccggggctgttaacgtccacgaagttaacagcgtgcgcgttgggcagcaggttgctctgcatggccagggtcacctcggcgggcgcgtagcggatggtgcccgtggtgtagaccctctgcgcggccgtgc

SEQ ID NO: 160066 - DNA, 1000 bp, Homo Sapiens
gctggtcaaggcagagtttactgaactgttagtttcctcctgcacacaccgggcatgacaccttcaagtctgtccagcagtgggtccagaaagtaccctgtgtgccttggacgcagaggctacagttctcactgtgtggcatgggagccttcacagtgccctcgggagctgcccctggtctttgtctgcaaaggtgactgggaggatagaaaaagcagcgggctggcattgtttcgggggtggggtggtgggcagtgtgcctgggcagtcgcagggaggctgacttggttctgggctgcaagatctgtgcataggaggcccctgggtttcttccaggctcttcactgaaatgcaaagagtctgaagaggaggcagtgggcatagtgcccctgaatctggttaggtggagtttactgcatttaaaggcccatggtgagtggtgagttctgggatttgggagattcccagaggcctgacaggcctgtcccaccctcctggacttcactacagggagctgaagtcagggcccaggcaggggagcaggccacccaggtagggaacaaatgcctgcccatgcagggcagagggcagaaggcagggctgtcagggccttggttggtctgggcactggggcaggtggaggggaggcaggggtggaggagaggcaggggtggaggaggtggggctctcctgggcgggtggaggagaggcaggggtggaggggaggcaggggtggaggagaggcaggggtggaggaggcggggctctcccaggaggccatcacttgtcggcgtgctgcagcagcaggtccactgcctctgcgaggttgtccacgtacccatcagccttcacttccggatggtgctcgtcactgggcctgaacttcccggtgcgcacctgcagcgctctcattccacaccgctgggcaccgccgacgtcgcccacgatatcgtccccaatcatgacggcctggtgggcttccactcctatcgcttgcagg

SEQ ID NO: 160067 - DNA, 1000 bp, Homo Sapiens
ttttttttcttgaggcgggaagcttgtatagtttttattgtttttgctgtgtgttttccagccaggttgtttgtagatgtctgaggtttttcttccatcaggctatctttagacccatttcttctctgatgaactgtagcatccccagaaccctgagcatccgaagaatgggtcaccggaagtggtggtacaagatctgtttttgaattcacttccgagagaactgatcgctccccatctgaacactgggacctgcgatactggcggtaacttcgtggcgaatgagaatgcctgatgcggattgggtcaccttgtgtcctctattttagtgtatggaatctcttttaattgttcttcggacaatccggatggatccacaagttctttttgaatgtgcttccataactcttcttttgcttggatatcggggcttctcgaacgagatctgtgtctggatcgcctgctgttggggtcggcttggtttttttccttttgtctccttaatacagcttcccactgaggcgctgaatcaaccatatcattctcctgccgtattctgtttctctttttccggtgttctctattagaattttctgattcactaccactgctggtgttacagcgtgaacgtgacctcctcctttgcttaagatctgaatcttcaccactgttatgggctttcctcctcctcacaggctgtacagaatcattgtcacttccacaggaggggtttcggcgacgcgtgtaagggaactttggcgacttagtgcgatcactgggagaattgtagagtccactctgggggccattttcttcccacggtgcatgagatttgcttctttgggtatcagggctattttcattctttgctttcttaaagctttttactggtgaaggtgcaataattttaattgttccttcattttctccattttccatgtttgcagttatcctactgatggtgtttgattcagctggctgtgtttgtgctattcgctta

SEQ ID NO: 160068 - DNA, 1000 bp, Homo Sapiens
ttaaatcaagactcctttattggtggttatgccgcattctctctacgttcttcacaaaggaccagctgattgaagcaggtggtgcagagggtatttctaaaggtggttatttaagcttgacagatgcaatgaaaaagacaaatctgtgctcagcctcagtatggcggcagtcttcctctgaagatatttctcctttcctcagcatcagcaatacacccaggtgtggtcttggtcgtagttgtaagaagttgcacaccacacaaggttctcctttgatcctttgttagtgcagttaaaataattcttgtttttatagttgaacggaaagtgacaaggaaagccagggaccaacgcggaaattctggtgtcggcacagaaactccactttccatccttatccatgttctctgtggttgggcaccagagcttgttgctttcatcctccatgcaatcagagaccacattatttctgtagatggaggggaagatgcagggcttcctgagagaatttcccccatactcattcgtttcacagaatttccactgctgtttctcatcgaagacagaggtgactgagcaccacagactgcctaagaagctgccctgggagatgcagctgttataagcctttcctcgatagatgaaagggaagatacagcgtgggtaatcttcactctggcagtacttccactggccgttgtacacggctctggtggcacaccaaggggataagctatgaatatgggtgcaagtgaagtaaacagatcccttgtaggtgaaaggaaagacacattcctcatgcatccctccacttgactcataggaatagagaaggaaggttgtccatcccaacaggtaactggaccatcgggtcatcttggctgccctcttctctttgagagagttcttctgggccctggctctctccacgatctctctttaaggttctgctcccaagagctctggattatctggggattggttgaatggctttggcccc

SEQ ID NO: 160069 - DNA, 1000 bp, Homo Sapiens
ttttttttttttttttttaaaaattcaacaatatttattaaaatacaaaaatacacttttctcacattacaatcagtgttcttttgttggcaattcccctcccccacccataccaccccctttcaaatctgaaccccttatttccttttaaagctaaaataataactgaaagaagttacatcattagatggaccagaataacagagatctctgccttccccacccacgcccaccctttctcttccaccttctcctgagggggcctgggagagggaagcttcccatcagtgtgctccattcaacagtaccccatgtggaactccatgtgtgcatgcgtgtcacttgtaactgtggatctcacagcttttttgtgaaccatcctggttgggaaaggcttcattactttacgtgagcctgtacccttttcgtctctcccttttctttgctactcatgttctgcccccaccccatcaccacaaccagttgacatccgctgtaataatccctaatgaatcagcatttagaagagtcaccaaatcacaagcatgagaaaagcttccactcccaagctccccaattcaggcttctcctccctctccaccttaaaacaaacaaaatcttttttaaaaatcataaaatgccatcattgtctacaatcatgtgtcagagtccaggaacaacaggtggacatggcacaatgctaatttatggcctcctgtgaatacattctctctgctttaccctcccttaccacccccctgctgccgcaccccttcaggggcctcctcctcctgggaaaccctgaatagacacatgccttgcagagtgggttaagcccaactgcaggaatctggtgcaatgtgaaagcattagactgagagctacgccagctcccgtccttctctgctcctttctaagcaattctgtcaggcaaggcacatgtgtgtccagtgcacagacccccaagacttgtgcacatggacaaagactcagccccttt

SEQ ID NO: 160070 - DNA, 1000 bp, Homo Sapiens
ttttttttttttttttttttagagattttcagaaataattttatttacagaaaattcacagaggattaataaaatgtcatgaatacaattttgttggtaataattagcagaatcaagagtagattaatatataaggtaacatgatatattaataatacaaactaaaatatcaattttatgctagctttatccattagtttttcatattccaattttaaacaaatctagaaataagacagtatatatgaaacaaatttgctaaatatttttaaattatgccacctcagatattacctcaattttaaaaccatctgtaaattaaatgaccttcccattataatttctaaatataaagaagcaccagctggaactcaaatgcataaaagatattgttatatattttaagaaaatattatattagcaatatcataaatcaacaaagaatccaaagaatattgcatgaggtaaggtacattaaatgttttatgcctagaatattatctacctgcattcttatccatatagtttaaaacactaaagcactcactgaataagaaatgaccatttaaaaatgaataatagatggcagcacatgccattttgcaataaaagtactatgcgcattaatttgcaaataatgttttttatccaaatagtcctgtggttccaatatccttgaatgataagaatttttactgtgtgaaaaaagaaaacatccttttactgatggaaagcttctaatcttattcgggttggatcttctggatgtctcaaggcaattccattacgcagcagcagctcaacataaggtggccaaaaggaatcactaattttgacatatggatcatgtggaacatcaaataatctatttataagaatctctaacatttcatgcagtgttatcaggtttacagatgattcttgaatgtttttctttttctttttaacacttctatcaggcagaggaaaatggtcttctagaaactcgcccaaggtactc

SEQ ID NO: 160071 - DNA, 1000 bp, Homo Sapiens
tttttttttttttttttcatggtttcaaaagggtgtttactatttggccaaacaatattttttaattgtcagtcataaagtgaaatacatactaaaatatatattaaatattcaccaaatctgcattgctgctacatgaaaacattttttggtctgttggaaaatgtaattcctgagatcattgttgggctttgtcaatcattttcctcaccatcaaatcaccttaagtgacttgggagtgtgaatctaggatgttcaattttagaccaattttctctatcttctaaatgagtaaacaggctctgtcttttataaaaggtagaaaaataaccatggtgtgctaatttttttcaaggtataccatatggaaaagtataggctgaacacaaaggaagtcttttctgaatggctctcgatcacacataaggaacatatgttttccagttaatctgtccttgatgtacagcagtccagctgttgttttgcatttattaaaatattctctgctaaatagttatgtttgtctttaaaagtaaattgcataaaattacatccaatttctttctctaaaccaacatattcttcaccttcacaaagcaaacacatggtgcactgaaaccgaggtgttaccagctttacatactgttctgccatttgtgaggggtgcaaccacaacataagtcagaaaaaaagctatccagcttttcgtggaatctggtgaagtttatacttagcgataagcctctaagcctgaacttagcagggctagcaaaactttatttatttcctaactcctattattttagaatggttttcaaaataatactgcaagttcctaattgaaatacaaaacagaacaaaaagctgtgagaaatcttttttttctttggctccttaaagacttggaataatttatattagtgttgcatacattttaccttctacattttgatgtacttgctcttgaaagcactagaacaaattaattgaaataaaacct

SEQ ID NO: 160072 - DNA, 1000 bp, Homo Sapiens
ttttttttttttttttttttttttttttttttttttttttttttttttttttttttttttttttttttcgccagccgaggcccgctgcgggctttattggtccccaggatctgggaggggtcgggggaagggggacagggacaggggggacggggacgggggcacggggggacgggggacggggacggggggacggcgatgggagacggggatggaggatggggacgggggaacggagacggggacggggcaggggggacggggacggagatgggggacggggatgggggtcggggacagggggattggtatgtggacagggggacagggacagggggacgggggacagggatggagggacggggacggggggacggggacaggaggatggggggacggggggatggagacggagggacggggagacgggaacagggggacagggacgggggcacagggacgggggacggggggacagggacggggagacggagacggggacggggacaggggaagggagggcaggggccgctacttgagcagccttcgcatggtgcccaacgaagggctcctgtactcccgcccgaagtggttccagtggttcaggtagttaaacagctggtagagcagcagccgctggtcgaagcccggagccttggggatcttccggtggtaggcggtgaagaaggatctggggaaccccccaaacatcaaggcgattgccagttcaaactcggaatggccatagaaggaagccgggtcgtaaataatgggccccacgtcgtcctcagccacgtttcccgaccagagatccccgtggagcaacgcggggacaatctctaggccacaaaacagatccgggatcttcacctgtagccgggaccagagttctcgtgcctctcggtcagcatagtccttctcaatgaggtccagctgcgcctggagccggtgccgggcgaaaaaggtcggccagtcatcctgccactcattcacctgcggg

SEQ ID NO: 160073 - DNA, 1000 bp, Homo Sapiens
gttttgactcaacagtttattcccctctgattatttacagcataaagttcacggccatgttgtctataagagtataaacttaagacagtaaaacaaagtgacctataaatattaaccagttttcacacatcataatgtttaaaataataacatttgcacagcatctgacaatttacaaaggcttcaacatacatcattttgaataatccaggaagacatttgctttgaaggaacggcctaattttttttcctgtaaactttcaatccataactgtacatcctaaagcattctggcacaaatgaaatggaactgcctcttgtgggtctatttcagaagtctgttgtcagagttcagttcacaggcatcaaccagaagcctagtgaggccgtttgaaattctggcccagattaattttttaaagctgcatttggagctttttaaagtcgagctgtttccaaaggcttaactgaagagtaactgatttcactggaaataaaagtccacatgtgatcccagctggagtgtggtcatatttttcttgcaaacctagaatgtcttggggaacaaacggctgtcacgtgtccccttccaaaaatgtcttaaacaccggaaaggagggcaggctaaggtgtagcccttcccaccctgggtgccagggttgggggtgctgtaagtgaaatatcaaagctgaggtcactaatattctgaatttcagcctcagaggaaggagcgtgtgcaggagtccaggaggaggggaggaaccagagacggggaatggcctggatggatgagtcgagacatggggaaagctgcttcctgaattatgtgttctgtgtactcctcttcatcagagcagtggtaaggggtcttttgtgagaggccgggcctctccaccaaaaggcactcagttaacaagcacatccatgggccccactgacccacacggaagcctgggaggatcagcagaggccagtcccatactatggaggaggggctgtc

SEQ ID NO: 160074 - DNA, 1000 bp, Homo Sapiens
tagagagatagagatatatttcttctgttgcatatttcagacttcacgctgagcttcaggcacaattactccaggttcttctgagagtcttgacagagtcttcttcccacgctgctcatgtgacctcacttccagtgcacacctggaaactctgcatgggtctcagtgggccctgaccctgcctttcccatccaggggcagggtatgctggaaagccctggagccgccccaccccacttctagggtcccctggctacaaaagaactgtcctgctagagcccagctctgcagcgcccccgatatcacctgttcttcgggccttagagcctggcagggcacttgcagccctgtggagcctcagccacgagcaccacaggcccagaatggggcatgaggccctggagagtgaggcaggcccagcctcgtgcagaacaatagcaggtgggctcagcaagccactgctccccacagacatggcccacttcctggggctgctctgagccctattgcacatcttctgttctagtttctctcccaaccacccattttcctttttaaattaaaaaaaaaaaaaaaagaaagaaaaaaaagaaattcaaactagacaggaaggtgaggaagagctgggtgtggaatgctgctggtgcccttctcgcgttcccgccagccctctgatccccaacagagacatcagcagtagttcatactgtgtccaccttccctgccgtctgtgtgggttcttgatggctgaaatgggtgtgcagcctgggcctctggttcttgcctgtgggaggggacacccctccactgtctgtaaggtgcaatttcccgggtcctccacgggtactggctggggccctgctacctgagtcgcccgtctgctttgacaggccccagctctgatttggggtcgggggacagagagctccagctggtcagtctgcagggctccagggaggggcagggagaggggcctatggcacacagtccagccacggac

SEQ ID NO: 160075 - DNA, 1000 bp, Homo Sapiens
aaatattacgtaaggttttcttttatttaaaagatcattcacaaaataccatatccatagatttactttctgtcatatagctgaatgtgttaagtgtttggaattccattcttacatttaaaagtcaactggattgcccagcagtttagatgcatgtgttttgttctttatcttatccacattgaagatgtaagtaggtcatctgaaagcatcgggtttgattacaccacataatgcatgtctttctgaagttaagtgttggtgttacacaaatggttcttatctcagaagcagagaagctgacaggtggaaggaaggagagagagttctgtggattgctgaggccttgtaacaagacacagtaggaaaagcccaggatgacggctggtgaccaaatactaagcacattccgctgggtgccccaggccaccctggccctgccatcacctggcgagggcctctttcccaggctcctgctgccggccgcccccaaactgctccccataggacagactgggacttgggtactgaaggatttttcatctgttcacacgcaggcgttcaagctcaaaagcctaacccctagcactcccacataactgctgaaccctgcacatgggaacagtccagtgtgtccccaagatgtggccgcagacctagacagctgcagtcctctactgctatctgaaggttcctgacagctctgcatagtacaatttatcaaaggaaatgagtaaagtgccagattctagacccattttggctctgaactgaaggggaggtgggaagcacagtatctcattatgttgcctatactaggaacagatccacacaacacacaggcaacagggatggggggaaacgctgcgtcagcgccgcagtcagcccagtgcagcaccagcaccaccccctccacccccaaagcgccttggcccagcagaaaagaaacccgctggccattcactgcacccagccagagaggccagcctccaccacgcac

SEQ ID NO: 160076 - DNA, 1000 bp, Homo Sapiens
gcacttccgtgtttaataagccacatcctcagttgagcctggggtgaaatgtgagatcctgactctgtgcagtagtattagtgggtgggccaggggctgtgaataacatcatcctcagtacagctgcaattccagggcccctctaccacaaagatggcttaagcaaaggcagccagatggaagtatgatatccaacaggaaggaagtaggcaggggtcactaaagtggctggtggcccagcagatggaaacagaagtatggccccgagggaaggaggcaggtccagggctacagtgctttcaggtactggtgtttctataggggcatttgccacccacatctttggaaactcccctggcctattgtgacatggcagggctgcctggttcttgaaggtagagaagatgctagtggggaggagctgagcctgtgacgtgcatttgtaccaggtccagatgggaaatgatgaggctgcaggctatgatggggccactgtgcactaaatgcttggtaccatcctatgaggggacaaggtgcagacccacattcccataggcacttaagcagtggtggataggaggctaccccaggggttcagctgtccttcaggtaatcagcttacccccaagaaggactgagaggaatatgagtaggacagttggcagatgacaatttcctttgcctggctcacgggagaagtctggttgggccaggtatgtgggtgtttggtgcctccatctggatagtgccagcaggtacaccaccctgccttatacctgaatggccagctaaataaccatagagcttaaggtctggctcaggtcaggattccctggctccttgccaacaaagcaaaaccagagattcagaaaactcagggcctaggagaaaacagacctgccttacaaaccccagagctggtcaacctcaggcttcctctcaggaaaaaaattttttttttgagatgggtcttgctctgttgcccaggctggagtacaac

SEQ ID NO: 160077 - DNA, 1000 bp, Homo Sapiens
ttttttttttttttttttcttttttttttttttttttttttttttttttttgagacagagtctcgctcagtcacccaggctggaatgcagtggcgcaatctcggctcactgcaagctccacctcccgggtttatgccattttcctgctgcagcctgccgagtagctgggactacaggcacctgccaccatgcccggctaattttttgtatttttagcggagacggggtctcaccgtgttagccaggatggtctccatctcctgacctcgtgatccgcccttctcagcctcccaaagtgctgggattacaggcgtgagccaccgcgcccagcctactttttctattgaccatttaagtattaaccattagccaagtcctcagagtcggaagattcttctccagccattttatatttttggttatcgtttccagaacagtttgaaaaatatccagatgtgatccttgagcctcaagagattcaaaaaatagtttcacctcttgcaacttatccttggaagaaaagtgagctgttgtgccagagatgatcatccttatgtcatatgagcccaagtcaaattttttcagaagatgggtccaattttctcttacaaaatcccatgctagttgctgcccctttggacgtctggcaatcgcatgaaggagagctgccaagttctgtgtcttgataacctttccttccattcctagttcaattaacttcagtaacttttcctgatgcttgctcgttgacaaagcatacagaattttgttttgttcagcacttgacattgacagttcatattgctctaaaaggtaattccatcctgctgttgtctgagcacccacagaatacacaatctttaaaacatctgttggtatatttaattttccactggattccatccactgggagaagagttcagcagctttctggatgcaaggagcatggttcaggtcacaggccagcttcaagagagccgagcggagcatcctgtcccag

SEQ ID NO: 160078 - DNA, 1000 bp, Homo Sapiens
tagactttccatctttaataacattttattgtgtaaataaaagcttgacatacactttttaaaacaaacttgtacattagaattcattttacttgtgatttacacattaatacatattttaaacctaggtgccacagaaacagaagaacaggtttggaatacaatttaatatattttaaaatgagttacatatattttaaaaacatgagccgttttgttatttgacagttctagttactttaatagtttctatggtaacatgcatttaaatctgtaaacacctggtacgttcacagtatttggtttgataaactaattagtaaaaactgtattcaatcaattgataaattaactttttcttttatattacaggaaaacaaccaaagttttaagtagcattttaagaacagatgaatttaagtttggacatctgcaaatgaggtggatctagcaacaataactgtaatggactgtgacaattcaatttattcttaattttgatggttggctatttgacttctctaaaaatgagaaagagctattttaaaatataaagaattttctaatcagtttcagctttgcaggaggtttcctgcataaattgggaagtaacactggaaagtaggaatttggttagtgaagtgggaagactgtatatttataatttgcatactacttgcaattttttgtttttcatcacttgtaataatggaatggaaatgtaagctgtaaagactctcaaatataaaatatttgctacagtgtatatatggtacataattgcttgttgcttttaaagttccttctgttgttctgcttcccactgatttcataccagctcatgaatggatcattacagtctctccagaggcttagaatgattcagaatgttcaatgcatagttctcaataaacaggaggcagaatttttaatgggtatttcttttcagatatatgattggtctctaggtttttgataataatatggtcttaaattcata

SEQ ID NO: 160079 - DNA, 1000 bp, Homo Sapiens
ttttttctatgtccaaaacatttatttcaagaaatatttgtgcctgcacaacaggggaactttgtggggtgtctgtggcttgctacagtgacatctggcaggactaactgggtcatcagagccacagaataaggactgggaaggtggccacaactgcaaggactggggccatgtggggggaggactctgagactgaccacttggctggtaacttggctgtccagtgtatgggaatctcagtgagttcctggcctgaagtcagactctgtctctgacgcagacgtgagaggtcggagtggcaggaactgctcagctgctcatccgggaacttgtcctccaaggggctttgccatttgttttcttcctgtaccttttccacttgtctgaagacccgcagcaggtttccacgaaggacaccctgaagctcttcctcactccagccacgactcagcaactcctctatcaggaccgggtatgtggacacgtcttccagcccctgagggaatttgccggccccatcataatctccaccaatcccgatgaacttggatccaatgacagccttgatgtggtcgaagtgatctgccacagtggacacattggctgatgggttgcactgtattactcccatggacaaagacaccatcacgacgccaccgttcttcttcagaagctgcaggatgtcatcaggaacattccgagcactgttgcacacaccccgggcagccgagtgggagaagatcacaggtgcctgtgacacttccagggcccgccgtgccacagcatctgagacatgggataagtctaccatcatgcccaggcggttcatttctgccaccaccttctcaccaaagtcagtcagcccgctgatgttgttgtagaaggagtggacgcccttagcggagctctctgcccagggtgtgttgcaggtgtgggtgagcgtcaggtagcgcactcccagcatgtagaaggtacgtaagatggagaggctattgtccag

SEQ ID NO: 160080 - DNA, 1000 bp, Homo Sapiens
tttttttttttttttttttttttatttaaaatattttaatttctaaaaagcttaaatcatattaaaatttaaacaatttcattgtacagtacttgacaatacatttcaacaaactgaaaggcaaaccagtaaatcagttttgcttactttctaagcttaataatgtacagactcttgctcttcaagaagatgcaaaaatcagcaacagtacaagtgaaatatttaaataggaatctgaaacaaaacgaattcaatctgatcaaatccacaattaattgaagttttcattttattcaattgtgaataaaatagcagacactgtttcatccaataagccaatgatatcagcttaggagaaatgatctgcctggcttgtgcaagacaagaacagttaccttctgctgaaaggatgtgagttttcaaatttggttttcatgtcatagtttccaaataaatgaaccgctccaccaaaaacgacagtctagttgctacctatcttccagggtttcatcatacagccatttataagcacaatctttggaacgctctatagtttcaaaaagtgttttgaagtcttgagggtgcatgttaactactttctcatcctcctgttttcctatttgcatcaatatatctctcgcatcaagtggagtcaatgaacgtaagtggtctattacagtggcgctgcgcctcccaaaacagtgctttaacaagtgaaaaaatatattatagttcataggtgttaagttcttggtaaataaattttgacgaggaatcatttgaataagatacagcttttgttgtaattggtctaataattccctacgctttgggttttccagcggccctttccgggtgtatatatcaaatgatgaccaaggctccatgtgcagaaccttaatctcacaagctaattgccagataacacttaatacatgatacaagtctggatttccgggatctgccattagtttctggaattctttttcaccaataaaca

SEQ ID NO: 160081 - DNA, 1000 bp, Homo Sapiens
cccgaggtttttttttttttttttttttttttttttttttttttttttttttttttttttttttttttaggaaaatcaaaaattttaatcttatcatctttacatacaacaaacatgtcaagaccccctattgtctttgaaaaggtcccccctcccccgccaaaatctgtagaccataagtcttggcctacactgacctggtttgtaaaatatcttcctctgtgtacttttcccttcagcctcaggctcttggctgattcgctcacaacagaagcagcttggctttcctctggaagtaccaatttgaaagcccaccagcccgcaaacctagagtgtattctccacccctgggtcacagaacttcgttctccccggctctgtaacccaaggaccctacagcctctgaggcctaacacccaagctcttccttgcagaagagctgagatgctaaggagaccatctggagtgtcataataagcccttgggatttgctgagctcccacatggctttcttcaaccacctggcccactttcttcaaccacattccactttggaatgcgtgtctttaaggcaccaagtgatcttaagaatgggctctgtttttgaattcagcaatccaagttcctatctatctatctcggtgggacctccaaaaaaaagaaaaaggattggcttggcttctaatgtaaggcctgccttttacacaccagttgtgtgtttgttagtggctgctggatgccagtccacaccctcaaacacctcacagtcccaaacggggtgctcctacaggtcccagggtcctgttagtggaagaaaggcagttccaggaagtcttcctctagccttcatgacaggaagtagttaatcctctgggaaatagacttgcagccctgggaagaaaagagttgttcctccttggggacatacaccatcatctgggctatttcatccagtgtctcttctttatacaggagctcctggctcaggaaggcatcccgt

SEQ ID NO: 160082 - DNA, 1000 bp, Homo Sapiens
tttttttttttttttttttttttttggagatgaactgtcagtctgtctttaatctggcatgatgagacacctggtcagtcaggcctgctttgatagagtttgttacagactgccttatgttttcctccatcaaattatcacccaggggcttcaatacctgtggtatgagaaatgtgcaaaacaaacaaaaacatgaggtaaaaaaagagttacatataaaaatagatataaaaattcaattcaaagcaatgatgaaaataaccaggaatacgggaaataaaaagatgcttctctcaaaaaaacttatgatgctactagacattttataatgcaacaaaaattactttcctcttattcaaaccatttacaattcctatgagatggatgtgcaattccataccctatatgcagcatcaaatctggtatgtatacagcatttatgcagaccggcccagacggtcctgcttattgtcctacatgtgtaagtgtgaacacttcagatagagaaaaaggttaaaaatactgtctaatttttcttcttgttattgttggatgacagtctctgtcgctgtgctgatgaaagagcacggtgaaccattcgacgtctagtaacttcaaacagtttggaaaacacctgttcccatagtgtttcagcaatctgatcaatcactgttccaatttctctgaactccccagagtatttaacatatgcccaagtacaaagaaatatcagtgctaactccatgacaaggttacacaagacagctatagagtttaggccaatgaagccagtcagtcctgagattatatacatagcaaacatgaccgcaaacagtgtggcaggggtacgagcagcatagaagatatttttgccatcattgtgctttataaaatttgcataggtttcttcaatttcagcttcaagctggtcctgataacgacggcagaactcatctccacccatcttttttactgaacgaaattgttttatcgccacttc

SEQ ID NO: 160083 - DNA, 762 bp, Homo Sapiens
gaacattaagacattttataaagtatttcacagggttatcgtcttccaccatggacctctggaaagatctgttgggtgagttttagtccgcatgacatgcagaacatccatgaagacttaaaacatggcacaagatggggcgctcgggagagcttgtggacaataccaacaggtagttctcgagagctgctccaggggtcagcagaggatctttctttccttctcaggtcacggtggccacttcccacccccgaacaagaaggtcccctttcacaaacaggaggtgaccctagcagacagcacagcagttggaggttagacacagcaagctcccaacccggacgcgaaggcacacgggagagtaaacacagcacccacgagcaacagggcagggcttttttttttgggcagtgggggggtggttgttttcttttttccaccatcaagggcatttctgttttctaaaaagttatgccggaaagtggggcggccagttaacaccatctgggttttcagctcaagttctactgcggctttatgaagacttccatctgattaaagagaacaccgcatggaccacgtagagcagagtggctatgtaggagaacacaaactcaaagatgaagagcaagtcgggcaaggtggtgaagaccgagaagccactgggcagggtgctgccccccgtcgccgctgcgggggccatgacggcgtgctggcgtcggccttgggacgggacgagcgccgctcagactccgcgcagac

SEQ ID NO: 160084 - DNA, 1000 bp, Homo Sapiens
tttttttttttttttttttttttttttgaaaatcaaaattttattcctaaaagagggacaatataaagctaggaccttcatgaacattcagatatcagaagaaagttgccaaggacagaactgatttaacagcaagagattggtcttatgcttattacccagcaccattactaactgttaaaacaatcaaaactaaacaaatcaaatgcatggctatttattttttgttgcttttcacagatgagcctttgatgtggagtttgtcccccaaaacatttgatctccttccatgttcaatggctggactttgttgaggtttctcccttcttttaagttctcgggagccaggattctcatggccaacacttctcattctagtgtttcctagattgtgtcgtcctggtttgtacttcaaaacctcactttgccactcctcatcaaaagcatgagcatcactttcattcatattgatgaactcctggttgacctcttcatctccagtcttcttgttctttgactttttaatgacatgagctcggtcatggatatgatgaccaatagccattttttctagtccactgtcagaatctctcattgctttcctggtttcctttattcctcctggagctcgacgagtttgagttgaggcctgaaaaacctttggcggttcatctcctattttggaataagtcataactgaggaagaacaaaatgaatgtccatttggatccactgaaagttgaccgaagtttctttctaatttctgcatatagtttctcatatttgacaccatttggtccattgtctggaaagagctgacatctgtatgagtcaaagaatcttcaccatcattatgtcctctacgattatgagctctccctctaccatcagagatactgagcaagtctcttccaaagggttcagaaaaacttcttatcatctgtcgcatattttctcggtgtgcaagaatggactcagagaagaaggggtcatcctcaaa

SEQ ID NO: 160085 - DNA, 1000 bp, Homo Sapiens
tttttttttttttttttttttttttttttttttttttttttttttttttttttttttttttttttttttttttttttttttttttttttttttttcaagttaatggcagctaaaacgctcccagtccatttattggccacatgaggtggtcgtcaagaaacaagttagaaggttatgacaggaagtagtataataaatgcccggcagtacgaggggttcaacagaagtgaacaaggcacaagaaagaggtctgtgttcaggaaacaggccagtccccacatggagcaggtgactcctgtaagcctgtgaggctcagggaggtcgtgtctggctctggcctgctggagcacacggccgctggagcccgcagccagctcagtggagctgagcgtccagttcgtacttctcacagaacttgtcagtgaaggggatgcaggtgaggaactcacaccactcacagcggacaggatagacgtagaagaggaccaccaggccagccaggaggcccaggaagaccacctgaaagatgatgatctggcagcgtttccggtacaggtcgaacttgccaaagctgatgtagggcaagaaggcgaaggagaggaagaggccactgatgaaccccgagatgtgggcaaagttgtcaatccacggcagcagcccaaaggtgaagaggaagagcaccacagccagcagcttgaagaaggcacgccagggccgcgccaggatctgccagctctggaagagctccacgaagaggcaggccaggatgccgaactgggagccagcaggacccacctctgctcggtatggcaggaagatggcactggccaggttgccggtgacaccactcagcaggtagatgatggctatgcggtgccagcctgccagcttctccaggtcccgcaggacagtcatctggaagcagatggacaccaggcagtgcaagatcccggcgtgcaggaagagggatagccacaggcggtagaactggtcaggcacc

SEQ ID NO: 160086 - DNA, 1000 bp, Homo Sapiens
taaagcctggagtattgtatttcttttatgcatattgggtttggttctattacttggcaggagattgtactcccctgagtcagctgtgttcattggtcagaataaattccagcatctgacaccaattccattaatcacagacaagcttgaataagtgtaagataatagaaaaaaatatctagtgaatggcgaacattgtctatgtatgtatgctattcagtaatacagtagaagagatctgagatattgagttcaagatatatgaaactgtctatcaaaaaggataaaagtcctcctacatgaaatactttaattcaggcaaaaggtgtatgaaccaagtaaatctccaccctgaaagaacttaaatttccatgtgaagccatctttatttccttctttatttccaaataattggccacttagaaagtgtggacatttcatgatcgacaatatcaatacagcccaaaccctgatttctatgattaaaaataataattttaaatcactttctcaataaatagaatattacatttcaacacaaagtctaacaatttagaagctgctctacacaatgtgcagctagctgtagtctctttgaagaaaatgactttttatcattacacacatttatgtttatattatggcccacagaagggcagattagactgaaatctgtgtgatgctccttctactacttattgaatagtgtgtagggttacaatcatttgtttacaccccagagtttttcaactatttcatttttttttttttttttcccaattaggacttaaggaatgtgctgggacaaagttggcttcagtgatcaggttgtttcaagtcttagaattcaaacttcaattctaaaaaaattttatcaacaaaacactgtgaccaaaaaatcactttaaatcttaaatattgaaacgcaatagcatataaagatggtataacctaagatgcttttatttcattatattttcaatatctttacgcattataa

SEQ ID NO: 160087 - DNA, 1000 bp, Homo Sapiens
tgaggtccagagatgcctgctttatttcctacggggtgatcgcatttcaggctggtaacatcacataacaagtctaatcgccaactagttgtacgcctctgaactacaagtcaacaatccaattcagcaaggaacaacagtgtcaacagctcattagcgggtggggaccggattttccaaatcaatggtcttggctggcagagtgctgagtggggcctgagtgaatgaggctaaaacgcttggccgaagccgtccatccccaatcctgagaacagagttgtctgtttctctttcgggggtcaggtcagcccaagtaagaggccaacaacctacctgggccgatacaaggcgacacaaggcccacccgtggctgacgcgccctccaccctcactccatcccggggcacagctccttccgctggtgcttaggaaaaggcgaggcttctggtaatttctcatctttgtagttctgctttgaaaagaaaagggggccgggcacggcggctcacgcctgtaatcccagcactttgggaggccgaggcgggtggatcacctgaggtcaggagttcgagaccagcctggccaacatggtgaaaccccatctctactaaaaatacaaaaattagccaggtacggtggcgggtgcctgtaatcccagctactcgggaggctgaggcaggagaatcacttgaaccttgggggcggaggttgaagtgagccaagatggtgccactgcactccagcctgggcgacagagcaagactccatctcaaaaaaaagaaaataaaagggaatggcaggggtgatcgaacgtgggtgtgggcacctcagcagagatcaggggccttgggcacagagctgggtggagcgagaggtccgtgctggtgcagaggtgctcctcctaggactcagggctaagtttcttgggaagatgtccaaagagaaggattcgttaacagaatttcaggatcgtgggagctgtttgtatgatatgaaccat

SEQ ID NO: 160088 - DNA, 1000 bp, Homo Sapiens
ttttttttttttccttggagggacaaggtttatttaacaggttaaaaattaaattatacactcaaatttacttgtttggataatcacctacagcaaaatcacatttctgtaaaaatcaccttaaataaaggtctccaccacatggcccattttttccaaacgacagcaaagaatttggtaaaacgaaaggctgcacatccctttggagtttgggctgacagcatttcacagaaaatggttggaaaatggttgaagcaagctcctaaatggcccttcttgaggctctgggagaggcactgtgccggcacctggccactttcctcattacacacttgggaccaatccactcagatggtggcctcgcttccactcagcatggctgtgcttggacttggaggaatggggcagatgctccaggaggtcctctgtaaccagtcccctacagggttacgtttctctgttctcagggacagagaaatgtatatagtagaagtcgtatctttgatgcctactttttacattgaagaaagtggcagagagctcaaccgcacttccagcccggttgtggcctgcgcatgagcagaggccaggatttctcctctccaggatcccactgccagagaccaactgggatccaagcagttaaacagcttaatcctaggactgtatgaaataaaggcttatggacccggattttacatttcattattcacgtaattaagcaaattatatgtttcaattaagaatcatatttctgcagaacctaaattataacagaaatagatctttaaaaaattgcaaaactgcttttacaaagcagacatttattaacaacatttttttgtagaatttctaaggaaacaaattcaagacaaaaatccctccagtaggtaacaaaatgatctattgtttcaattccttctgatcaagtgactttattccataaaacagtacatcagctgggcaggttcggtctcctctggatgtatgacagtcatta

SEQ ID NO: 160089 - DNA, 1000 bp, Homo Sapiens
tttttttttttttttttttttttttttttttttttttttttttttttttttttttttttttttttttttttttttttttttttttttttttttttttttttttttttttttttttttttttttttttttttctttgcactgatttttattaaacaagtaaggctggtagtggaacatatttttatttaatgcataaacatataagtcccttattagagaaactgtatatattgatgaatatggtcaatggtcacatctatgggttaattctttaaaaatcagaaccaataattaggatagattttatgctctcttcattacattgtgaagtgtcttgtgtagtcatattctattgttggaatgacagcttgtacaaatttcaagaaaataagaagatacatatgaactccaagttctccccctccttctgcaacagtctcaatgattttcttcatcacctcagcatgcctgcatgggtgaactgaacacatgggaggtggtggcagatgagggtgattttcaatggtcactgttttcttcacatgatcctgactgatgtcttcatacatgtgctcaactgttaaaggctgccgttgctcatcatagccaaacaaccataatcgtggagtctggtaatatttatcataagtgatgtaaaggtcataagttctggtttgcaaaatagcatcttcaccgccagcatcagttttggctttacaagcttctactattttccttgtatctagggtagcctcatctgtttccaacaatccactctcttcatattcttccatatctgcagcttctccttcatcttcatcttcttcctcttcacatagtgctgagcaatcttgaagccttatattgtccttattttccagtgtgatctctttaacggcttccgttattcctgtaatacctgtgttgtgatatgtatctacccatccgccatcaccatcatcttcttcaatgatagcttccaattcatctgaatattcca

SEQ ID NO: 160090 - DNA, 1000 bp, Homo Sapiens
tttttttttttttttttcttttttttttttttttttttgcagacaaaaagtggtttatttagcacccactatgtaccaggcacttgggaggtattttctcacactttcgctttccatcctcacaatatcccttatgaggtagggactaccctcatttttacaggtgagggaactgaggcttagatgttgacagacccatccaaggtgacccagctggtaatggtagacttcatcctgctacacagtatttaaggggcctaaaccataaacaatttttaaaaatttgggaaagtcacacataaaggagatgtttcaataccttctctctccaggtatgaacagtattgagcaagacccacagggcagcaataatcatttatcctgatgaaaggttcctctgtgaaaggtaagggggttgggggagacctaaagccttctgcagacccacatttaaatgagctgacagtcccagcaggactacagaggaaccagctaggggaagctgccaggatcttagacgtgaaattaaaaggagatcatgcttcttacccaggaagtggggaattcagttgacccttgaaaaaactgaataaattaacatggggaaaggctaattaccatgcccagtgctgggggagagaaacagagtggccaaggttgtagcagcttgggcacctgctgaggccccattcagcgggagagccaccagttgggagtgtggacatgtatggccctaccagctctaagcaggagctggtaagggacttcccaaatgcaaacccttggtgaatattctagcagtgagaggaggtgagcaccagaccactggacaagagaggtcagagtcatacatagcaatctggacaggaaatggcatgaggagctgtgagtaatctgggggctatggctagaaaaacagggcacgagctggggctgagaagaggtgagcatccatcaagctgaaaggtgggactcaagccccctcagcactgtgaccccg

SEQ ID NO: 160091 - DNA, 1000 bp, Homo Sapiens
atttggccctcgaggccaagaattcgccacgaggtttttttctgagaaacataacattttaatagatgaaataaatactccagtacatgcaaggtaaaaacttgacgttgggggaaaaaaaatcactctatagtgtaaattaaaaaaacacacgctcacagtagcttccccccatttgcaaatcacatggcaaattcatactctttcctcaccaagtatactcctaattcaacacgattgcttaaaaaaaaaaagacatacaaaaaaaggtagctacatccatgtctaaggagtgaaaactgaggtaacctttcttttaattaaaaacacaaaaaacaaaaatgaaatgaacccatgacctccttcctgcccaataatgaaatttagttgagaaattccggaagacgggctggggtagggggtgggagtgataacacaaccagcagatgacatatcttccagtccctactgcatgggggctggtggagagacacctgggccctccaagtgcgtgtgcaggttgcgtgcatggccctgccttgtggaagattcctctcgagcatttaacgttggggagggtagggggtttcacctatgatttctttggtataaatggagaggggcagagagtaagtatcttcctttagtctgggggtggaagaaggggtatgggggtggggtgctaattcacagaattggaattcactggcggtaaagtcctgggcgaagacctctcccttaaagcctgagatagcagggtgcagccttcagacacggcgcaggccgagttcctcagcctctccctgtggtccgacatcttggcgcccccgtcggggtgctgcgccagatccctgaggcactgggtcaggagcacgcaggccgacaccacgctcatggcgccgcccaggatggcggtctgcaccgccttgccctcggcgctcacagctgccgcgcgacccaggaactgcggctcggtggcgaagcctaccagggcgctcac

SEQ ID NO: 160092 - DNA, 1000 bp, Homo Sapiens
ttttttttttttttttttcagtgattaatttgacatggctttcattgggaaaggggagggctggcaaagagaccaatagacaaaaaggtaacttaaacacttacacatacaatggtttgctttaaaaaaaaaaaaaaaaaaagagagagagagagaaatgttactttcaacaaatggaaaaaagcactgaaagcccatgagtcaagccatagccaaaaccatgttctatcttaagtaggttcttttttttcctccctcttttttctttttttttttaataaaatctctccccagaccatcatcacttttaatcctccccagaaggggcttcatcttcagacccttcatccccagatttctcgggtggggggcttgtagatgttttcttttctggcgggctttccggttcctcatcttcttctttgggagaaggagtcttttcctttgatgcctttgaagctgtggggcgacccactttccctttgcctttcactggacttggcgtcactgtagcctttagtctgggtttgggcattttcttttcttttctttcaggtttggacttcttaaccatctttttgtttttctttttcgaactgccatagtcactatcgtcatcatcttccattaggaaatcttcatcgctgccggaatctttctcctggaatggtgcctcatcctcctcttcttgttcttcctcactgcccacatcttccatgagcatctctctctgtttagaagctgctttagatgccgcctgccgttgttggcgcacatttttatgatcttctttttcatcttcactatcctctgctgagtgagaatcatccttcttggtcttcacatctttgtcttctgagtcctcactatcttcctgtgaattctttccagatcgcctcttatttttagcttctcggggagatgatcgaattttcttagtgggagggcccgaatctcttccataatcttcatctgcatcatcagattcctgaaactgtga

SEQ ID NO: 160093 - DNA, 1000 bp, Homo Sapiens
ttttttttttttttttttacagataaacattttaattgattaaatatattactttcaagatctttttgaaatcgcacttgtactgtactaatcaacagccaaaggcaataagaaagtttaaaaccaaaaatattctgacatgaacacatgacaggaaccgctgctatgtaaagtaacatacactgctcccaagaacaatgatatttttaggagataattcatcttaacatgtgcaaggacaaatttgtaatcaaaggctggaagaaatatatattagtgcctgctttttaaaagtttattttacattttaaatacagtatttttctcataaaaaaaaaatccaggaagtgcctaactccatggtttctataccatatgtacatgaaagctgacagagagcctgacaaatgttctggatgtaacagtatgaacacctatgagctgggactacttctgaatcaaaattaaaaaacacaaattaagcactgcttaagaaaaaaaaaatccagtttctgaacaaccaaaagagaacagagttagatatgtacaaaaccaggtattaaaaaacagaaagaaatacagcacacaaaaaactcaaacaacccatatgtagtgaactgtatatactgcagttaatgaaaaccctcctacaagaagtgatttaggatttgaaattttaaaaatctaagtacttcagtaacaacatacaataacaacattaagtgtatattgccatctttgtcattttctatctataccactctcccttctgaaaacaagaatcactagccaatcacttatacaaatttgaggcaattaatccatatttgttttcagtaaggaaaaaaagatgtacctcttcccgtcaataaagaaataacacaaattaaagctataaaatttaagcatgggcatatgtatttccaattctccttaataagtaattccaaactggaataatgtggggtttgtgactaagtagtaacaaattaaaagaaaa

SEQ ID NO: 160094 - DNA, 1000 bp, Homo Sapiens
ccgtgtgcagtgttttaatttatccatgtacataggcaattatcataatttgaaggacactttttacttattagactataagaaaaactgtacagaaagtttatactataaaattacatccctaagtgattagggtcctcagtaacacagaaataagaaattgaaaagggtcattgctcggcaatccacataactacagagtagagcgcaagctattgttcgtgatcagaaagagacttcataaaaacatcttcacatattccctagcattatgccctactagtaaaaggaaggcctatgacaatgccattgtttattttgtgtaacgcagcccttctatttccctcaaaagtttttttttcctgctataagataaagaaaaggctgtatccctaagatatatacctaatgaagattatctcaacagaagctccaacgttttccatttttcactgtctttcctgaagttcacctggatgttccacagcaattttctaaccctttcattgttgattagcctactaaaagtagaattctttagcaacacacaatacaaaagacacaggctaaaacaggcctcacaaatacactttgaaataggtatatttggatataaatataactttccagtccattattttttctaatgactaaactctaaatttttaaaaatggaagttttcaaaccaacgatgtgttaagcccattctcatgacacattcattttaacttctcattcagtatgggaaaattttatttcttccctttgtcttgcagaataatttaggttcccaccctgggcacgattcaccaaatagagtaagaccacagataaaagtgacaaagaaacacaggcaatgaagaacacttccaaaaacaaatacccccgagaatccagtatcataccagcaatgatggaaatgatggccaacccaagattctgaatggactgcatgaagccatatgcagttcccagctgatgttcaggaactacaaatgc

SEQ ID NO: 160095 - DNA, 1000 bp, Homo Sapiens
ctgttacaaacaggtctttgttaaagatgagaagccaggtctttattaaagatgaggagggggcaggaaaggggggcagtgcctcctctacccactgcctttgcctgcccggggtgagggagcccctctgctccacccatgccccccatgatggcacatctgtatgaggctgaggcatggggggcagtgtgaagaacaggggcaggttccaagaaaaagaagaaaaacccttcccacagccctaataaataacagaagggtttgggatgacctgggcacaggcaaggggagacacagcaccctgaaccccaaaacctctgaagtggggcaagccctacttaagtaggggattaggagagagtgggtgagaggtggagaggccgcacacagggaggggctgagaggaaaaggggtaccccaaggaccctgccatgggggagcctgccccccaccctacagctgggctcgctgattctgagagaagactcaatgacaaacaatgacctcatctccctcctctcctttgcacatgcttagacacgggcggtcccccattgactggaatcatgcccacccactctagaaattctggaaaccaagggctcctattggctgttcagtcgctgaacactggctggagttgccctcttgcaggaggattccaagaagtgaggggaaggctcccattggttggagccaactccttttggttaaaattctgagaaccaggggttctcattagccaggcaatggccaatggggtcaagctttggcccttaaaagggcaatagtaggggcaagtgcgcaccttccatttgtgcccatcgggatatctcagagggccagagaggcagatgtctcctaaatgtccttctagccatcttctaatgtctgggtctggctggcttggggggcaggggactttggcactcacgtggcacacgcacacacacgcgtggcagggaagaagtggggactgggcagattctgggtgggtggt

SEQ ID NO: 160096 - DNA, 1000 bp, Homo Sapiens
ttttttttttttttttttttggcatcctcaaccaaatgttttgaatttattataatcgtgcttctctacaactaatgattcttgtggtttgcaaaccatgtctgcctttatttacctacacaaacacggaacagaatttccaataagagaggttcacacagctaacaaagcatagagtgtgtgacctcaataaggcattcaacaaagacacacgccgtatttccctctgactgcgttcccttaggatgctctgatgttggcgtcgcattcttctaaaagtagaatcaaatcttcaatcaggctgtgttctctgccatgtgtcactctcataatatcaaaagccagtctcagattcttcattgcttggggaaacatgccttgatgtagctgcagtttgccaactttcatcacttgaacccctctgacgggatggcttcctgggaaaaaaatcctgtatggctccatggtccgagtaccatagaacaaggcttcctccaacaggccgaggttgatgcaggcatccatggcgcagtcgagcaccttcagctggtagatgttgatatcgggaagccgttcagaattgctgcttatgatcgcctggcacatggccagaacctgctcccacttccagtgtgccttcagttcttcaatttttttcagggattcttgaacttccttccatacttgctcatcaccagttagcatatcagcatccttgtcctgggtttggcaacggaaacagtcacattcaaagcagtactggtccctcagctgcttccggcgctcctcactggtcatcagcatatccaggtagcagatggtgagctcctctcccacctcgatgtctcggactgctcgcagtaagaggtggggcccattgaacacaatcgaacagttggggtcacagctgtgattgagcaaagagatactgggatataggccaacaccaacttcctgcatctccgcattacagatggtgaaagagttgcagatcactttt

SEQ ID NO: 160097 - DNA, 1000 bp, Homo Sapiens
atttaaatacatttatttgaaccggcctgggggaggcttgatgttgatgggttggtgattaaagcctcccaaagccaatccttggcatggcctttgggactcaaaacacaggatctgactggtgggcacaataccatcttgaacgcccacaaaaaggtttggttttgttgccaaagggcaggtggctccaggcagggctgatggtggcagggtggggtgaggacaggacaagagatctgggtgtggaaggatggccgggtttctgcagcagcaggaggaaagggtgggagcacacaggcacagaacactgtgagcaggactgccaggccagtgtcacaagcgctaccatctgggtgtagacagacctgagctgacaaagctgggggagcaaggccaacggctttaaacacaagctcaggggcttggggtttatcccgagggcacagggcagccatgtagggtggagttggcatgagttaagcctgggctgggtgtgtagactggacagaggtgggtagggcaggcagtgacgagctggtgtgcaagagactttagggccaggcatggggggacagaactcccacctcgttcgtgctcccaccctccccagctccaccgcctggtcttcagtctccggcatagcaaggaggaacgggaggacctggatgctgatgagcagcaaggctcctcactccctgtacagaatgggtgcccagagagtgccatggagatgaatggtagggcaccatgctgggaggtggggctggaggagctgagttcccgcaaactaactgcagggcctcaatttccctcagagccccaggccccggcaccaagcctcttccgccagtgcctgctctggttttgtggaatgagcagaggtggggtgggcagtcctccgccccttacccaggaggaggcagcggcagcagccaggcggctggaggacatcagcgaggacccgagctgggcccgtgtggtcaacctcaatgccctgctc

SEQ ID NO: 160098 - DNA, 1000 bp, Homo Sapiens
ttttttttttttttttcggataaattttcttttatttccatactcttttgtgacatgtgtggcacaagtattcaatctcacagggatgttaaaacccacactcgaagggtgtccagtgtgcttaggaaatgtgggtttgcgcaatcacaggccaagcctgggggtcctcggggaagctactcctccaggtcacctgccaggtggatgcacttccttgggcaatgggtgaccctcccaggacaaggggaaccagcagggactcgatggcaccacacagcagccacctgttctgacaatgtgacacagaccaactaatgccagagcccaggagaagccacagcagagctgcctgggttggtgtcagaacaacaggcagaagtgactgtgccgcccgtgggctgtcatccaccggtggctactgtgtcattctggaaaaactatgatgccatgagactctgagaaaccgaatcactgcagagacaaactcataaaaattaaaaccaatccataaaattgtatctagaaactctgtccctggtgccaataagcagcaaagtcaacaaagagtaaaaactaaaacttcaacacattattaaaaagcaaaactggactcaactacaatcacttctggttaatccactagtgaacccaaaagtgacttaaaagtaaaaatcattattagcaagagattaagaacataacttcattgagaggtcaatgttaagagaacagttcattaaaagtttctgtttaaaaagaaaaggaaaggcccaaatagccatttcaaggcagagcaggtgaaaggcctggaacactcctgtgcgctcactgtcggctgctgaacagggagcccaaggccagcaggatggagggtgtgaccgagggcttggaggaggtggtgtactggatgacatactctgggtagacctggtgtttctcaaagatcacaaagatggaggggtcggacacactgttcacgcagctatcatagaaggcgttg

SEQ ID NO: 160099 - DNA, 1000 bp, Homo Sapiens
ttttttttttttttttaaagatttttatgtctttcagctttggctattttgtaataaatatcataccttctcacataaacctacttgggtaagaatgatttctctgcacatgcctttttttcttttagcagctgctgagtgtttgttgagtgacgtacaaggcacacctccaagtgttctgtacagcatttttattgatgtacaaaatagcctgttcaccattcaaaaacgtaatctgcatagtaagagtttctcttatccctatttacagagaaggtttttagtgcaaaaacatgaaattgtgtcccagcccaccccttctagcacacgcattgatcagttttgttccatgctggccgggggttatttggctatattttgggcctccagccattaatgaattgcattatcttcttcacctgcaatttgctcaatttgaaatcctctgagaggatttcttccgttagctgaacaagcaggttcccatcaatcttttcagtaacaaagaatgatatgacatcttcggacaaaccaatgaaccgtagtgacttggacacttcctctatagagagtcctgataggtcagcaggtggctgccatggggaaccgtcgccacaggatctgggggccagctggagatggagcggagatgagaaagggtaggaggcagagaagatgtcctgcatgccctttttaacaaaatactggtcctccgagagatctggtgacccagacttggggtcttcctcagcaccatcaattttcagaggcaaaggagatgtttcggaggcgaccttctcttccactagttttggagccctggggggtaaggcagggcatgacgtactctgctttgtcacaccagctgcaagagatttcacatctgtgctctccagagagtagctggctgacttgggacaaccagagacgctgctactgaattctgcagtgactgggctagtggggctggccaggagctcacagccatcaaaatcaaaag

SEQ ID NO: 160100 - DNA, 1000 bp, Homo Sapiens
gttttttttggcaactcagtctttattgatggtttcatttttggggtcaccagtgctaagaggtggaaggtgggggggcacctttatgtgtgtcaaggaccccagagcacccccctcacgagagaataaatccaatttagaacttacaaggtggtggggatgggaagaggaagggacacagtatgtacagatgcttaaggggatgctggagggccttcagcaacagggaatggaggtgccaaagaggaagtcgggcagagtcagccactgatctggaccccctcagcctcggccagagggtagatctcaatggcttccaccaggggtagcgcctccacagcagtctccatgacggccaggccaacggcagcctccgcctctgccagctgctgccgcacagctgcctgatgctgctgctgatgggtcttgcggtgcttccagaggttggagaaggagcggtagctcttgccacagtcagggcaggagtagggtcgttcgcctgtgtggatgcggcgatgttctgccaggcgcatggagatggcaaaggccttgccacacacttcacaggcaaagggccgctcacctgtgtgcaggcgccggtggtctttcaggtgggtactctgacggaacgctttgccacagtctggacatgggtatggccgctcacctgtgtggatgcgccggtgcacctgcagtgacgtctctgtgctgaacagcttcttgcactcgctgcactctagaccccggcggcgggcaggggccgcaggggatgctgtagcagtgcttccaagggctgctggagaggcaactggtgcacgagtggcccgtggggctcgaggggcagggggctccttagccaggacctctccaggcccagcagctgcatgggccgcctcgtgtgcctgcagtcgagcagctgagcccactttcttgccacaggtgccacactcaaagcgccgtggggcctgggcagcagcggctgcacagcggtgctcccgga

SEQ ID NO: 160101 - DNA, 1000 bp, Homo Sapiens
ttttttttttttttttttttttttttttttttttttttttttttttttttttttttttttttttttttttcgccattttttctttatgaggaaattcagtctggtcacattgtcagaaaaaaaatctaccaaaactaaatagtttctatatttttttcatttacaatctctgaatacaatgatctacacttcatgaaatgtcacccctcagtatccgtggatgcttggttccaggaccgccctccgataccaatatctgcagatgctcaagttcctgatataaaatggcacagtatttgcatataacctaggcacatcctcctgtatacttgctaaatcatctctagattgcttataacacctaatacaatgtaagcactatgtaaatagttgttatactgtattggtttttaaatttgtattatttttcatcgttatgtatattttttatctttttagaaaatattttcaggccgggtgcggtggctcacgcttgtaatcccagcaccttgggaggccaaggcgggcggatcacgaggtcaggagatcgagaccacagtgaaaccccgtctctactaaaaatacaaaaaaattagccgggcgtggtggcgggcgcctgtagtcccagcttctcagagaggctgaggcaggagaacggcgtgaacccaggaggcggagcttgcagtgagccgagactacgccactgcactccagcctgggtgacagagcgagactccgtctcaaaaaaaaaaaaaaaaaaaaaaaaattttccatccaaacttggttgaattcacagatatagagctcacggatacagagggccaactgtctatgacgttaaacatctacagagttgaaacataatctgtcatattaaatatattatctatgaaatcactacagatgatgtaaacagtggtacatggtttcattattttcaaatgaagtggaatgcaacatacaatattcaagtaaaattcattgtgactgattcataca

SEQ ID NO: 160102 - DNA, 1000 bp, Homo Sapiens
tttttttttttttttttttgggattaggagaacactctttaatgataaagcctgtccaagtactaaggacaattagagtaggcaggtgacctgtacaaagtattagtgataacacaacattcagcttcctaagagttaaaacgtgctgcttacatgaagggagatgatactgagctaagaagtcctggtatagagaagcagagagaccaacctacttcatattatttataaaatagagaatattctcagctaacatgctgggagaaaaaattcttccaaaaaggcagaattacaatcaatgccaagatttacaaattccatcatgtttaaatataaggacaaaaataaacatttcttatttaaaaaaaacccacaaatttccccaactatagcttatctgttagcacttctttatcagtctgactattctttaaaggccttaaaacatgaatttgggataaaaacaaataaaagtgcccaagttttaagaagccatatgttaacttaggatgttatctatatattttttagaccaatcaatgttttttaagaggtgtagatactggtaacttttctctttaaataaatgtttatatatttcaccaacaacactggcctgtggcacacagcatgtttaataaaaacacattgctattaaaaaaaagtatatgtaaacagaaaaaaaaccctctagtttcaacagaaaaacttacatccagagattcttttcccattatttcttaggacagccacagaactatttcaacctgtacccttaatccagcagatacatcttaataaaagaactctaattgctaagtactgaaataaaacattacttacaataatttcctagttatccacaactttcttcttgtagcaattgtgaacttaagatgacttgtttttataagctcctcagtgtcaatatatctcaacaatacatttattacttgtacaatatattacttcacacataataacataaaacatcatttca

SEQ ID NO: 160103 - DNA, 1000 bp, Homo Sapiens
gttcttccatgcctttattggtgacagcaatggacaagaacaataccaggcatagcagacaccctagcccagtacctgaggtgccaggcaggccctgaagggccattggcacatccagtcccagcccaagatccagtctacccaggccatgtccccgaatgggcaggaggccgtctgtccagtttgtatgtgtggatcagtctctctgagtgtctgagccgctgcctgcagggcccccccattctccgcacatggtaggggctgttaggaacatagcgtggcatcccccggtggaccactgggccccagtgctgaccatggggattagggccagggattggaggtggcagagggccaggcacaaagttcactccagggccacatcctaagtggggtggcatcgagaagtcctccactggattatagttgaagaattcatggggtgggaagggctggcctgggaaaaaaggggtatcctggggcaggggtgggaagaggggaggtggcgagggctgaggaagcgggtagggaaaaggcatgggaggaggcaaagaagaaggtgggggtgggagcaaggccaggtgctccccgaagtctggggtctgcctatggcttccctggaatggatgattcatctctgcccagtcctcaatccacgggtcagggggatagccacgcttgggcagctccacgccccaggcgtcagccacatgggtcagaagcaggtgtgagaggtggcggtgtgcatgctggtcccagtggacaccatcccgatgacggtgctgtactgcatgccggaagtgaaagtggaggtctaggacatcaaagcagtggtccccggccagcgtagcactgtagaagttcccttcaaccacatcccgccgcagggagcctgccaggggctggagctctggcaggaggaaacccccagtgatacgttccccgaggggcatcgccatgttccacaccagcaggcaggagtctggcaatacttggtcca

SEQ ID NO: 160104 - DNA, 1000 bp, Homo Sapiens
ttttttttttttttttttactgttgaggctgtagtgggaggaagaggtgggccaccgctggacactcttgggccgaggggcaagggtggacatagcattggcatggcagcaagagacttggctgagggcaggggtggaaggatgtctactgctgaagaccaaatcccttgccactctgtcggttgctactaagtcaaacgcaaacagaaacaggaaaagacagcaggagcacagaggccagcatctccctttccttatgccatggagccaggtgccaggcgtgggctggtccatctccctcctcagcctctgccaaagggctgctccagtgctcccctcagtggaactcctcagccaggcgctctgaaaccaaccacagtccactgaagttgaccaccctaccgagacagaccaaggctcacaggtgaaaacccctttcaacaaaattccttccaggtaggaatcagaatatgatgcgtttcccatctgccgggttctgctccatgggacagtagggacacttcagctttcctccattaatgagcttattgagtgcatctcgggagataacatggccacagatgagcttgatgggagggttggaatctgacgtctgctggcggaggatggggcaagcgaacacggagtggtaccagcacttcatgcctagttcaatctcaatcggtaactcgtccttgtgattccagaccccagtgcactgccgctgctcaatcacagccttgatgttcatcaacacaggcagcgccacacagccagaggcaaagctgacgctaaggggggactccacagaaagccccagcagggaacaggcgtcccgggtaaaggtctcacagatctctgcccagtggctgctgtccagcaggtggcagtagggtgacttctccaagcccagccgcaggtacaccaggctgcccatcatcacctggatctcccgctggtgcagccgagcaaagggctggaagtgccgagcatagctgag

SEQ ID NO: 160105 - DNA, 1000 bp, Homo Sapiens
tttttttttttttttttttttttttttttttttttttttttttttttttttttttggggcagaaacattttaattgtaaacagcaaggctctctgccaggcagcccagatgaacaggggtggcactgtgctggggtgaggtgctttctttgtgggaacgaaagcagacggcccaccctcgtctagccctgggcccctgtccccaaggccagctcgctgagcctgcgctcctcctggaagcggatgagggcatctctctggttgaccaaatccaccagcttcctcaggacctggtcctcagcctgccgatcagcagctgtctttaggttttcttcccggttcatgtagcctcgtagctcctggtccagctgccactgtttctcctccagattcaattcctgcaccgtgatcatgagctcggcctcctcagccaccaagctgtttttcttgtcaacgagctgtagcagctgtcctacccatagtttcttttgctgttctggggaactgctctggcgcctcaaggccagctccagcttcacgccctcggcctctagctccctcaaggcagcctcaatctcatttagtcgccgttggatggtctgggccttgcagaacctcttcatctcctcctccttcgcacggcgcagcagagtccgacgccatgttgggtagttattcatggtgcctgaggtcttggcaaaggtctgcagggcctgttccacatctgagtccaaaggcacatcttcttcttcctcttcactggagaagggactctctttttcctccttctccatggccacaagagcttgagggctctggactggcaggccccagcccacaaagctgctctccagggcgtggcgggccaaggcggagcagctgcggggaggcttgggtggaggctccatttccgggtcaggggtaaggttaagggaggacaaccgctggcgctccgggctggagaggcggatctgccgacgggtgggctggctgggatctgg

SEQ ID NO: 160106 - DNA, 1000 bp, Homo Sapiens
tttttttttttttttttttcacgtttccaattgagttttattctagaacaaatggttttacaacaaagctgatcttaaatagtacatttccccgctgataacagcgccatcttccttcgacccccagaccaagggatcaaagctactgctcaattgagtttgacatcagctaccgacttttaaggaatctagaacaaagttctggagccaggccagaagtggtaaaagattcagttagccccttcctctgtgctgtgctgacagggagggagccagtgactggacaatctatgaccccaagtttgtggaacgtggggcttcagctgagggtggggtagtgtgatttcagcagtgtctccacctccctgacccctgcgctgctttgctctgttgtcacctcccgcacagtgtcgggacactgaccggaagccaaacctgtgcctggtggccacagacaagacacacggatatccgtgaaccttgctgctgtgccctcaccgaggccagcgccccacctgctggaacagccaagccggagcagttctgtctgggccacagctgctcagcctgtggactcaggtgttatcctgaagaagttacaacaaattctcaaagaataaacaatgggcttaaaaaaaaaaaaagggggataaacagaaactcacagtagctgtggctcaccatgtgccaggcactgtgccaagcacttcacatttagtgctcattacaaccctatgaggtaggccgtaccactatccccactttacagatgaggaaaaaacaggctcaagagtgaagtccctcgcttgcttagtatctcaaagctaagctgcaagcaaagatggggctccaaggtctgtgtgacctgagctcttggttatccaatacttcaaaactgtcacttaggaaagaagagaacatttttagaaataggagaaaacccaacagccacagtgattgtcaaagagctgagggggcatcagaccaggttcgggggcac

SEQ ID NO: 160107 - DNA, 1000 bp, Homo Sapiens
ttttttttttttttttccacttcaacttcagatttattttaatgatatatacaggagttaacaacttacaattaaaacaaaatcagttatgttaattccacataacttaaaatcatgcaatactgcatggtaaaaacaacagctttgttcatacacaaaaattattattttgaaactcatgagaccatctagaaatttttcaaataaactttttgcaagagtattttataaaaatttaaacacctgattaatcagttaatgcattattaggaaagataataaacattattagtaaagtgaggttacaagcaattaattttaaaattacaccaggtacagggttgaacataatctcatgaaataaatgtttaagaaaatagttttgaaaaagatctcatactgaagccatgttaaattttgataaaccaggttatataaatcaagtcgtttattcagttaatgaaaatatgcctaacctttcttatactcataaataagtacttatatataatctttatatacaagtgaagaaaagttcaatgtaaaaaatatactgccaatccacttattatggttgaaatatttatctacacattagactgcattgatgaaaatgtccaatttaaatcacatttgaccagcataaatatttaagctgagtactgtcgtaaacaatagagaaaaaaatccttttatttttattttttatttcattactgggtaacaatctacttctcagcttagaatgctatagaaagcctccacatttaatttaatcaaatctgaaacccaataagcttaaacaaagtgaatgtttttcaaagtgcataatttccaactcatccacttgcaatatttatccaattccagttcatcagcaagaaaataaaatgtacttggctataaaaatactgaggaatgttatcgaaaaggaaaggctatttggtagaagtaactacaaaaataattagtttaaatctttgtaaagctttaatgtaag

SEQ ID NO: 160108 - DNA, 1000 bp, Homo Sapiens
ttttttttttttttttcctgggagacttaactggtttaattgcttagccctggtgcctcagccacctctcatctgtagggtgagactcaagtccaggcaccaagacacaccagcacccccaacaccatgcggggatcattggcctgaaacttggccagagaaagctccagtcctgggcctgtaagagtgggcgctgggagtgtctgaagccggcacggtgtcccctgcgttgtcggcccttgcaggtgaagtgtgtgtcgttcccccactttcccccgaatggcacccacggcctcctgctggagcccctcccgggcccccctcagggagcagaactctgcgtgtgtgcgaggttcagcctggccagcctggagctccagctcaccctggggtgtggatggatgtagaagtgggtggggatgggggagcatcacaggggccaggaccccccaggtgcacaggggaggccagagaaagaggccccagccccagggagttctgtggcctcaagagaaggtggacaaggggctggcaccaccaagcagcaggtttggctgagattagtcttggtgtgggctgaggccttgggtactgtttggcctaaggatgggcgttgtgcctccagacaggggcagggacctctagccagcaccacaccccctccgtgtccttgatacaaaatacatacacatataaaaataatactccatgcattgtgggtgggcttcccctccgcaggccccagcccaaggcagctgggcctagctgtcctcccccctcctctgattcatggaatgaaacttgttcatgagttcttccagctccgacccactttgctgcttctccaggaaggccttctgcatggtgagctggctgtacacgcggacgccctcctcgccgcacactttcttcagctcctccttgttgagggagaagagctgcggcccggtcaggatgcccaggttctccacgatccgcgggctgaaggccttggcttcca

SEQ ID NO: 160109 - DNA, 1000 bp, Homo Sapiens
ttttttttttttttttaagacagagtctcactctgttgcccaggctggagtgcagtggcatgatctcagctcactgtaacctctgcctctcaggttcaagctattctcctctctcagcctcccaagtagctgggactacaggcgcacgccaccaccccaggctaatttttgtatttttagtagagacgggctttcaccgtattggtcaggttgctcttgaactcctgagctcaggtgatccacccatctcagcttcccaaagtgctgggattacaggcatgtgccaccgcacccagccatgtattatgtttttcgtatctaatatttatgacttcctgtttctacttcatcttcccttgtctctttgagaatatttattgtttatgttttggtctgctcattctgattccaaaatatgtttatgtatatatttaaaggcttggaataacacgtacacaactatatatggtggtcatctttgaaggactgcagttatgaaaaaaccatcagttcaactgtcctggacagcatttcattttattatgtaactgtagaaagccttgatcaagataaaaatagggatgacttatcagaaactgaagaattttcttaggaaagcaaagtttactgaaggataccttcattccagccatgatgagcatctgtcttctcaggcaatcatgatgaagctccagggacagtataacccatctctcccactcatccctgagccttggtcctggactgaatgtggttagaggttgtggaaataaaaaaaagaaccaaaataagaacactctccataaaagccaagctcagagactggtcctcttttgcttaggtacaacaggagcaggaaggatcaacattcttgaaagcataccttctattcatttggcttttttgacttggggcgccagtgtagagctgagcactccactgccctttctccactcacaaatgtctgcataggtacacgtccggcacttccaagcctcct

SEQ ID NO: 160110 - DNA, 1000 bp, Homo Sapiens
tgacagtttttaattgtgcctttattcaacttagttcattaaaaatgttttaaagatcctataaataaagtgaccactcacatgggatataggtcacccctcagcatgttattttttttcttaaaaagcagtatttcttacaggaatcttactgatcacacggtagttacaataatgtcagatatgatgtatacagtctaaacgagacagtccagttaagaatatacataatgtaaaaatacacatattaaaagttagccaagtggacagacgcatgcgggggtggggggagcaggtgacaggaactcctttaacaatcagtagagggcccagatgcaaagaatctggttttccccgttacagtaaacagctttcactaacgtatacaggtatttcatacacatctaaacacacaagggtaagttgtgacctgctacacatagggtctaaagtggtgtaattgtgattttcctgtgatactcccaagaaaactataaatagtgaaccccatgcaagtactgggaagcactagtcttttatcacaggttgaacctgaggaggtttaactcttgacattagtatctgtaaagagcgtacggctctttttgctatgttttctccacaactgacatgcacttggtgtgggagaattctgatggctgtctgacctaagagtgataactactattcaaaatgtgggtaccttttcagtaatactgagttacacatttaacattaaaaaaacaaaaacgtggatcatccacagctttaagccggaaggcagaagggagtgtgtctgaatgttaatgttttcagttatactattttgtgtttctcccgctgtactccagagtgacactggtacactgctgctttccgtaacaacacaggcactagtttgaactcagacaaaacctgaaacagaagaaatgccactctttctccagggtcttttaagaaactcgatcaaaattataaattattcaagtttccttttgag

SEQ ID NO: 160111 - DNA, 1000 bp, Homo Sapiens
ttttttttttttttttttttttttttttttttttttttttttttttttttttttttttttttttttttttttttttttcagatttaaaccgtctttatttctacagcaacatctgaaaatagagagcagccgcctcacccgcaacagggggagcccctcctgccaccaggggaccgtcgccgcccctcgcgagaagctgcaggcgtggggggaggcgaggcaggatggctcggtgggcggtgcccggggcggggtcggccgtgcctgggcggggccgggtgggaggggcagtgcataaggccgggatgcggggcagggcccggcggtgggaggacggactaaggggaggtccccgtcctgggccacggggcgatggcgcgggtaggacgcatccctcagaggccaggaggagcgcgagaaggtcccaggacccccttgggaggcgccgctcccgagaatgtagagcctgggagataccaccgcacggaatgggggtgattaaggcctgggcggtaccactagaagagggacgaggggaggcccgggtagtaccgtggactgaagggaggcgcgcggccaataacttatttctctatatacagaagcaacggccgggttgagtcgggagggagggcgagggtgccgaagggccggcgagtgcttagtgttcttggctctggggtctggggaggccaggccactgagtctatggtggagactccagccggcacctcctgctggcccgaacctagggaagagggccctgctggaaggaataaataagggatggagctggagtgggcaggcccagcctccagggctcaggctgagatgacaagggagaaggttaccctgagattgaacagaaaagacaggggctgtgggagagacaggcgggacaagcagcaggcccatgcgcagggctggggtgaggggggtgtgccaggtgggcgctctggtgactggctgccccttcagcattagcccaccagggagcttc

SEQ ID NO: 160112 - DNA, 1000 bp, Homo Sapiens
tttttttttttttttttttttttttttttttttttaccacgggacactgttaagtttattctagggtgagtgggtgcccaaggggggcagtgagtatggccgaggtcacctggtggcagggtgctcagggatggccacaggttctatagggccctgcagggcctgagtctctagtcagttgggatgcttcaccttctgccccaccccaagggggttggggcagtcatggatgtagtagttttcgtaattcgcagggatcagtgatgggcactgagcaggcttgattctcacacacatatgcagtggcctggtcttccaaccgtcggagggtactcaggaaaggcagctggcgggacaggaagctcgaggggtccccatcagccagaatcagcaccttgttaggaatgtagacagagtggacgcactgcaccagggccttggtgtccttggcctgacggtctccacagatcacgatctgcttgagggtctgctgctgggctgagagggcgcggaccatctcgggcaacgccaccgggacacgacgcatgcgctcggaaaaggcggtcaataggcacacacacttgtccatccagtccttgtggcccgtgaagccatgcagccggagcaggttgtgggctgacacggaattggcgctgggctctgctccatcctggtcgtccttcagacgcaggggcaggccagcccccagctcagcctcactgcagaagtagccgccaccctgggagtcccaaaagagcttgtcctgtgtgtcctgcagccgcagagcccactcgagccacgcactctcctgtgaggcctcatacaggtccagcaggccccgcaccacgaaggcgtagtcctccaggaagccccagcagggtgggttgctgtgctccacagtccccccagggccggtgtagcaggtccgcatcaggcggccactggccacatcaaacatgtgccgcttcaggaacttggcaccattggtggcatagttgat

SEQ ID NO: 160113 - DNA, 1000 bp, Homo Sapiens
ttttttttttttttttttgtattaataaactagcagctttattgcccttcaggggccatgtcttcacttgagatgtcgaattgcttgagggaggaaaacctgtaagaaatgatggagatcagggaacaggccttggggatcctggagcggggtcacagtgagcattcggtcagccggggagacagacgccacaaagctcagcaggggctcagtttctggcctctcttcgccaccactcagtcctttcagctcctgggtgacctgagcctcagtcgccagccaccctgctcttgtgccagcgccacctccagctccctccttggtttgctgctgcaagcgtctacgggctcgccgccgcccttgccacactcggtgccacaaggcacagcgccagctcgctgaggagggcagggatgcccccttccctgcctcaccctgagaccattcttgggctgcctcatgtcccttgggcccccgctctgccagggctgcgtggctgggctgcccctcttctccaggggctccatgctttccagtggtcaggggcaggtcccctggctgcccagggctctgcatggcccagtcctgcaccatctctccaacctctataaccatctcttctaccctgtcttccccaccgtcccctgcacatccctgctgctcctctttcccctcctcacagcagtttttctgtccatctactttgagtcttttgcttgtccctccctgagaggactccccagttccacctccttctgaccgcgttctcttggttgcctgttctatatggcaccccagtgcttccctgaatacctgcaccagggcagcagtgagctgggtgaagggtgcaaggggtaaagggatcggcgtagcagagagcagggagctgggggagctgggctgcagaagagggagcagcccccagtcccgaccccgggaggaacggcgctggtactggaggcttcggcagtaattggctgctgctcggcagcagttctgt

SEQ ID NO: 160114 - DNA, 1000 bp, Homo Sapiens
tttttttttttttttttttttttttttttttttttttttttttttttttttttttttttggctttaaataaagcgtttattgattagtagaagcatgaacagtgtgcataatattttcaatacaatatcagggagggatgatgggaacccctcaaaaggcactagaggcgcagatcttcgggacaagagggaagagatgcgccagagaccagggctgcggcagctgggggtccctgagtgccaggcgccaccacacgtcctgtgggtcaaggcccctcctctggggagcaggtctagggcacggaggatgcagggctgggaggggaccccacctcggggacccaaaaggagtccatttctgccctgccccccgcaaagcagcaggggagggggcctgggggtcctggggtgggggatcccaggcctgggcccatcctggcttgacccttgtcccaggaacaagaagctgaggagggacgacagccaggcccagagtgactcacaaggacatccaaagaagggactggattttcagagggaggtgacttggtgactgagaggcagcagaggccaaagcctgaccccagaccctcagggagggcccacccaacctgtacccctcaggagccccgtccggctccccaggcaaccactgaggacctcggggtggcctgtagaagacagaacccagccccattacaccccttgctgccgctccatccccaaccaccagagggacagggaccagagggagacctgtgggccaggcgggcaggagggaggcaggctggggccgggagaaggggatacacaggcccataaaacctcaggctccccataaccctcactcagccatctcactcactcactcccagcatcccccaggatgggggtcccctccttcactcaggacacttcccctccgcagacctgcacgttctgggcctttctcatttcaccccaggcctgcccaccccatgaggcaccccctaaatctcat

SEQ ID NO: 160115 - DNA, 1000 bp, Homo Sapiens
gcatgaaagaatcagtattaacaaaacattaatgacattcccttccccatccctgtggatcaaggcaagaagggccattcgccgatgcagataccaggagttggaaggccgcagcagttttgaggcctgcgttcagtgtctggacttccaggtcaagttctgagggtctatggcatctggctgaaatccttgcttcagggaagcctcatgtcctggctcacatgtggaagggggcatcaggagccccctgggccctgtgaaggcccatagattcctgtgtggaggccaagagagcagggtggttcaaccggacctgggccttggctggccgcagccgcccacccccgcccacgtggatgttaaccgtcgtggcatagctgagccgcctggctgcgggaggtggtggctggggctgggggggcggcgaagatgcccgtgacgtgggagcagaggaccaggagccccgggaggctgcgggggcccctcccccaggcccctgccgccgagccaggctttggctgatatatgaggctgccaggtatctggagagggcagctgcattggggcccaggagctgacggctggaaggtgggggactatgaggtggcgtcaagtctgaagactccaacctggcaacgtgagaggctaaggagcctcctggtttggacaaaaccatggtggtctgaactggggtgggtgagaggccctgaatgtctagagagcctcctctctcaggtaaaggtgtggcagctggaacatgggcatctatgaggctcttctgctccaacgaaggtgtgagtttttggacctgtgtatctgtaaggcttggctccggaagtggaggtgcagccgctggaccctggatgtctgggaggcttccctgcttgggtgaagttgggagggcttggacccagatgtctgtgaggacttgtggcaggggcaaaggtgtggtagctggaacctgagtgtctgggagctcctgggacaaagacagtggggc

SEQ ID NO: 160116 - DNA, 1000 bp, Homo Sapiens
ttgacaggtggtacagatatttattttctcagagcagagtttgggcctaggccacggctgcccctgtagctcccctcttgtaagagatgcaaagcttacttctggggcacacccatctccagctggaggtgcaagcaaaggccactgtgtaaggaggcaaaactctcccttactgcctgaaggatctccaacaagcatattctggagagctctgacagggagcattttacaaggtcccactggagctgaggcttgaggtcaggtccaagtgcaggcctccttcccatcacagcttccgagccttcctggggcggcagccgttgtgtgggattggggtgttgtctgtgattgagatcacttccaggccgcccatgatcagtccgtgcatggcagacaagcgtcctggccccaggcctttcaccacaactcggatgtggatcacgcccttttgtttagctctcgccgctgcggctatgcctgctgtctgtgctgcgatgcctgtgcccttcttggcattccgaaatccctctgtgccacaggaagcaaaggcaaggggctcattactagcagagactacctggatctgtgtgttgttgtgggatgctttaatgtgtgcaattgggatctcctcaaatttctttcctgcccacctcagagagctctcctctcctggaatgggagggtaaatgctgaacttggtgtggctgggagccgcgttctgttcaactttctgcttggccgcagcgtcttggagctgtcgagcgcctgtgcagatggtcccggccggcgttctggccacgaccctgccggctgtctggggccaagtccaggaccgcaggaaccgcgaccccgcgtttctcacagcctgcatgacttgaattgaccccagtcagtttccgtctgcagcgacagtcacagctgcgccggcgccggtaccatgagtgcctgtcggggaggggacagaagggaaagtcatctactcttcattaggtccactgaa

SEQ ID NO: 160117 - DNA, 1000 bp, Homo Sapiens
tttttttttttttttttgtacttttaattttttttattttttcaataaagggacaaaatgggtgtatgaacaggttaatgcagacaactgccaaaaaaacacagacagtggtttttccaatagaacttaacaaagaccagaaacaaatacaataaaaagccaggttgtaatgacctttggtcatctaaataaaaaaaaaaataaaaacaaagaaaaataaaagatcaaattaagtgcctctgttttgaacagggcacataagcaataataaatagtgactcccatagtaaaagataaaatttcaagttacgacaaacagctttcattacaggaatagaaaaggccaataacaaaatattctgcattgccatttacaaaaaagtattgactaaagcgggctttctctttaatatgctttgcatatgaaattctttccaatctaaatataaagcaccatttagtttttggcaatgaaaaaaactgcaaaacattggtttttttttttttttcctttttttttctttctttcttttactgcatatgaaggtaagatgctggaatgtagggtgatagaaggaaagggacaaaaagcacactacataacaaaccaacgttattagcttgcagtactgcatacagtatggcagcaggaaaaaggaacaaaaaaggatatgtacaacccctatgacagccatccatgtgacattctagcaggctcccccaaaccgccattatatggcttctcatctgtaatgtcacacttttttgtttctctcttttttttttttttgaagcatacaaataatttgcactatattatcctgccaaattaaaaaaatatactgtggcagcctgtcttttttttttccactaccaaaaaaggtacattgataccttttaagagaacaagcaacagttaaaaatacaagcttcaatataaatactatagtgcctaacactagatgaacatttaattcaaataccattctagaaatacaga

SEQ ID NO: 160118 - DNA, 1000 bp, Homo Sapiens
ttttttttttttttttttttttttttttttttttttttttttttttttttttttttttttttttttttttttttttttttttttttttttttttttttttttcagccaagagttctctttattccctttgatcctcccccaaggtgagggcttaggcagctgtagaaccccaggaaagaacggaatccaggcaatctgtttagagaccccccactccaaatttatccttttcctttccttcccctaagatgtttccagggccctctggtgcccacactgtcctcttccttccacttgggggtggggaaatccttcctgcgaggtcagggcatttctctacaaagtggcctgaatgaggccaggccctgagaaggagccaccagctggaggaaaggggctccaagccttgcttttaacacccctgcaaaacccccaccctcccaagatgttcacaaaaggtgagaaattcaggtacgaaaccatcaatggacaacttgaaaatgcatgttcctcaggcctatgcagttcccagagactcttgacaccggtctctgctgaggctcccagcctcagtttcccccacagcagcacgggccccactgtgccgctcttcaggtccccacagccctgcctttggttcctggacatttggtattctgccctccactctggtactatcagagtagggcaggctctggattaaagcttttagccggtctaaagctactttcttcaaagacagtgggaggagaggttgctggggcatcagccctgcttcccacagctccttaggcaagagcttacccagcagctgtgagcaccaagctggccagcagaggctgggggaggactttcaggccaacacctgccccagctgagtttgggactgtccttaagcgaggtctggagagaggcagcggcagcagccggacggggagcaggccaagccggaaccacagcctgcaggtgtgggtgtgtgtcatgtgctgagatgccaggg

SEQ ID NO: 160119 - DNA, 1000 bp, Homo Sapiens
tttttttttttgagattacaacaggagcctgtggatttacttattgttcaacagtaaggccaacctttcatgtcttatcagaaataaaggatacaatatttgttataagcctgaatcataaaaacagcagtgagatagtaaaacacttgacagtggacgatctcaaattaatagcctagtaacagtagagcacaaactgtaaaggtcttcttcatgttctgggtttggggtaagtcagaatcccaagtcccaacagtaataagagtttttgtggagagttggaaaccagctatttctcatcctctgaaaatctgaattttagcacctagaactgttttgggtagccctaagaaggcagagctgcttcaaatattatattctaatagttaccttcaccttctcttaaaaattaaatggaggcagaggactgggtgctggcaccacccagaacttctgactggggctacatgactcctcctgaagaaatatctctgcaggcagtaattgcacagcttaattcttctagactgaaccacttcagatttatgccagtgaaaagcaaacattgtttctaagtcatttaattgtgttactgtctctcaactttatcagatgcagctgaggcagggaggcctgcgtgtggtcctgtgggatgctctgtagtgcttccaggctcgttctaaatgctcacagcccaaagtccctaacgctgcttcttccagacacataacaaactactcatttaacaggttccaatggcattcgtctcaatccaggatccatggtgaaggctgcatctccaacaaattgacaaccttgactgcagaaccataaactagtacacacttaggtgcaaacctggtttattacgttctttggttaaatattgtttctacatcctttcagagcattaggagaacaaagataatatttgatagaaagactgaaaacacatcctttgcttttcagagaaaagactgaatttacactggtactgtta

SEQ ID NO: 160120 - DNA, 1000 bp, Homo Sapiens
tttttttttttttttttctttttttttttttttttttttttttttttttttttttttttttttttttaagcatccacagaatgtttatttactgtttaaattactccatattttcatatactgtgaacagaaaatatattttaccccacatatagtaaaagcaaacaagtgcaatctttcaaacattaaaatcataatcaaatctgtacaacagataaataaatgtatacctctaacagttagcttgtaaaaaaaaatcaaacaaaaagcaaaaacatctatggcccaaattcaccagtttacttaaaattctacttatggtaatacagctcaatcataacaacttgcatgtttactacactgcacaagtttagactgataaatatttaaaataggaggtgggtaataggaaataccaaatggctataaagagctttccaaatattggaaataatatacgaaaattaattagtggggataacatattaaatggatccacagggtaactggtattacactggtatagcttgaggaaaggaaacaggtgaacgtttggattggaaaaaaaaattttggcttttttataaaacgaagcaacaataacatcaacaatgacaaaaccctgtcatggagcctcagaactattctgtgagacaaagtgtacaaagatttaggcttgcatacccgaaaaccacagttaggaagaaaaatcatttcaggaaacaacatcagaacaagaacacatataaattaaaggcatactgtttatcattccacttcattgcacatataagaaaacaatactgccgtcattcttgagtaagaaagtttccaatgaaagaggaagttccacaatgaatacaggtgcagacagtcttattaccacaaatttagttatatcaaaacacttggtggtgtcactaagttaattaaattatctatactttttactggaaaggtaatcatttccctgccttcatatgttaacttaaaatcactt

SEQ ID NO: 160121 - DNA, 1000 bp, Homo Sapiens
ttttttttttttttttttccataaatatagaacttttattcctattttatctttaggctatgcaaaaaatggactaaaaatttttcatttgggtctttgtaataaacatgtaaatacatatttacaatggagatgcttcctgatagaaagtaaacagaagtaattttggtcttcactagaatccatcatatctattttcgaagatgatgtaatacatcatgtttactcaaaatttgattccttttatacacataatttaaataattactccacttttaccattaatgtttcattctgtatttaaatttccttcaagaaagattccttgatccagtagtagggaactctgtttctgtacagttaatgtgtaatttttatccttctggcaatattacaaatactgagtcatttaatcttcattgtttattctccaggggtaattcttgagttatctcacatgatgtaagtaccatctttgcagtatttcatggattccatttgttttgtcatagccagaacatcatgaaatccagtacttaggccagacatatgttgaaagtatgcctccttttccacttgaattgttaaattgtttactccagcatctttaagtattcctgtaacctgctgtactattctttgttctagcacatcagatgtcacctgtatatgaattgttcctgccacaatactagcagaatgacgccaaaaatgagggtctcggtatgatattaatccttcaattttctgtatcttttctaaagcaatatgtagttctttttcatattctggtggcaatctcaggagtagaacctggcaggcatctttaatcagtggaacaacactgagaaatattaatatagcaataaaaagagaacagagtgggtcagcgatgaaccatccaaactgctctataagaactgtggatacgatcacaccaatgctgccaagagtatctgccaaaacatgtagaaatacacccctcatgttagcattcatg

SEQ ID NO: 160122 - DNA, 1000 bp, Homo Sapiens
gagcacataaggcttttaatgtttgtgacattctcatctcaccggtaaaataatgtgacgtgtactggaaatagaaagatgggtggagaccatcctctcctagcaccctcaacccaaaacccaagcagcaccagcagcccctgcccaaacattctgtttctccaaaagcctcccatgatgggcatggcatcaccacactggaattcttcttaggttctttattagtttttcagcacagttaactctttctacgttgactagagttttgttttacattttatcatctcatgacagcagccaccagaatacacaaaattaggctctttactttgtgcggagaagaaaataataaacattaaaagttcaccttgaccaaagagacaacctccagaagaacaccacacatgggaggacccgatgtacacacacacacacacacacatataatgtatagatatttatagatacatctggaaacagcaaaaaacaaaattccaagatttgcagtgttatctacagtaagagggatgaattctaccagctttcaaacagtcacattcagtattcagaagaagcacatgagggggtagaactgggcagaaactaacacgccaccaggctagtcatggcttaagattatagaaggggggtgatgtgtgtagaggaaatacgcatataggtgtcctctcagcttcagaacacccgccacaacccttcccccgtccacagccctgcatgttttcactgctctctcccgttttggggtttgtgattattgatttagggtctgagacaaatggctctggtttctgggccgcaagatgctatggggtaaggtgagtggatggaaagcatacaacgcagtcctgggcttcaggggacagcaggaggctggggtgtaggggaagcctttctcttctacctgacccttgttcatgtccagaaccttcagcccccagtaagccccagcccaggcggctatggggtgtgggactgtaga

SEQ ID NO: 160123 - DNA, 1000 bp, Homo Sapiens
gcaaaacattacacaacttttttattattaaatgagaaaatctcatttgttacatcgtcacattgctagtcagagaaatgttgcagtgatgaagaaagtcaatgttggaccaacccaagtcctcattcctacaacattcatttacaaagaaataatgttcaacacagcccaacaaaacattcttggttttcttcatattgaagtcccccaaaaaatcctcttctaatggggtatttcactacataaattatagttcttcatttttacaattcaccccaaactgtatgagagatgtatcacactaagatttctaaagctgttaggaaatccttcacacatcgtcgtcatctgatgtatcactgctacttgtctctgtgtcatcattctcagttgtgggtttgaaagtgctgttcttccacggtccaaacttgaagtcacagatcaagccatttttcaaaataccattttttctcagaccattcttctgtaactgttcactaataacttggaattctctcatttcatcctcagttaagggagcacatgtttcatcattttcactgtcttcctgccagcccatttcctttaacaatctgtgttctgcctcaagtgaacttgaaagaacatcagtttgtgggaaggttgaagaccgaatgatctgctgggaaatcactgaggcattgccattctcttgaggaatttcattttcatcgaagtttcggtttatatccctttcttggtgagtactattgctgttatgtaaattaaatgagtcgtcatccttctctgagccagcacggctttcatcttcatgttcctcttctactctgtctcttttcaatgctttcaaaaattcactcttcttatcagtgcgcattcgtgtcagtttggttagacgaggctgctgattaagtttgtcaacaggagaagaggaatttgagcgattacactctttcactgaatttgtagatggactaaagttcttggcagttgatttaaa

SEQ ID NO: 160124 - DNA, 1000 bp, Homo Sapiens
ttttttttttttttttaagttgcgtgacatttattttgtcttgttaacattaatatctgtagaaacatttttattgtcagtataaaaattaacaggttttattaaatactttctccaattttgtaacacataagatcagtgtaatctgcattcatcttgcacggctattgcaaagtgagtgggtgtttccaaagcaaaacacaatactttagtacagaaggaacaacggcgatattttgtctgatgtaggtatgaggctggatcttttggtgaggtcctgccagaattagatgaaagcaatcccttaaaaagatggacgtatccccaaaactatcagcagaacaactctgtgtttcaattttctatgatgggacttgaagatcctaacaggcgtctccaacgccaaagagtctggaagccattatcaaaattcactgaagagaatacaggctaatctgattaatgtgcaactcagaagcagaaggccagctgccagagagaagcacattctgctatcatttcaactaaggtctgtcctcaaggaatggattaaggcatcttttaagaggacgctggtaccatttatcttgggaagtccagttagacgttgcgttgacgtaatgacagggttgcacaccaaaatgaaacaccttcctatgaatgagttcttttaatatggggcatttaggaggtctaagaacaatcgtctgacagcagcatttaaacacaaataaatcaaaacttcattttccccaaattagtcatatattgtaaatattctcttttcaaaggatctgataactagttaagtccaagcaatagattaactagtctgctgtgctgcctgcatagaaatgccacttaaattacaaaaaaaactataaatgattaattgttttgtatattaccaatttattaataaattaacgttataccattttccctgaaagcaaaagtatttttccacctctgctcggtgaaaattaagaaattatgtgta

SEQ ID NO: 160125 - DNA, 1000 bp, Homo Sapiens
ttttttttttttttttttttttttgagatggatgatcaagtttattcacaaatgattttgaatatatttctttaaacaaactgtttctcaagaatttccattttccttcaaaaaaaatttacacaataccatatagctcacacatacagtgcagagcaagaatgtacatattcttaagtactcacgtatgagaagagagtgaaatgggacaaaatatcagtaccagtataacaaaagttagtaatttagaaaggaggaacatgaagtaatatttttattccactttttcttctgcctttgtttttatgaagaactctggtttgtagatacaacgataggccaagagctgaggaagaactccatatactatgtttaatgctaaaaaaaggatttttgcttcttcagggactctgtagacataagcagttctagcatgaagagatgcaccaatgtgagaaaactgagcctgagccagacctccagcatgtatcaatgtgatgtcaggcatccaggaacatccaggaaccactaagccatacagtgcagtcacaaagtaaggaacagaatagaacatatatgccagcatctgaattttaggataagcagcaggatcctttagatagggctcttgaaattgcgtatataatcggcagagctcagatgggcaatccaaagcaatcaaacctctgaacaggcaaaatccagttgccaggaggagacacacaaccaacattaaatcaaatggtcttctcagcaggtctttcgcttgggcttcttgaataacctttgaggggtaattataattttctgatggctgattatagattctgaaaccagcccagacaggaagacaagtatatggtatgcttaagaaaaaagcagggcaaattcgtgttccatacttccctacaatgtttcctggcacaaaaacaacaacactcataataatagatccaacccaatataggccaatggttctataagtttcctcccatgctat

SEQ ID NO: 160126 - DNA, 1000 bp, Homo Sapiens
ttggtttcttctttataaacacaagtacatgaggtttatttgaaattccaatttattacaagttcaccctttaatggggcccttcctctttgaagacaataaaaaaaaaaaacaacaacaaacaattcaggtgtcactgaagtgggaacacaggattctcactatgaacaagaacagactggatgtaggaggcaggggaagctggcggtggtggggttatgaagctgtgatgtcagtgccaactccatgcctatagaagggacggtaaactacccagcagccctggagcaatcctcgtcgtccttgggcaggaggacggaggaagcagaggccacattccgcagtttaaaattaagaggcttgattctcatgttctaggagctgcagtccccttggtggactttaaataggtacagaagagcttgggtgctcaaaatttccaaattcaaaggtgataaaaaagaaaaaccctgttttgtacttttatcaaaatccatcataaaagggaaagaagactacaaagttttgcctaaatataacaactagagctagatttgttgtgggggaaggggctctcagagcttctctgccgctctcaatcttcaggttcttgaggagttccaaggctgaggtcagaacgggcatgggaggcagcagacacagcactgccctgctccccctccaatgttgctgcttgcctcaatgagcctccaacccaactgctctagaggagagtggatgggctgaaggagaagccagggaagttagagcaaacacattatcatagaaactgtactgtacatgtgctaaagcaagatgtcaggagtatcttacaagatgttctttatacaatatcactgctgaaacaagcaacttttaataactagaaaagtcaatttaaaaaaaaaattaaacatttaaattcttcctgcttttcttctgctcccctaagagcttgactggtatgtgggtgggctgggctccaacacccctctggcca

SEQ ID NO: 160127 - DNA, 1000 bp, Homo Sapiens
tttttttttttttttttaaagatacaacactatttatttttttatttatgtcatgtcgggtgtgggatcttgagctctggcagtgatgatggtacttcctgttgtcagcccctcaagcccagctgcaaccagtctggggccattcagccagggacagagcccacagagcccatacacctgtctcccaccagcggggccctcctggcagggtagggaaggaggaccccgggcacccccctcagggcctgactcacgtactgtagtttgcactggacgcccgggccctccctgtcccaaagcccccttgggggaactgtggctgctgggggccaataaagctgtgtaacttgatcgtgggtgtggctgggcgcagcgttctgaggggatgtggggtctgggaggtgtctcgaggtgagagctccaagtcacgggaagtttaagtcagcctcagtttccacatccataaaatgggacgacttccttacccacagctacacgtgttttttaatttttttttttttttcaagagacagggtcttgctttgttgcccaggctggagtgcagtggtgcaatcatagctctctgtagcctcaaactcatggccttaagtgatcttccttccccagcctcctgagtagctgggactacaggcatgtgtcaccacattttgtagagatggagtctcgctaagttgcccacgctggtctccaattcctgggctcaagtgatcctttcacctcggcctcccaaagtgctgggattacaggcgtgcctggccacagatgagaggatctctgcagcagatagtacttgtgggtgcgagacctgtccagggcttgatttgaggagaggagcctgaggcccctgcctgctccctggtgctcaggagctgttcttgggcccctgttgtttcctccgctgccggcccagctggcggaagtgcagccgtttggggttgaggccaaaggcctgcagtctctggcggctgaactcgcatcc

SEQ ID NO: 160128 - DNA, 1000 bp, Homo Sapiens
ttttttttttttttttttttttttctttaacaaaatttttatttaataaatggttaaaatcgcagtgccaaaaatacattgacatttagcaatttcactgaaaggaagaaactacagaatgcacggtttcagaaagctattttaagttatttacaaataaagtatctaaaactcaaaaacaggctctgtatgctatatctagtttatcccttcccgaacaaaatttctgttatttgggcaaattcttaaaccatggtttaaaccgtaatggttacaaaccacaaacacatccatccagagactgaaaccgtttctatccggtcagtggcaaaactgttgaaagggcaatagttgaagctgttgggttttatatagtgtgaactctgataaatattcctaccaggactaaaacacagcacgctttgcgggcatggctgactcacaaaggttgtaacaaacaagaactactcttcactcgacaccatggctcagaggccaccgagaagcacgagtgactgacagctcctctgcttacaaacgaatgaaacccaaagtggatgtcgttctcacagcactgaaagtgcttcaggactcacactgatccaatactaactttcttccctattttacacatatttttctactgtccagtggaaatcattttctgttttggctaaacaacaaatactagtttataacaggaatggtaaaatctgtgagaattctgctcaatttaatacaagatcactactttctttagaatggtttctgcgtgtttctacgtcaccctctgtatttttagcttccagtttcctggtaaggaataagttctccttcccagtcacactcggggtcatttacacgtttctgggatgcccttgctcgtccatggaggccaggtgcgtgcagtgactcactctgcctcttccctcttctcaggaccagtccccgaaccttctgccttgcagatcctcctgtttccgccacactctcgcgctcg

SEQ ID NO: 160129 - DNA, 1000 bp, Homo Sapiens
tttttttttttcactgaagcagaagttgctttaatcaaggggtgaagtcctcaatcaaggggacctcacttaacctttggtggtggggtctcagcctaccccccacaagccctgaggcccctcaggaaggagggagcagttgaacaacaaattatggcagaggccagggaatgggagtgggggaacccgggtcaaggtgaaggggcaggacgctgaaagggtgggagtgaagctgaacggggcaggaagagcttaacccacgtttctacctgggggctggctgaggtggctgtgcatcgggcagagcggcaccagagggctgagggtcgaaggggacagcaggggaaaggagtgcttaggagatgaggcgactgtgaagctggtgcagctgctcctgggtcagcaccagccggtgtcgctgtccaaaaccagccgcacatgagaaggtcactttgcccatgtagactgtgtcatcctgctgctcctccttggccctgaggaaggctgatgaagggaaggtggcaaagtcagtgggtactgtggctccagggcgctgagatactgtctccttgaggacctcatccttgagcttctcgacggtgtcactcagggacttaagctgagccacttgctccataagttgggccgacgggctcttggcagcagggctggtgcgagtgatgtctactacgtgcgtgtgtgtgctcaattgattcaatgtctccagcagctggctggtcttacgatacagcgctccagctggtaactcactgccagggccctcatgggatagctttgcaacatgcagagggggcagggatgccaaggatgccttcatctgggctcccttgaggatgctgttctcatgctggagctgggagatgtgcagcctcatggcagagatctgctgaagcagcagtggtgagtccttcaccagccctgggcctggcacagaccctggagcctgcccagggatggctcctcgctgctgttcttcacc

SEQ ID NO: 160130 - DNA, 1000 bp, Homo Sapiens
tttttttttttttttttttttttggcattgttacgattcatttaattttacaagaattaggataacagaaagcattcaggtgcagcagaacagccaagctcgtcccgcccgtcccctcccacatacttggaggctcctgtcgtggcaatgtgtccaaatggtcagggagctgcctggaaaggtattttcaaagtggacagactttctgttcctgatttgtaggtggacgaggagggtcgatcatggaggagaaacccttccccactcctgaaggtcttcccgaggccctgccatggccatgcaagtctggttgagggtcaagaggtgggaaaggaaggcacacagggatagcgccgcagtcgaaggctgacttctaggctaagtcttcttccacttcttcatccccttcttcctccgctgcttcctctccctcctccaccacctggtcttcttctggacttggttgctgaggcactggcgtcagctttatggcgtctgcctccttcttcttcagctctgtgaagatgatgtcgaagaactcctcctcggccttgctgaccagcgcctccaggtctacggccagctcctcatcggtctgctcctcatccctgccctccgccttacccttctccttcagccgcatctcccggtgcctggcctccaggatcttctctcgccgggtctcacgctcaaacatggaagaggctacgttcttctcattcctctggagggtagagagcccaggcgagacctccagcagggtggttgtccccagctgggagccgcaggcgatgagacacccattgtcctgcacccggaggcagaagagggcctcgtcacacaccttcaagctgagggtgggatcgcactgctcgaacatgaagtcccagatatccagggttccgtccatcctggtggtaaagaaaacggtcggcctcacggggctccaggcagcatcagtgaggtaagccatgtggtacttggtccacatgatggacga

SEQ ID NO: 160131 - DNA, 1000 bp, Homo Sapiens
tttgtcttttttttttttttttagtctaaagaaagttctgaacagaatatcaattaagcttacatcacaaaaactttaaatgtatttacagagtgaataagttacatagataaactctgaatatgtttctgcagtgcaacaagttcacatgcacacatctaacacttgacagcattaagtttaaggagagaacttaagaatggccctttacatatatattacacataaaatatgacatcgaagaaacaaagtaacaactcatattttacctttatgattctacttctgactatccaaacagatattaaaatatgcatgcctgacaggtgaaaagacttggaatttatcttgtgaatagttttctctacaaaacggcaaagttaattaaaattaacactcatccttcagcagtataaatatgctcataaaagcaaccttctagtaaaaagcagccaagatccttaaaaagagtctatctggaccatttttggtgcaaagagatccagggctttcagaaacagtagcctagcaacataagaaaggtacttcatagcagctccttttagatacagtaattgtattcaaattacagtgtacattacattgcagtccatttacaattcccttttcacatacacaggctgtcagcttttgaccatcttacagttttcagtggccagcttcattttgcctgcccctttctcagcccacgaaagaaaggaaaaagaaaaaagaaaaaagaaaagaaaatggaacaagacagggaaagaatatacatgtttgagaatataaaattttttgagtgaagaaaacattgcacttttgccaatctaaaattgtttctagaaaggaaggtactgttcagtgtagtcggctttggtatgcaacggaagtcacttcttcagtagcgagttgcatatgctcggtcaaatgtaacacatttgtgccacacagcatgatgagtggagtctgtccaggacgttctaagctaccttggttc

SEQ ID NO: 160132 - DNA, 1000 bp, Homo Sapiens
cagaagaagtattttatttatttataatatcattttgtaaacaatcacactgtgcactttttaattcaacaataagaacaatttttttctagggatttatagcaaaccctatataaagtgaatgacttaatacacgagtgaagatgactagggtagaataatttctgaaaatgtcaaattacagcacttgatacaaagactgatgataactatctgtaccataaaaatttacatgccacgaaaacattaatttataattttaaatatacagtaaaacatagttataaaaagagtattacatttattataaaccagtgaattactcagagaaatatttattaaaacctactaaaaaccagtaaatattgcaactgaggtaaaaatttataagtaaacaaaactatcatttataaggaccaagaagtaaacaaaagggcagacattttctgatgactgtgtctactccttgatattttgaagcagcttcaacaaatgtgactcaataacctgttgaacacttctatagcctagggctacagctagatccatagaattatatccagagtcagtttcaattgttggatcagccccactttctaagagcatctttacacatttcacatgatttccatgtacagcataaagcagaggtgttcctccattccaatcatattcatttacatcaactccacaatcaagcagcattttgacaatatctgtgtagcctttactacaggccaacgacagtgcactttctcgaccttttcctaaaagttggggatcagcaccattctgaagtaggaactctaccacagctatttgcccgtgtgctgcagcccacatcagaggagtaaatccttcttcatccgtgtgattgataacattttcttgttcgatacgagtagccagatagagcatctctccctgagcagccaactggtgaacagacaaagaatttgctaacagaggtgtggtagagacctcatttcctctgtgtttg

SEQ ID NO: 160133 - DNA, 1000 bp, Homo Sapiens
tttttttttttttttttttttttttttttttttttttttttttttttttttttttttttttttttctgccaaaacaaactttattgcaccaaaaaggaaaacaaaaaaaacaaaaaaacttcatttatatacagtcagatataaagacatctctttgactcctgtgcatatatttcctcaactcaagattagggcataaaagtcaggctgctatgccagacatgctctgccctatggcagggccaaggagaggattgtcacttgaaagtgggaacacttaaatggatgacagacaacactggacccacagaccaagagcattcttctaagccctggagtagctcgaggaatggaagagggaaattggaagcagggtcccttttcgatcttcatgtgaagagacccagcctcttcaagggtatccaagataaacttccgttccccaagcccaccaatccctgtccagttcctttgcttcctgccctcccaaataggacattctcctttgtgcccagcccccctttgcacagatcctccaaggggagtcccatgatccacaaggcagagaccttcatagcagagggcagggcaggtacacactatcctctcccttatgcatggctggacactgactgaggccctgcatcacaagaatcgccaatacccactgggagccataacaataaatctggaagtacggggagaacatatcaaaaaggggaaggatggattcccttgatgcccaggattacagggcacctaaagcacatttttttttttctgagccaaccagctaaaggatcactgcagctaaatacagatagagaagcaacaaagccaggcaaatacccatcagagacagtgacaagagcagctgggggcacgggggaggcagaaggaagagaaagaaggggaggagcctccagagtcccagccccaaccccctctgccattggctacccttgctccccacaaatccctggggttgaagtgaggagga

SEQ ID NO: 160134 - DNA, 1000 bp, Homo Sapiens
aatgaaaagaaacatttatttacactttgtacatatcgattccaacaaacaataaaaggcctacacatcagtataatcataatatatgcgaacttccgatcttctcacactttgcagtgatctgatgctttcactcctggttctgatatttgattttttgaacagccttcttgaaaatgacctacacatgaaaaagtaaattattggatccaggcaaacattacacgcagacaagaaaagtgtaatttctttgcagtaatataggattttttgtgcagattcatctaaaagcctgtctaagtgactaaaagtaaaaggaattctgcacaagtgatatggtagaaagcaggtaaaaaacacagccacaacaaccctgatgctctggttatgttttcgctttcggcttgactgacttatgaattgcctgctggatttgtggatgtacctggatatggctatgtaacatccgatcagaatcaccagcacggccacaaacaagcagctgttcacataggtgactgccgtatgccatttgacccccaaaggacttttaagttttgagcagtcatggatattgtcctctgttggctgaccatttgtcaggatgatgtttggcaaagacaaaacagccatgatcacccaaacacaaacagataaaaccttcgtgaaggttatgttgtacatccgagagtccccaaatggcttgaccaccttcagatagcgatcaatgcttatcagcccaaggaacacgatggaagtatacatgtttgcataaaacaaaactgaagtgtatctgcagagaataaacttgaagtaccaaggtccaaatcctgcatcatggactattcgaaatggaaatgtcagcgtcattatgaggtctgcaaccactatgtttttgagatagaatatgaagctggttttattcctaatgtggaagaagatccacactgctaaaccattcagcaagatgcttgccacaaatataatgagataaagcacc

SEQ ID NO: 160135 - DNA, 1000 bp, Homo Sapiens
agctaaccaaactggacatggtggataaattataaaacaaatcattttacttatttctatgatttttctttcaattaggtctttcaaataggactgaggtatagtacactggcaaaaataaagaggcaaacaagaatagtgccaaagtaacagatacccaaaaccaaataccatgtcagaaaatatcatatagtaaccatttatcagattagagcagcagaagaaagttacttctaaatcataatcattttagtggtatttgtcaactccgccaagctaacttcataacatcattcttcatttgtgaagtagtaaaattcatgtcaaaaaggaagaggggaatggaggaagtcagttagttcattccaataaattacctctccagttcttataaacatgcccatcagcacaaaatcgagaaataatacctaagactagaagagacttggtttaagttatgaagcaaattaaatggaaaaatacaagaaaatagaaccaatgggattgaaaaagcccctcactgaaaatctgtattaaaaaaaataaaattaataaaaataaaaatagaaacaaaactctactagtacaaactagcctgagtggtttgatggacagagtgattgggtcaattgtcactgtacttccataaacggattttctccattcatgttaaagtagcacatgaatgtaagctctttaaggactattttcataggacccaaatagttactgtatatcctataaataaaaaatattttactttgataactgactgagtatgtggggactccatgtaatccaaccacatggttgtttgctgtatagtcctgtgcaaatataaaaaaaaattttttttgctataaggctttgaccctacagttttcacagcaacataactactatccagcatgtaccatattttgcaagccttcaagttcaacaatccaaattgtcgattcatattaggtccaaatgcagcatccttgaggagtatagtagg

SEQ ID NO: 160136 - DNA, 1000 bp, Homo Sapiens
ttttttttttttttttttgaggccagactatttattacaacctactcaaggtagtttacaaccacctgctaatctttgctgccctcaccaataatcacaggaaaaacagatgcaccaaaagacaacccctaccccactggagaggcattgggtggccagtctccccacatgcaacccaaaggggcacagagcactttggttagctttgctgttaccatcccattgctgtgggtaagtcacacaggtaaagtggctgcagccactatcaccatatatggcataacccagagacccagatgtcaggagaggcagagtgtggggaagcaggaaacagatgactcagtgtcactacatatgtctatatcaatatatatagagatataaatatatagcaagcaaaaaaaaaaaaatagaggaggatctataaggttaagagacttatccaaatcatgcaaatacgatgtgaaccttgcatgaattttgattcaaacaaactaaatataaaacacttgaggaaattttgaacactgatcagattttggatattatgtaattactgttaatgtctgatatgatgaggtatttatgatttttagaaataattcttaccttttagagatacatactgaaatatgataaaatgacattttgatatttgtttcacaataactggtaaaaaccagcagagctataatttgatgattgttgtgagtgagtgatagatacacagggggattattgtactatattctctacttttatatattcctgaaagcgtccataataaaaagtgaaaaaaaataagttcttatagcaaaatatgcagcaaagaggctcataccattatggttttgagatgattcatacatattgcaagcaaaatggcttatgtttccttaaatgtaaggagaaaaacgcaaataggtggtttctgtaaagttccacacatccactggtagttttgattttcaaattcaatacatcattctcaagacgggtt

SEQ ID NO: 160137 - DNA, 1000 bp, Homo Sapiens
ttttttttttttttttttacttcttttctctttattccctttcatagcttctgccgggatccaggcagagagagcactaatgggggaaagggagcgagcgcttcccgctttccccagcgtgggccctcggagttgggtgtgggggcagcagggccagaggaaaggcacaggtggcgatttgccccagccctcccccctaagatgcagaccctcagaacacgtcgcggaaggtgagctccctgctccgagaggcagactcgggtgtaacgcaaagacggtttctttcatcaataaggtccccactgcctcacagcccctaaggccacccgctggttctggcattctagacgggggtgcccttggcccttcctttgtcttcctgttttgcagggtaatcccagggttccatgcgtatcctctgcacattcagcatgggctcctcggtgcttgtgtctccatttttctgtcgttctgcgataatcatggcccggaggagaggcgggtacggcacggaggccaggctgtcttccggcgccggcgtgaacgcggtgaaggcctcctcctcgtgcttgggcaccagccgccagtcatggtacatgacgtgttcgatctcccgcgcctcgctctcagtcttccctttgaaggtcaggatgccccaggccttcccgtggtccaagttctgcgccgtgtagtcgggccgcacccgcgtgaggcgccagtagcacggctcgtcgtgctgccacagccaggacttgcgcgtgaccaggcggcccaggccgaagagcgggaggcggccgagcagctgcaagaggcggctctcgcggcgcacgtcggcccaggcccggaccggcagccggcgtccagagaacggccgcgtcaaggtctcgtagtccaccgcgtagagctgggagtcgcgcggcctgttcagttgctcccgcagggcgcgcacgcggcgggccagctccgcgatcagccgcggacgcaccttcttccgcgccat

SEQ ID NO: 160138 - DNA, 1000 bp, Homo Sapiens
agtattatcatttattgagtagctacactgtggccagaactaagctttacatgttttatatcacttatttatctcaacaatcttgaaagggtggtattattttccccgtcttataggtgaagactctgaggttcagaaagttaaagtgatatcgccagggttcctgactggtaagtgatggaggctgaatttgagccagatctatatgctccatcatcactctcctggggaaaagagcctagatgtgttctatctgcattcctgcttagattctgcatgacttctcctgtccatccccttggccccctctcctctagtccatgagattacagctttgcacactgacaggagggtccttccttcttagcctacacatacaaccaggtgtcaaaggatggaagggttcatctcacacactcacagaccatgtagactattcaatctacacctccagctcgaactcagaacattgacaggaacctgctcttcaatctttcacctcccctttctccatgaaacgaacgtcaacattcacacagcagcccatccccagcctacagggcggcccctgccagatcatgcttcccactgtggaagaaggcatgtacgagtgagtgggctcatcggttgacctctgtgtgagatggcacgtggtcctaccctgcagagtcagagcacagaattccaagtgtagcacaggtgtggcaattcagaagagcagctgtcaacacatctgagggcacagacccccctatcatgccaggctgggagaggccactcctgtatttggcaggtggcttgtgcccagtggcatcaaggctatggcagggtatagcagagatctaaggccaagtggaagtagagctgtcgctttgattttgaaaatcaaatgaatggcctttacaaacttccacccacaattctttgaaaagggatgagtaactctgaccctactcttacctccctccccatcaattcaagctgaattaagagaaatcct

SEQ ID NO: 160139 - DNA, 1000 bp, Homo Sapiens
ttttttttttttttttttttgaaaacagaagcatttaatagatgtgtggacaagaacgggcagagaaggtgctgcggggagggggtaagtgcaggagcagtctggagaggcacatttgcaaggcaggggagtcccacttccaggagtgctctgggccactcagcctgcctactgtctcccaacagctgagacgggaggctggcccatccctacctttctcgcctgtagcctcaggaggaagtaattccttccactaagttgcaggctggagcagcccagagtggcagcagctgcggacacaggctcacggatgtgggagcccttacacctgctcacagcccttcagtctgtccttgcagcatgtggagggatggtggggaggggctgctctcaggatagggataaagcaatagcccagtgtgcagggccagtgaccagtgtgaagcaactaagacgagtgtgggggcagagaggggaactgggggcagcgaggccacctgccaggctgtcctgggccataggccacgttcagaagacgaaggaagaggtggggcccgcagagctgagtacctgctccgcctgggccaggctgtcgctggcctggcggtccaggtcccagcactcctgcagtgtgtcctggaactgccggcaggcctcctccaggatggagctgctccggctgggccaggactcccagtagcctggctccacccagggctgggcctcggtggctctggggcctggactggagctgggacgcaaggagctgtccaggtctcggcacagctggtagaactcactaccacgcccaatcacacgctcaccgtcgatgactttcaggccaggcagcagctcccggactgcagcccagtaggaggggttggcacagagcgggttgctgagccgggccaaagggtctcggagccgcaggtactccaggcacggtagcccagccagacactgcagctggcccggggtggccagtaggttgcctgcggca

SEQ ID NO: 160140 - DNA, 1000 bp, Homo Sapiens
ttttttttttgaggccaaggtgcataggtgtttatttttctcatgtaataagagggccagaagaaaacagctcaggctgggcacgggtgtcaccatgtcatctgcatgtaggctcactgaaatctccattccaccaatctcagcatgcggttctcatctttgtggtcacagaccagttcacacacttctgggcatcacgctccaagttctgcatgagttatggttgtcttcatcaggagggttggtcggtctcaaatacctaaggctgccatgactacatgctggactccctgaatattcctgcatgcactttcttcacaaaatatggcatttcatgggggcacttgctccacagatgagcatgatccttctgaacagggctgctgattgttcctttcatttcttcttgtgaccttgagctcccttaaaaaaaaaatttcagtggagaatcacagctggtaatgtactgcgagttcttgaaactacacaaggtatagtctggctaagttacatgtggtttccatattagcttgtttggcagggtgacctactgcaaagcaggctcagttaccccaccagtcaaccccctgggagttataatttcctccatatccatcactgttgtaaaagcctccatagccacctccaccaaatcctctgctgctaccgtggccacctccgccactgcggctgctgcttgcgcggctgctgctgaagctggaactgctggcaccgctactttgtcggtagtctctggcaccaaaccctccactaaatctgctactcttagaacgtccacgactgctacccttgtagtggtgttcataagccatgttttctaaccaagacggcacttcttgtttagcttcaacaagaagatccaacaaatccttagtaatatttatgttcctctcgttaaagaatgaggttgccaggccaaggtttcctacacgtcccgtacgaccaatacgatgtacatattcttcaatatcacttggca

SEQ ID NO: 160141 - DNA, 1000 bp, Homo Sapiens
gaatgaaaagggcttttactttctttttaaaacaagtgatttttaagggtttgtagaaaaagcaaagaaaagcataattctcctcttacttcaagctagtgtccgatgagaaagtaccaggctaacctctgaagaatcctaccccaacaccttcttctttcttctgctgggatgaacatctaggggtaagatatgactgctctctaccatctggggacttctcttctttatattgttgcattcctcaatctttgcataaggaagagaatggctaattcctctaggtgccaaggaagagcttccctcttcctacagcctcgcatgtttcttttcccactggttgccaggaagcttggagatatggtgacgactattcaggcacacatctcttccttgggtcctaccacagtcatctcctccaatatgcagtgatgttgacaggcttggagatggtgactagggagttctgaactaggtacctcaaatctatcaagtccacagtaaccaggagctatgatcatttcttaggttttctgatcttcccttctactttatttgtaaccatctggttgtaaatgttttcttgtaggttgcctcaattgattgtccattgtgggagtaggtagtgaaaaacagtaataaaataagactcatagttctctgccttatattccctcccgtagtcttctggtttctagctaagaaaccaagtctgaagcaccttgtgaagatgaacttttttcttcttaaaaaaaataaataaaacaaatatactggcttggatttccttctcttttcttactttcccccttaaaaaaaagcagcagccgccgtgtggacccttaatataggcagacagtaggtcacctggagatgcttgatacatgaggggtcagaaagaagcctggtgggcgagcatggcttattcagtcctgggctgctgtgggatgatccatcttcagtgggggatgaaagttcccaggctctccctagagccctc

SEQ ID NO: 160142 - DNA, 1000 bp, Homo Sapiens
ttttttttttttttttcattggggaattgtgtgtattttctagcacttgtgtattggaaaacctgtatggcagtgatttattcatatattcctgtccaaagccacactgaaaacagaggcagagacatgtactctggtgtgatctcttgtcctcagtgtctcttctgggctcctgtccctcttgctttatagctagctgcccggggaccaaggtacaggtgaaagcaaggtagcagcttgcgggaggaggcctgtctggcttaccagtctatacactgtggcctcaacctcccagacagggcagagaactgtgggcagctcgtttgctttctaggctggctggagaggtgggagctcattgatagactcatgatggaaactatttttgaaacaggcttcctccttcaggagagatcatgcggactaaactgtagcaattccagtgcacctggcagtgatccttttctttgcaaagtactgtctctttggttccagtaagttggaccaccacatgacatcattttccctggaacctggtcactgactaacacagacaattgggactccagagcctcaagagccaggagagggcacagtacatacagagggagtcaaatgggatctcattttgagtcctgccttccgcacactcagaacggcagccccaaggcccggagtgtccaggggcttctggcctgaggtgaatctgccaggcccaagaaggcacaaaggtaggagcacagagagccccattcccacaggcgggcggcccagcagcaccagtggaagctcagctgtcctccagctgctctcggcagacagttcagtgcacagtttatgccctagctgaaaaagatctcccggacgtatttcagcacatcctcttcctcctcctcctcagggctcctgctacaggcagagctggaaccccccggcctctgggaagggctgaggcctggagccagtgcctgtttcccactgtcctcttcctcactgctgc

SEQ ID NO: 160143 - DNA, 1000 bp, Homo Sapiens
tttttttttttttttttttaaataaagaaaatagtaattgaatattttccttcaggaaacagcaccctgcagggaggggaagtcttatgaccctcaaagtttgagagcctctcttaacttcccaatggcctctgtctgctgaaccaagaagcctgcaaaacaaatacgtaagaactggataccatttcagtcacacatgcttgctgacagtcactgatatggtaatgcctcctgtacacatagctgactctgaagactgctaagagggtttgggtctctgctgtacaggaccttggcagcctgcaaggagatgactcacatggaagtccccacacaagtgcacccagtgtgaactttggaagcatcggcccatgctcaggcccacaggtaagatggccaggagcccctgcccttgaggaaacttgaaccacagagctgctggcgaagggggtgggtgaaggtctcatgtagcctgtgtgattcaggcagaagtgagaaggacgggtgggaacccaccaagtggacgacaagctgaagggctcccagggagcagacacttcaagggccccaaaaggccaggagaaagaaaaaaaaaagccgggtatggtggctcatccctgtaatccagcacttttgggaggttgaggcagatgaattgcttgagcccagaagtttgagaccagcctgggcctgggcaatgtggcgaaaccctgtctctacaaaatatacaaaaattagccgggtgtggtggtgcaagcctgtagtcccagctattcaggaggctgaggtgggaggatcacatgagcccaggaggtggaggctgcagtgagctgtgatcgtaccactgcactccggcctggggaacagagtgaggccctgtctcaaaaggccaggagtggaagacaggccctagccaggaggtttcacgtggctggcaggggccttatgagaaggctgttgctgggaggggcctgctgcagatggctgcggcagaccacgg

SEQ ID NO: 160144 - DNA, 945 bp, Homo Sapiens
ttttttttttttttttttttttttttttttttttttccggcactaagtcaagttctttacttcccagaagtgatggctaaggggagggaggagggtgagaagaggaagacagaaagagccagagagaatgaggaggtgagaagggggggacagtaaaccactgttctatgaagtctcacgaggcaagtgctcaaggtaaaaaaagagtcctggagaatcgtccacggctgcgggaagcatctcggtttccttctgcttttaagtcctctcagggaaggctgtcgccgctgccgctgcattaaatagttatgtacatcgcagagagtcccaggccatgggcaggtgggggaggggcgtcatttcaccaggggccgagttttatcatcgtcaccgcactggtgagctttgtactttttcacttctgccatgtacttggcccacgcgtcacctttacttgttaatacctcatcctccgtcttctgcttcttggctactattcccgtcttgagggctagtttgttcccgcctctgcgtttgcccacgaagctaagtgtggagcccggaccgcccttcctcttcggatccccggggccagcggcggcggccgactggtcgggtcgctgcggacccgggggcggctcctcctgccgctgccgctgctcctcctccatcttccgcttgaacagctccaggaagctgccgtcgttggcgaacaagttcacgccgcccgacaccgggctcgaacccgcgcccgacacctcctcgtccccgctctcgggcgacgtccccgatcccgactcagcccaacggctcccgccaccgccaccgcccgcggggcccggagcctcccggccctgaggctccgcccgtctccctcgggcagccattttgtcgccaggtgccgcgcaaaggactccgggaaggccgctccggccccgcgcttgg

SEQ ID NO: 160145 - DNA, 1000 bp, Homo Sapiens
ttttttttttttttttttttgactcagactttttattgtactcaagtaaaaacctgctggacccacagcaggtggcacagaaaagaggtaggagggggtaaggacactgaggatcaggtctccagcaggtctgtccagtgtgcctcttctaattctgagtcttctacttctttctcagtgtccatctggcacagccagatcaggtctccccaaagcagtgacttctcacagcaagggcattggccctctaggggcagaagctgccctggttcttcctgaagaaactcctctgccaggcagatcacatgggcccttagcaggcagccagggtgggggcaacacaagggcccctcttcatcctggatggtctgggcgcacagggagcagcaggcccctggatccccctggtctggctcaggctccgcgtcatcaaagggacctgcgcggcgccttggggccggggcctggggcggtggaggcccgaaggccagaggcacgtgcggcggcggcgggaggcagaggtcctggcggaggtctgggcgcacccagcgcagcgtgagcgggaggcgagcccagggcggtgcgcgcagcatgtgcgccagcacgcgcaggtggaaagcgaaggctgtctctcctcgcaggcgaggccccacgtgcgccaggcggcgcgaggcgtgcgggtgctgccaagcccactcaaaccgaagggcggccacggaggacgggaagccgtgcacgacgagcaccatctcccagggccctcgcccgctggtccgccaggccccgccttttttgcggcccccattgtgctgctggacccgacgagcagtgttgacagtgaaccccacgtagacgcggccccggtaccgggggttcaggcagtagagcaggtagacgccgaaaaagcgccctggcctcgccgcgacccccgcgggacccatcgggccttggggttcgggaaccacagcagggggttgattgccgtgacctagggtccagg

SEQ ID NO: 160146 - DNA, 1000 bp, Homo Sapiens
ttttttttttttttttttaacaattattttttcctcatttctctcagtaaccgcactaatgacttttaagtgccagcaagctgcaagtgctgccaatgagcccctgccctagaagggctacagttgggcaccatgtgctcaggggagggccccatggcagtcagtggagggtgggaagctggatggccctggccactcagcccagatagcaaggagggccttctcctcccaaggactcaaagtctcagaggccggagaaaggtgggggatggtctcccaggaagcagaatgctagaaggccttgcagggcaaacctgacgggccttcagggcacctgacagggctgggactgccggcttccctcacttctctcccgagcacaagaaaaccttccagcaggagccaggtgggcctgaggctgtgaggctgtcactcacttaccaggggattcaggcaccttgaacatggctttttcttgaagcagctgctcaggttggttcttgttgggtaggtccctcatcatctgcagctcctcgttccagtactggggcggttatggtaaaagccctgtgtggatgtggtaatgctacctcgctggtcctcggctgtgatcacaaacaggtacacaaggtcctgtgcatcttgcagttcccaggggacaggtaccagccgctcacggtgagcactttcaggggcttttagtcaccgttctggggttgcaggggacacagtggctgttccagggtccctagcaggatgtacttgggtggtgtgcagtcggtggggtccatctccaagtctttctgctcctgccgtctctcaggccactgtcagtgaagacgctcaggaaggacaaggagctgcatcagctgggtccaggctcctgagcagtctcaaatgtggcactcatcaccgtgggccttgtgcattgtgcagggctcttccaccacgtggagcagcaagcccgcctgcagccctgccatgctgcgcagctctgaga

SEQ ID NO: 160147 - DNA, 1000 bp, Homo Sapiens
tttttttttttttttttttgaatcaaaagcagggtttatttttctatcaaatccccaatccatgttccagccaatggatgaagggtgaatcaagccccacatagactcttggtaaaaacaattctaactttctaaaaaaaaaaaaaagccaacacacttttttctttcttttcaaaaagctcccaggcctttgggaacagctgaaacaaattcatatcctgactaggtctgttttctcttaggtatttggatggtccctctctgctgccacttctgcacagatgaggcactgataatggcctgcaggtcactcacaatcctagctccacatcactccatggtttgataacctagaaccacgttatgatttccatttataatgccctaagaacagctgaaaagatctgtattaaattctgcaaatctttattgagtgccaactatttgctgggcacaggctaggcactgattctgctggttctgagaaacataaatggtaccatagggaggtgtttcctcctaagtggcaggaggatgtttgctgggagttaagtgaaccaattcctcctctgcttacaccacgtgggggtaggtccagaactcaggccttgggaacatatgctgtgctctcttctacaggcgctgtgtggaagaaccaatagcagttgttaaatagctgtggaatttcctccacaatccacatagtgatgtgtctccaaggagctctgggtcatgaggccaatgtatgaaatcttcactgaagttcgcatgaagatcactatgttgtgcaccaggatctcaggtaccgtgcagaagaagtacacataggaaaacggtcctcccatctcggccttcccggtaaaattcaccagttgctcactccgaggtggaataagggagacgttagtagtcacatatgtactgaccactgtgttcatgtactgaatctggctggacaggctggtcactgccaccgtgtagaagttggagttcctgattt

SEQ ID NO: 160148 - DNA, 1000 bp, Homo Sapiens
tttttttttttgacatttgccatacaaatggctggttttaattttttttagaggaaatactataatttaaaaaaaaaaagagttccaaaatatttaacagaatctccagcaatgattatttccaaaatgtaaagatttgaaacataatttatacaaaactaaaaaccacaaggattcattcttgctttttccttttttaaaaaatccagacaatttgtcacaagaaagttcggcatgtgatagaagctgtagcctcagtcaccctcggaatcgctgtccctcttcatgaggacagagcgccgcactgaggacagcaacacgtcttcaatcggcttcttagggttttcctccaggtctgtcataattgctccagattcagacagtttccattccaactcatctcttgtcaggttcatgccgccaaacaccagaggaccaataaactgagccttgatatctccttccaggtaaacaaatatcgtgggcagattcctatcaggataattgggtatgcaggttgttgaaatggctttgataaatttgacatcaggaaacttcctggcaagtccactgaggtgctgatttatcagggcacagaggggaattccttgtttgtaaaggtgcaagatgacccacaagccctcgccagctttggtaacttcttgaacataatccttccctgagatctccaaaacttctccgaatttattcttcagtttagttgctttccactcagccagtctccgccgtctgtacatttcaatagcacgttcatcctcctcattaaactcgtcttcatgatcctccagctcttccaaagtcatatcttcatatgttttcaccactgactgctggaggatgcgctgctcctcttctgcctcctcttccaattctttcagactttccttggggggtaagataccctttttgcgtaagatgtcattccattcagtgtctgcgttggggtcctgcatcttgtttccagttcagttgctcaaac

SEQ ID NO: 160149 - DNA, 1000 bp, Homo Sapiens
tttttttttttttttttttccctttttagtaatggtgtctttttattgataacttcccaacagcatctgtaaacatcgggtacaaaaatattccattaaactctttcccgaggtggctccgtttgctccatggaggccttcagagaggcctgctggcccctcaggttccacacctctattcagagaaacacagaactcagcacgctcagggctgaatggatggccagcctccgtctcaagacttctacctatctcagaaacctccttgagataccaaggagaaagtatttgatacttttacggagcaaggggcaggaaaagcagaattagtgggtgcgggggtgggctggggtgaactcagaggagaccgtgcttgtgcacctcaaggaggtcctgaccggtggtgggggacatctggctctggtgtctgggaaccttctaagcattcttcagagcagacgtcaggctcagctctggaaaaattcccctgtgcccagccccacgactccagctggaatgggcgtgccctggcatggcagaggggtcttgcagaatagagatgttctgaggaaggaaggagccagaattaaagacccccccaggaattccacacccctcgggagagagccttgtccccctaggagccctgggtgacagaacggggcagcaaaggagccctggatgacagaacaaggcagggttacccgctgccaccttgtatgctgctgccctgagaccccctcaaggcaccgggcagcagggctattcgcccgtcatctcctcgtcatctgtctggctgcggccgttgatggctggggagccagcctggacatgggacaggtcctcgaagccggggctcagggagggcgagacggtgtcggggctggtgtcacatgagcccgtgctctgttctgaggtggcaatggtggtcgtggtgctgggtgggatggggtcttcatcctcttcctccaggaaggatgcctctgggatatggctgaag

SEQ ID NO: 160150 - DNA, 1000 bp, Homo Sapiens
ttttttttttttttttttttttttttttttgttcaaaatagtttttaatcataagctttatatacaaattgctgtacagtcatcttaataaagtgaaatagtgagtgaaaagtacaaaacacaaagcccccacgttccccttggtgaagtatcaaaggatcactcacagcccagaagccccaaattagtgacaaggtaagtggacaagtctgtgaaacaggctaaggcaagtgctgtaaactggctattagaggcgaacaggctccactgcagaccagaagcctgagttcctactgcccaaactggttctgtggaagaattaaatgaaatgaatattgatgggccagaaccttctagtagacctgcgaactcataaaaatggtatatattatgctaaaaatagtttagcagtagtgtagctcagtctctcccacccccaattaagtattgacaatacacaaattctaaaacatgaagctgtttaaagcattaataaactgtgaacatattgcactagataagtgaacactcctgtttctccaaatacatgagtgagttgcatttcccagcacaagcaggattaatccctgtggtacgcaaggagcaggctctgctgttccaagcgactcagtcctggtgaccacacgtactccaagctcagccccacgtagagttactggtcccgagattcatagaggagcttggcagccttgtgcatggccactagccacgccaccgcctgcctcctgcccacagtcacgtcctccaccactgtcagcttcagctgggtcacaccctccgtccccggcactgtatactgcaggaacatgcctgtggcccgtgcgttgcctcctccaggagggaagccttctgtgaggatctgcacggtggaaatgtgtacaatttcgatttcatagtggctgtctccatccagaaacaagtatctctggttattggaaagacgacaagtcatagtttcaggtttctctgagtttccaaa

SEQ ID NO: 160151 - DNA, 1000 bp, Homo Sapiens
ttttttttttttttttttttttttagtttttacaatggatccatggtatttattaagttcatattcataaagaagttaattaaaacaaaaggagagccacccacggagataagagtaggtcacaaaccaatgaatatgactgatccagttacaagaaaataaagctgattgatgtaaatgaaaatactaattggatagtgcaggtgacagcagcgaggaagctgtgaaggtgtctgctcacgcagcagttgggaaggttggcctgaggctttcaaaacccagaacggtttaggatctcagtcaccacctctgggaaccaccatcatcactgttcttttaatgaggggatctccagtccccgccctacctttcggcctcccccgcgtgttgaggggtgggggctggacagtgactctggggctgggatgtgacttcgtgctgggcccccccaggtgaagctgttcatgcaggacctctctgccatgctggccggcctgggtcaggctgagcctgcagcccctgcctcctagccctgacacaggtgagcagcgggagagggaacccctgagagaccctgagataggagggcccacatttccaatggggtgtggactgagtggctcttcctgaatccgtttcctcattgggaagatgggagggctgtgcctgttcagagtgctgtgggcctgccatgaggggcacatagcaagcactccataaatgcaggccctgatgaggaggtgatgggaaggtcaaggggctatgtgtggggcaactgcctctaaaatgagatcagaccaggccctccctgccagggtggttggggcatgaaaaaaaactctttgtcaggtctcagaacagggtccatgctagatgagagatcaccaaggccccctccactatggactctgccaggtgaggggcccagcctgagaatccagctgctggggctgcccttgaccttctcagaacctcaaacagggggtgggtggcaagaaga

SEQ ID NO: 160152 - DNA, 1000 bp, Homo Sapiens
ttttttttttttttttttttaataattactctttatttaaaataaataagccctcttacttacagggaaaatatgaaagcaaactctgtcctcctggtctaagacagaaaccacattcagaatatgttcattgaaaaaggaaagatttgttgattatcaaacaaatctaggtacttcaatacacattgtttctttgaaaaataaagactgaaaggaataattcatttcaaaaagtcacaggttagaaaaccaattttccttctgaggctcattttagcaaatcctccaagtgttcccaaatcttttaaaaaagctacatcccctgagaaagggccctttccctgtagccctcttgctctgacaccagcagccctgcacccttctgccaagtggctccctgcaggacggtgctgttgccgggcaggaatggccctccatggcaacctccagcaggcaggagctcaccacctgctttctgcaaactcactcacttggctcagctattctgcaatggagaggaagtttccttagcagccaaagtattctaagtatcacattttccagtattttccagatccgtagtgtgctcagaaagccagagctgtatcaccaggcttttagagaagattaacacctgcacatctgagtgacctttaacaggctccgcagcactgaacgcctgcagacactgcttcatgtgccctttaatgctgatcaatttccagattcaacagttacacaaattacattgtcatgaaaaacagaagaaaaagccccaaagtctttttcagacctcccctccttacccaaaatacagacacacaggcaagaactctcataaattcaaattcatcatttgagaggttgaagcctccaaggattcttctagctccagggtacatccactgtatgcttccagatgttttttccagatttcaatgtagtgtggctcttctttttctttcagggctggggggccatcttctgcagggcagctggg

SEQ ID NO: 160153 - DNA, 1000 bp, Homo Sapiens
tttttttttttttttttgagggatgcacaagtctttattcctgctggcagaggaggtggtcctgtggctggcggagtgggcacctcaggctggcagctctcacctcttgctggccggcagcttcagccacttgggcaccttgcccaggctcctcttcacgggctgggccgtccctgggatgggctcaggggggaccagcgccccctcctcagcagctggctcagacttaggtgcagggtcaggggctggcaatggggaaggggacccggcggccctggacatgtacctggccaccagcacgtcggccgcagatggggagatggcatgctccagcaggccaggctccaggtagacacctgccggctcctcggctcccaagtgcaccagagcggccgggaagaggttcgcctgaaagagggtctgcgtgtggtcgtccaggactgtttttggaggggtgatgaacaggtaaaatgacagctcggggttccccaggtggctcctcacgaagtctcgcaagtcccccactgtctcgctggggcggaagaagccctgtaggacgtagcggtcggggaacaggaccctcagagccacctttgggtagcgctccagcttctcctttatctgcgcctccctgaaggccttggtcaccaagggggcttcttccaggcgcttccgctcactcttgagctgggccaagcgtcttctcacgtcgtccaccgtcagctcaaagaactcatcaggcagctccgctggccaggcctgcagccgctcctccaggtcggggtggcacaccaccggctcccggtccacgggctcccggtccacgggccgctcccgctcctgctcctgctggggatcccgctcccgctcctgctcctgctcctgctggggatcctggcccgacttggacttctttggcttggaggggcctccagggctggagagggacttcggcaacttagctgaagatgatgtcagaggcctcgtgggcccaggaggg

SEQ ID NO: 160154 - DNA, 1000 bp, Homo Sapiens
aggttttttttttttttttttctttttttttttttttttctttttttttttttttttttcttttttttttttttttttttttttttttttttttttttttttttttttttttttttttttttttttctggtcaaactccctttttattaagggttatcaagctgtacacggtccctaccctgctccgctccgagttcgggcagcgcaattcaccactctcccaaagccggaccacagctgggtgaggggtgggacagagagtaggagcagtcccagcatgcagtgcagcagcccaaagcctcgggcgaggcatcgcccttcatcccccttcagggcacagcgagatgcgggccagagctcttttgctgggacgtacacagccaaggtcaccctccagcccggtctgtcccatgtgcaggtgatggggggtacgataagcagcaatgagggcccaggaagacctcagtctcctgggggcccatcctaaaagatggcaagggcagcaaagtatttccatcctgctcctacaatttagaaaccttcttttttagtgtcaaaatatagcgttgaggggagctggacgctagggtcttcaccctaacgcaaagcaaaagccgaacggaacgggagcaagcgaacagaacaggagcaagcagcacacacaggccagtgatgtgcaagaagcggagagaggtgagccggctgcagcactgggcgagaactgcgggtgaggtaagggccacagcctgacctgctcatctattgagggggctagggaaggttgcaggggttgagggtccaggcccaacctccccactccacagttggcacaggttctccctgcttggcagcttctatcgtgggcagccctctggggacttgcaggggtaggtgtaaaggtggcagtactggggctgggctggggaccagtttctagcaccacactctgagccaagggggtcctggggatgaggctagagtcccgtgtgccctcggttcc

SEQ ID NO: 160155 - DNA, 1000 bp, Homo Sapiens
tttttttttttttttttgcattttgcttgtttattatgttttctctccatcagaatgaaagctcctcgagggcagggactttggtctattgtctgtatttgccggtgcctaggattgtgcctgtatgcaacaggcactcaataaatatttttgctgtagactggacaggcatgagttagattctctggggcttctgcagagactggtttgggaaagtgggtgctagggaaaagctctgctccctgcaacctccccattttaatctttcagtattgaaaagtggagaggaaccggattcagtttgctggggacagaggcagtggggtgtggaggtgctcagagcagcctttgggaaggtgtgggggaagctggattcccaactgtcagcctccaggcctgggatggacctaggatgctgagaaagggcatacactgctgagggagtcacctgccagtcaccagctcactgaggaaccagaagaatgtacagttcttggtttgaaggcacttggagaaggagaggaaggagggatgggagctgaatctcttcccgcccccatctctgccaggtcccaggccccctctgggcttctgtcccacacagacctgcctggaagccttcaaaggccgaggagccccggtcggggtgggggtccccgttctggagccatgggtttggagtgccagctccagcagaggcatctgagcagcggcctgaggtgctgtgtctgacatggtcgttggccatggaaggcctcgggccgtcctgagctcagatcttggctgccggctgctggggcggctgcttctgcagcagggccagggtgtcccgcttctcaatggagcgcagctgcttcttctttgcccgcttgagcttggcggggtttcggatcacttggacgacctctgccttccgctcattctccaggcggcgtttcaggttctcagcccggcgctgtttcttctcctggcggcgcctctccttctcctcctccaggtg

SEQ ID NO: 160156 - DNA, 1000 bp, Homo Sapiens
ctcttttgtttttttttttttttttttttttttttttttttttttttcagagtgctagggctttattacaaatggagttgactgctagagaggcccttctccaatctttcttctgtaccttcttccctcccaaagacatccctctaggggaggtcagtaggccattaggtaggaggaaatctggagagtgaaaaggggccttgcttttgtcaaagtcctctgaaacaaccactgagtctgaaggctggctccagttgagaatcttctagtggaagaggtttagctctcatcttcaaggtccttcatttctacatcctggggggcttttgtcttcttttgccttttgagctgtggttcactagtcctggctggctttgaaggggcttccacttccatggctgtcttctctttctgggcaagccggatctgctggaggagttttctgcgcttcttccctgacagtgtaatgttggcacgtgcactggacgcccgcttcttgaggtggtgccgcgtgatcagcccttggtctatcacagccccgaccacccggtgcctcagacgccgctcccgattcaacacccgccggcgtttgaacagcttcttcttcagctccctcaaagctattaggaggcaggagatgggaatattccacaaagccacttctacaaacacgggagcctgttgagtcccagaagggacagtggttggtggcttccagacatgctgtgtcctcaagaatccaacaagcatcttcttcatcctggtcctgcccccagctgagtccagcgttaaatgttcttaaaggacttctagggtcctgtgggctccaagcccagcctggctcttcactttggtcttggaagaaggcctcagcatcctcttcctcaccatcagtgagcagcagcagctcctcatggggcaaatggagatccccactctcttcattcacctcactggattccaccacaatagacggcagatgggacttttgagagaaatc

SEQ ID NO: 160157 - DNA, 1000 bp, Homo Sapiens
gccggagaggaggggcttttcatcctcttttgttaaaaacagactagcaccactgtgacgcgtgccacgagacaccaagacggcccagtcacagaggaaaaacccgaacacgacacagaactgaggagagtccaggcctgggctggtgggggccacacccgcgggccctggttgctgggaggcatggggctcaggcctgggcgcctcgggccggggtctccgggcctcacttggccggccgcgtgatgaagcgcgtggagaagtcgaacaggtcccgattgatcttgcgcaggttgcgcacctcgtcctccagctccgtcacacggacgcgcagctggtcctggccgccgagcacgctcttctccatggtgctgcacaggacggcctgcagctgctccgtgcggtccaggtagctgggctccgagccctgctggtggaggcccaggcgcagagtgaggcccccgtggcgcggctcgtccccgtgctcggcgcccagcaggtgcttgttgaagtggggcagcggcaggctgggcctgaagtctgagctcagcatgctgacgggcgccagcaggatggcggcattggtgactgggcctttgagggccaccgtccggatgcactgcttgctctgcacgtcccagaggcgcacggtctcgtcgtgggagcctgagagcagcacgctgccgtcagtggacactgacaggcaagtcacctggttcctgtgccctttgaagaccttcccggcgtcctgctctgggtggaagctcctctccctctgtccgggccaggtgaagaggtcgacctggaagatggagccctcactgcccccgcagaacatatggtgctcagccaggtccatggtcactgccatgatggacacgtcaaagaggacggagagcagcagctcccccgaggagacctcccatagcttcaccgtctggtccagtgaggaggtggccacccgggccagggggcccccaaagccgcagtgcaggtccgt

SEQ ID NO: 160158 - DNA, 1000 bp, Homo Sapiens
ttttttttttttttttttttttttggtgccttaactgagtcatcttttttccattccattcatgaaagcaacataagaaagccaagagtgaaaggggtaaaagatcacagtataaaggtcttcggtgtgtccttcaaagatttacacaacattgtcctaaagggaagtcacagcagcttagctgtttctcacagatcagagaggatggtggggcagccaggagtcatcagtaaacccaggtgagcagtgcaggactgaatgtcgctgtccacttgcaggtgggagtccatgtggagggtgctccttcttgtttctcattgggacggtgactgtgtatagtggaaagcacagagccaatgagggacaggatggctgtggtggagggaaaacagtgcagggctgctctgtctctctgtcctgtcccgttaggactggtgggccaccacaggtttcgcgaaggtgtggctggccattcctttcctcgcgttggggtttctctgtgtcagcgagcctcggtacactgatttccgatcaaaagaatcatcatctttaccttgacttttcagggaattactgaactttcttctcagaagatagggcacagccattgccttggcctcacttgaagggtctgcatttgggtcctctggtctcttgccaagtttcccagccactcgagggagaaatatcgggaggtttgacttcctccggggctttcccgagggcttcaccgtgagccctgcggccctcagggctgcaatcctggattcaatgtctgaaacctcgctctctgcctgctggacttctgaggccgtcactgccactctgtcctccagctctgacagctcctcatctgtggtcctgttgtactggacggggtccccagggtcctgggggcttttttcctgtctgttggtttgatgggcagccgtgcccacctccgggtccgcctgggggagaggcccaactgatttgtccctgttgggctctgccttttcgt

SEQ ID NO: 160159 - DNA, 1000 bp, Homo Sapiens
tttttttttttttttttttttacaaattcccatgttttactcaagggtaatcatgtcaagggtgaagcatggaagctttactgagaaatattttgcccatattccttcagactttcccagtttcataatgtgatttttacctaaattgaacctgcaaagctcaaaagtacataattgattatatttactttcaatataatcagtaattgatccatgactcctaactggcaatatccactccaccaacccaagaataaatatttaccttaagttctaactagctactttgggaagctggggaagcacaggaaaaataatgggctacaagaccaacaccatgatgactcacataagtgaaatatatctaactacacataacacacatgcttcaaaaaagacaggccaacaatgcctaaactctttatttcaccaaccagtatttctgattttcttcttgatactggattttaaaaccttagaagtctataaatactgcattcagactttccacatcaagagaaaggggaccagggcagaagatgtcaggccccatgctgttttggggtgggaaaagtggcaaagaattctcaacagcctgtgtcagttttctaacttaattgaaacacctttaagctctccttcatccccaaactttcccctatggtgtctatgatagaaaaacacttctctctcatatatgtcccatcactagggagccagggggaagggagtgggcattacacaggcaagccaaactttttattcagccagaaaatggatttctgattcagtttaatggtaaggagttgtgtaaaaccgtaccaagtcctgcttcttcctcagagtgagctgggctgcatttttgtgactggaagcatttctcataatggtgaattaagcactataaaaaaataaagtcaatcccatctctatgagtagcataagagctgcttccaagaacccagggatgcccacatcccataacccacccagacacggc

SEQ ID NO: 160160 - DNA, 822 bp, Homo Sapiens
ttttttttttttttttttttttttttttcagattccacacacacagcctttattgagcagctactgggcagtgacgctgccgaggcgggaatcccaccacagtcctgaccgcagctgggacccctttgcctcctctgacacccccacctcaatttgatacccacttcctgagcaaatgtgacccctagggcctgggattcccaagaccaccccgaaatgcagcggccccaccgtctcctgaggccggtgaggccaggggcagcagtgcggctcagcaggtgcgaggcaggcttaggatttcggaatcaccacctggaacttacagacgggcagggctgccacggaggcggtgaccacgctctcaatgcccagggtatagagggcgccgcgcaggaggccgcaggtgaaggccaggaacttgggtgcttcctccagatactgcaggccagaggccatcgggaggaggagggggaagctgttgtcttgcaggacgtaggtcccctggtgattggtgcgcaggctgtccatctgcttctggaacaccgccacccacaggtctttgcacaagaacttgaggacatccagctcctccctgaaggccagcgtctcccggggcagcctctcgcctagagcctggcccacacggaaccccataccctccaggaccgacaggctcatcttctgtcccttggtggcccccgcttcctccccacggagcccggcgctcacccccgggccggggtcggggtcgtgagcccacagctcagccaccatctccgtgtgaagaaactcaaacaacacagtatccgccatgccccctcc

SEQ ID NO: 160161 - DNA, 632 bp, Homo Sapiens
ttttttttttttttttttttgtgggagacccatttaatgtggacactcaaggcctgggcagagtggggagcgcccaggagttgggtgggcaggcaagtgggtgggttgcaggcccactcttggccccaggagggcatgccaggtggtgggggctggcccaggtaggccaaggggaggcccaggcaggaagggtggcccaggcaggcagacccaccaggggtccctgaaggccagcccttgagaaggtgtctaagccagggggtgagtgcccaggccagagcctagcccagggaggcagggttgggtcccggttgggggctcttggagcctaggggctggcatcactgggggcctccccgagctgctgctggaactccaggcgtgtctgccggttggactccagcagctcctggaggcgggcgtggaggtggtcattcttctcctccaggtggtccagacaggagttgatctggtccagcatggagttgatggcagcgtattctgcttccccgaagccgtcctcctcgccttccgctcccgcctccaccggcatccccaggtctccgttggggcccgacattgcgggctcgggcgcccgaagggccgcgcgacgatggaacgcggcgaccgtc

SEQ ID NO: 160162 - DNA, 1000 bp, Homo Sapiens
tttttttttttttttttttttttttttttttttttttttttttgaaactcaaatttttattccttccacagaaaacactagagaaacttcgagccaaaaatacatgctgactttctagaaatagtgtaaaggttttttaattgtgtatatgtagcattagacaaaattatttaaagtcaataaattgttattcgaggaattccatgttgtgatttcttccactgtccatcaaggtcactttagatcctctaaagagctggagtcaaaagatttatcttcaagtttgccctgaagaagagaaattttgattaacctttaaaactctcacatggcaacaatcatggattattacgttttatatctcctcaggaaaacatagcaccaaacattaggagtgctatggcttcctatagagaacttccatctttggtcacagcgttaagagctctgggtttcacagcctcataagccctctttgaaatgacccatacaaatgtcttttctaatgcatacatacctttttaatgaaactgatccagttgtcctgtcagccctacataacaatagtataaaagtaaattttacatttccagagatgagtgtacagtgagtgaacatgaatgagtccctagaacgagcctgagttaactctactacaaactgcttggttattagcaacccacaagggttacaatataaaggcaaagcaaatttgcatgattcaagagatctaggagaattttcaaatctcactgattttaaagaaaaatcacatgtggttcacattttatttgtattgcatttctattacagttaatcaactgttcccaataagctgattgctagcaacgtagcagatagaaaacctactgggaaatttttttttatggtcatgtccacagcaaatgagaaactgcattctaaaagccttggtaatgaccattacacccttgagcaaataacttatagttaagataaaaaccattacttgccataatta

SEQ ID NO: 160163 - DNA, 1000 bp, Homo Sapiens
tgatttccatgcactttaatgaggtccagcactcaggaggattagcgcccaccaccagctgcctgggcaggggagggccggagggcccggtgcaggcgtcaggcttaggacagggaagggggctcaggatggggaagggtcctcaggacaggggaaggggctcagaagagagcagggggcttaggacaggaaggggcactcaggacggggcagggaaggtgtggggggcagtcgccacctgggtaggaagcagtggtgttttggacaggaggggctggctctccagtgacccaggtggacaccccaggcctgactcacggctttttggggacatagtggtggatccagtccaagtagtaggtgacacgggtgtagatgccaggccggttgggctgggcacagccctcgccccagctgaccacgcccgcctgcagccaggtgccattcaccttgcacaccaggggccctccggagtcgccctggcatgagtccctccgggtgttcccggcacacagcatgtcgtcacggacgatgcggacgtcgtctcccgtgtaggcgccaaggtggtattttgcgtcacaaatgtggttttccattatggggaccttcacctgcttcagaggaaatggcggtgggaggcgctcatcattgtccacatcgccccagccagtgacccagcacggcatccccggggggaaggtctctgaggcagggggcagggtgaccgtgtggacgtggctggagacgttcaccggctcctccagctccagcagggcgatgtccgctccgatctgggcggtgtagaactgtgggtgcacgatgatcctgctgaccggcagcagctggtcctggtagtagaggtgctgctcccgcagttgcaccctgagggcggccagatccttgacgtccggtcccacgcagtgcgctgcggtcagcacccactgggggtggatgagggagcccccgcagaagtgcatccagtatcggtcgcggactctca

SEQ ID NO: 160164 - DNA, 1000 bp, Homo Sapiens
ttttttttttttttttttggtgtgtgtgttaatttaatcatacaaatattcatttatacaataaggaaaaacctcctcatctttatctcctcctaggcaccatgaggccccaccacaaacatccagctggctttctacacacaccactgtccaggtgggaagggcagccactgctgctcctgcattcacccaaggaaacaaaggaaaggtgcggcgaggcagggtggggtgagtaatcagcttgcacttctgagccctggcaaccctaccatcctctcctgctgggctcagattgaatttggggaggtatttattctcatgcccatttcccaccatggccaccctcaggccacaccagctgtttggtgaggttctctccaggctggaagtaactttgatgggcttaaggttacagccagtccttatgggggagagaaggctgactgcttcttgtagaaaaatgccccaaattcaactgtcctcacggcaaaaagaaaaaaagcatgcacacgtgcacatccatccacacacacacacctcactccatgcacactgacagattcttcccaagtctgaacccctctgtctccccaactgggttcagaccctatcacctaaccatggtgtctgcctcacctcctgggtgccagacgcaggtggtcctgcccagaggtggcctgccacttggtgaagattctaagaggagcagggactattggggctgagaggtagccactaccaccccactaggcaggggagcagagaggggccctaggcattgctctgaacccataccagtgaggggagagagaatgaatgatactgataccctccctgggctggggaagccatggacccctctgcctgcactccatgacttgcacttactctggccctctgcaaggagctcatctcgcctccaaggatgtgcacagaaatggtttgttcttgggaagggagacaaggtgcttgggacatttaacttgccaagtgtggttgc

SEQ ID NO: 160165 - DNA, 1000 bp, Homo Sapiens
tttttttttttttttttttttttttttttttttttaaagagcccaccctgctttatttacaacacgcaggctgtctgtacaaacagcggccgatattattaaaaacaaaagaggtgagtgagaatcgtcacctttctgctttccttcctcacttggccaggctctagtactccacctttgagctgccatgcccaataggggaagtccaaaattaaaaatacaaccggtgtagaagaaaataaatggggagtgaaatagaagaaaagatgagggaggggagtgctaatatttacactagagttttatagacaactgtcccattccatcccaattccaatcctgacccagaaagtgatggtggcaggtccaagagacagagattatgtgtcgggacacagacagcctcccatccccaaccgtaatggattcaatttcaagtccacagagtggggaggaaggatagggtgggaaagtgagacactcattttcaaacaagtctcccttgagaattcctgccttgaagtgcagacagtatccaagctccaggggataggctgaggaccctgaggctcagttcccaaatcatgttgtcatttggaagttccaggctaaagttggtgccatcagggctctccagatttggggggcccccctaaccgccgggcatctggcctcagttccttgcatttctggcaataaaagaagtcggggacgttggtcttcttaatcttagcacaggagaggtggatccacgtcccacacaggctgcactcaatcatgggccgccctgcaaagggctttcgacagtaacatgtgatcagatcccatgagtcatcacctgattctaccatgatgtcctcgtccatgacccgcatctcgccttcactggagctggcatctccatcttggcttgtttcagtgctgcccacctccttgctttcactgtcagcaggagggactccttcagggtgcactgtggcagggggcctaggagcctcag

SEQ ID NO: 160166 - DNA, 794 bp, Homo Sapiens
ttttttttttttttttttcggggctactggctgcttggagtttattttccgcttggtgccaggtgcacagttccaggtgtcaggaaagctagcgagtgctggggccgggcggtagagagcggggctctcactggtttttggtgtctgctgtgttgatgcgaaggtctgcttgctgcagccgcctagtttacagggtggggggtgggaggtggggaggggggcgagggatgcggagtggggagaggggcggggaggggctctggtggactagcgcctccgcaggcctggggctggtggtaaccgctcaggtcaggacgggggcccagcgctggctgtgctggactgaccgccgggctgcttcctcggggcgtcccgagccaggccacaggcggtcatgctgctggaggcctggggaggttccgagtgctctgcggactccaacaccgtggccatgaacgggagggtggacttcccgaaaaagaagctggcccaccaatgacccgggtcagccttggggagacctggggggtggggaatggcttccccggggcactcggtactgctgcaggagctgttgctggaagtggaacccaggcggcgccggtagtagtcgtgggtggccacgagcgagccgctggaggggatggccgccatgctttagcttgctggctggtgggatctgggcggcgacccctcgcgggcctcggcgcacgatcacgggtggcggggacgggggcgctaggccacggagcccatttgcagagaagaccgcgggaagccgcgccacgacagag

SEQ ID NO: 160167 - DNA, 1000 bp, Homo Sapiens
ttttttttttttttttttaattttaaaatggaataatttaagctttattactaacatacagataatagtatctgtatatatttataaataaatatacacatattgggaatacatgcccaaataccatttattcttaggtgcataatcaaataaggaaggctgccattgctttcacctgctaagtgggtctccaagcccctcttggggaccatgactagagaggggcatagtgggtaagacaattgtgggctccagagcctgaccacctgggttcaagcccccgatctgccccttcctaagctgcctgaccttgagcaagtgacttcacgattctggcctcagctttttcatctgtgtaatgaaaataatagcagctgtcacttcagagggctgaggtgagggacgcattagttgatccaggtgaaacactgagaatggtgcctggtacccagtaggtgctcagtgagtgtgagctatggttattgtctacactgccgtgcaagtggggaattaggtgcagacagctgaaataatgaggtattagtcatgagtggagctgcgattcagaagtcggttctttttcttttttaaaaatagagacggggtcttggcatgttgccgaggctggtctcagactcctgggctcaagcgatcctcccacctcggcctcccaaagtgctgggattacaggcgtgagcccccgcgcccggcccagcacccggttctcgaccacagccgcacctcggagctctgagcatttcctcctctgcaagactgaaatacttctattcagtcttgaatagaacagttaagagtagcatgcaggtcacagggctctcccaggagggaaggaggtcgcagtccaaaagaaggggaggtggtcactgctgtccgcctcccacaggggcttggagagaagtccaaaggctcaagagagtagatggctatggaacacaggccctgggcgtactgtcgcccgggcagccacagtgggccacca

SEQ ID NO: 160168 - DNA, 1000 bp, Homo Sapiens
tttttttttttttttttcagacaaaaatttaactttttatgagatttcagtttttgaaatacacaactcttacagcacaaacacagtatttacatttcaagttctttgtacaaaagatgtatgccattttggaagaatattgttgagatcatgatctaaaatacctgtcagagttactcatggaatctgctcttcacaaatccattgtattatgacataaaatatggctagacgccaaggtttaaccatacataaaaatactaattctcggctgggtgcactggcttatgcctgtaatctcagcactttgggaggcagaggcaggtggatcacctgaggtcaggagttcaagataagcctgaccaatatggtggaacccccgtctctactaaaaatacaaaaattagcagggtgtggtggcatgcacctgtagtcccagctactcagaaggctgagacagaactgcttgaacccgggaggcggaggttgcagtgagctgagattgcgccactgcactccagcctgggcaacagagagagactctgtctcaaaaacaacaacaacaacaacaacaaaaactaattctcagtgattggcaaatgatggcctgagggtcacatctggctggtgggcagtttttgtacagctgcaagctaaacatggtttttacatttttagagggttgtttgaaaaaaaacaaactaaacaacagcaagaagaatgtatgacaaagacacaggtggcctgcaataatttactaaccagccttttacaaagaaagtttgctggcctctgttctatcaaaaaccaactgagagagatagctactggaatataccaatgagtattaaacaagacaccactgtaatgtgccagtgccatcagcactactcatttctaaaatgaggcacttctgtttgaatatgtacatttccaaaacataattacatctggtaagtagtactaactctagccctttgaaattagacctgcacgtgaa

SEQ ID NO: 160169 - DNA, 1000 bp, Homo Sapiens
ttttttttttttttttttaccttccttttaaaatatatttattgaaatacaaagagtcaatataaagaaaaatagaggtcaccatacttggccacagttagaccgctcataggcccatggctgctgcaaccatgggcaggacacagagggagtccagcctctactgataaatctgggcaggttcaccttcgcaggccaagccaggggccatccctggtatgcgaaacctggaggttttccaggaagccggctgctccagagctagctgtcaagtctttagccccacaggctggtgcccagagccacttccacaggagcagcctcgggcttcacccacacccaaggagcttccgaggcaggaggcaagcaaggtgaagggagggttcagggtcccacaacagcagtgagcagggtccagccatcaggcctcagagcctctgtcatgccacctgcgagacgggctcctcctgtccccactgtgtccccgcttcctcctcttacagcagggggagttggagtcggagtcatggtggtggtgcctgggcctctcaggagatgtgggagaggaggtggcctcagctggccgcctgtgctctttgtctttcttcttcttctctttcttgtgtttcctctttttctttttcttcttctccttcttgcttttcctgtggctctcacaactgctttccgtctgatcctccgcccgcggcttcctcctggccgaggctgccgaggtcccgggcccgccgctctctacgcggtgatgcgtgaacacagacagccccagtttggcggcctccttgtcctctcgggacatcgccacgcggcccacggagccacttgcgctccccagccccagcagccggtccacgcccttctcctcggggtcgcctccttcccgcttgcagacctccgcgaagtcctccttgctcaggcccgtgggctgcttcttcacgttcttgtagccaagggcggccagcagcgcctcgcgctccgcctc

SEQ ID NO: 160170 - DNA, 1000 bp, Homo Sapiens
ttttttttttttttttttttttttttttttttttaacagtccaaaccggaagggagaatttattttttgaaactgaaggaagtcccgaccttcctggattgaagtgcacactcatggactttaggtttagaaacctcctcagccttcatttgttcgtggatgtgtgagctctgagggtggccctgctattcctctgtgtgcctgtagtgtccccagcataggggtcttaggcatagggctgaacagtccttccagagccctcgttccaatccctgccgtccttgcccctgaggggccctgaccactgtgagcaggagggtggcagagctgggacaaagctgcctttgccgctgggctttccgggactgtggagggagcacaggcggggaagctccacttcagacagggcttggtggggcaggacatggctcccattttgaagggaggtctccatgtggtccgagtgaggtgagacggccctcgtcctggtgttcctgatcatcttgaaaggttcttctggaactcctgtccccttagtcatgagaacagaaagtgcaatatttcctttcacctggcaggggaggggggatttatttctctgatgtgctcccagtgcagtgaaaacaatctattaggagaccagactcatatccaacttttctccttttcttgtaaatgaggcaaacacttgatgcaagggcttcgtacagaacagagtttcatgagatgctcgttgctcctcccatgaagtggataatacttccactccttgacatgtcacggtgacgtcagtgggaagagttgctgtgaggtccttatacagcaatctagcacagaacgggaaggactgaccccctggatccagtttgtaagtaaatgacagcaagttacacagtgggtttctctgcaagggcccagtcaggagggctgcaaagtcactctgaagccggtctgcctggtacttcctcccagagtaagcattcaggtactcgcagagact

SEQ ID NO: 160171 - DNA, 1000 bp, Homo Sapiens
tttttttttttttttttttttttaagaatatagaattttatcttcctttagttaaaaaaaataatcgtaccacggaatgaagaagtagcttttttggggggtggggtcggggagaagggaaggtgagaagggggggaaaaaagaagcaaaaagcccaaagaaaaaaacattttatattcatctgtataaacatatccgctaaggcaaacgcaatccgggtccgaggctgctgcgctgggctcggtgcctcctaatttctgcagattctaaggccaaaaaataaaacctctgcaagtccgcgtagcttccaggactcctgggcattttactaaaataaagagttatcgagtttaaaaagcagtgacgtcgttatgacacacactgaaagttgcataactgtggcctcgagggccactcacttgtttggactgagtgatggtcacagtttcacgacacagcaacagacaccacacacaggcacacgcatgtcagcaagcacgtgggaagctgtggcagaacccggccggtggcctgggcctgaccacggcctgtctggtgcagggcaccagggtgttagggtccccatgcttcctcagggggtgggcatgacaggcaggtcgctggtgacaaggcagtggacgtcacttggggaaggatggcgggagagggctggacaggcccccgctgcccaccgcctggcgcatgcaaacacacttaaagcacttctcggaggcttctcggagaatcaaggcgaagcgctcgtctccttccctaggaaggtgccaattcttcctcccgccccactctctccagagccccgagaccctcagggtgttctggctgggggtgctaagcagcggtgtctccgacccccagagccttccctgcccatgatcccacggcatgcccggcagggggtgggcctgtgaggtagattggcacagctgcccccacaccctgcctggctgggccccagagatctggggttctccaagtcagc

SEQ ID NO: 160172 - DNA, 1000 bp, Homo Sapiens
ttttttttttttttttttataatttagaaatttattacaaaacttttaataaaaaatacaatgatattacaaatttggttttccaaagctttcaaatttttcttaacattatctttcgttttaagaacacttttgaagtcggcagttatttaaaatccttactagaaaaaaaccaaagcccaaggattttgcatttagtcatcatctaggtatacagcgtgttttccgaaagcatcctttaagagtttggagatttgatgaaattgctcatgtaataagcagttagtgaatactattgaatcctaaacccagataagtcatcttgggctggctgtgtttttcatgtgaagaaactcatttatagcacaggcaccccaggccaatagagatgattacagatctctggtttcagaagttctgaccccttattcagctaccaaatacttaattgctaaaggaattactcccagcaggcacaaaacggtttctgaatatgacagaaaaggtacacaaagaatcatttaagacatcctggttacaacatactttatctttaaaagggtgtgagagtagttggggaacttagaaattctgtgacttaggtgtgggtggatcttatttaggaagactaaagctatggacacaacacgtgaaagaaccactcagaagcagccctaggaagcccaggtgcccacatcgaaagcactcccaggtgaaagcagccaggcaggcgtgggcattgtacaaccagcctcaggcctcagttcttgattgtggttgacggggcgtcaccatgaaggagcccatttagtataaagcttccaaccttttctcttaatcgtttctttaatcttttaaaccatcttcaagtgcataggggagtttccgatgccagaggatgaaagcaagtgctttctccaccctctcctcccagagtgaaaacaaatccttttgctgatacttgtttcaaaagcatccattgtaaagcttctcagtgaca

SEQ ID NO: 160173 - DNA, 1000 bp, Homo Sapiens
tttttttttacatgggttcggactgattatttttaaggacacaagggcttaggagggggagaagacgcacagggtccttattggccgggtcagtgatgaagttacaaagtgagtggggttggtggaggtgagagacaggggtgagcaggagaggaagccttgctgaatccacaggaggaagagagacttggtagagtcggtgggtggggcagcctcccagcctcccacttggccttccccaaggtgccctgccatctcccgtggggactgctaaggttcaagtcggcccaccaccccagctctgcgtgcaaggacagctgctaggagggtttctgtgtgtctgtctcttaggcaaagtgagagctcctggtccctggcaaggtctggcagcttcttaacctggagatgaattcgaaacgtggggcccatttccaagattctttcgcaaatcgcagccattgcgctaacctgcttctgctccagacgggtactggcactgcactacaggctcgctcctccgcgggcacggcgcacagttcagcggtagtccctgcagggcaaacttggggtttccaaaggctttgggtatgcaggaagactcgtcgcacgcggagtctctggggactgagagtcgccgggcagaggcaggaggctgtccaggaatcatacggcactcaggacttcgtggcctaggccgggctgggggtgcaccttcaacagcgctggctgtcgcggtgtgcgccagagaccagatgcgcggtttctccaagcatgggtagtgcatggtcaacctagggctgcctgtctccgccgagaggaagtcagcttcttccgatccggaagggtcattgaaggagaagcggggcgcagccaggccgcactccctgcgctccaatcggccctctcgagctgcagcgcacggcccaggcagtgactgcgcgccctttcggaactccgtcagcctgtccccagctgtggccactacctcctcgtcttcagc

SEQ ID NO: 160174 - DNA, 787 bp, Homo Sapiens
ttttttttttctttttttttttttttttttgcggcagcccgagggcaggtttattgacaacctcacgggacacaagcaggctggggacaggacggcgacaggctccggcggcggcggcggcggcgctacctgcggtaccagatctgcagcctccgctcccgcttgatcttcctctgcagctgcaggatgccgtagagcagggcctcggccgtaggtgggcagcctgggatgtagatgtccacgggcacgatgcggtcgcagcccctcaccaccgagtaggaatagtggtagtagcctcctccgttggcgcagctccccatggagaccacgtagcgcggctccggcatctggtcgtagaccttgcgaagcgctggggccatcttgttggtgagtgtgccggccacgatcatgacgtcggactggcgcgggctggcgcggaagaccacgccaaagcggtccatgtcgtagcggggtgctgccatgtgcatcatctccacggcgcagcaggccaggccgaaggtcatgggccacagagaactccggcgggcccagttgacgaggtcatccagcttggccaccacatactcgccccggctgctgggtttgggagccacggctctggcctttggcagggcaggctgggtgctgcttgggccatcggtggccacgctctgatggacacctcgtgcctgcacagccaggcccacgctggagcgcagaccaaggatccggaagccgcgcaggccaggagctgacagcaccgccatcttggcctcggccttcagac

SEQ ID NO: 160175 - DNA, 983 bp, Homo Sapiens
gcagattgcagttatgtattcagtttcctacgtacttcaacaacaggggccatgggaaggagaggagaaacattgggagagctgcctggctggagtaactgacttctattaagtaatgggttcctatgcgcactttacaaaatcatcttcctacaggaaaatcggcttccacagggataacacgggttgcaaggatcatatgggctgcacgggttgcaggggctgcaggggttgcaggggttgcacgggctgcacgggctgcaaggagaagtgcaagggtagcaaggagactcgatcttgacacagctgccgagcccataggagtatgttacatccttctcatccacacagggcggcaagctgaactctttgcagatgttcatgtagctgtactttttcgatccaaggcagtcgtacctgttctcccgctcagccgacacacatacctttccatccttcactcgaactttgacttgatcgggttcaaaaccgcatacattcaccgatcctaaaatgttactgctacagcaggaggaagccagaattctatttgttgttcttctcagtttggcaagctctcgcttctcatcttctatggctctgatggctttcctctccaaacttctgagagatggtcgcagacagtaaagcttataatcacacaggcaacatgggtagagatcacacaggccgcaagagcgtgatcgcttggaatagcacaagcagtacggatatgggtgcaagtcacagcagcaataggggtgcatatacaagtcgcacaggcaccgtgtgctaaattcgtcgatgcatctcagttgccttagttctctgtccaccttctttatgtcccttctgacactgtccaagagacaactcagtgcagccattatggtcacacctgattgttctgtgagtacctttgggaaatggcactccgggaaaaaatttgttctaagcccttctcagaagttgcttttaaaaat

SEQ ID NO: 160176 - DNA, 1000 bp, Homo Sapiens
tgcagctgttttatttccagcatgttcccaacctggtgaccctccacagtccagcagtagagagatgggtaaggggttagatcggcccacacctccacctgtccctaaggttacctcagttgctgaaagctaaaaccttgcgcgcaagggcgaccttccccaggagggaggagagacgctggaagagcagccaagcctccaagccagggccggccgggatcagcagaggtgcaaagtcccactcagacggacccagcccttcccctcccaacactcatcccttccctgctgggggccggggctggggctgggctcagtggcccaggaggcgcagcatctcctgaggatccaccagcttctccctgggcttccccgtgccctggccccgggccacctcctcggcatccagcttctcccagtctgagaaagagactggccggacccctcggctgctgagcagggcctggatggctgcgtagccaggcctggggccagaggggagcaacccagccttcaggtcctgcagcagcatctggccggtgaggaagctgtcagtcatggttgtggctatgacacctgtaggtcctctcttcacccagccgctgcagtagaggcctggcacatccataacccggccctccacattggggatgaccccaagcttggagtcaaagggcacgcttgggtcgacagggcggctcttatacccaatgctgctgagcaccagcccacaagggaggtcttccatgtctcccgtgggcactgcacgggtggcctcatcgacaccctccagtctagtgactgctaggcggacacctgctgcccgccgcccatctggtgagggcagcacctgctgggggcttcggaaaaagcggaggccccaggcacgggaggccgatgcctggcgggcagcttccgccggccctggcttctctgtggccgttcgaagcagcagttccgtcagccgcttcctcgggcgggggacctccttgatcttgtc

SEQ ID NO: 160177 - DNA, 1000 bp, Homo Sapiens
gaattccgtttttttttatttttatattgatgtatttatttcatgtatgtatatatatgcatatataaataaaaatagtgttgtctcatggtatgaataaatctagtcagtgaataacattcatacataatgcgaggtcttattgagattgaactgttaaatattttaaaagaaaaaaaatttttaaaaagaacacacataagaaagttggtgagaaatgtttaaaaatacagtatatatccctacatttgtatcaggaagttcatactgactgaaaatgtagctaagtatatccttacataatcaacatcatttgtcacctaacttataatagtattattctcatgcagctaagtaactgcaactttgagtatcagccagtctctcatgatcagtacgactatctgtactgtacttttaaatccagttgtcatgggattgcaaactgcctcagcatcagaaactgctgccatttccagtacatgaactatgctttgggtttacttagaaactccttgttgaaaaatcttcttgcctcaacattactaagggaaacagagcaacgagatggattctgtcttctatattcaatgctttcaaccatggcttcttttatcacatcaatgttgttcagagtattgaagtgcataagatcatgtagtcttttgaatgcttgatttggatattgaaaattgaaggttgaaaatggtgattctgggtcatcaaaaatatcaaagtcagcgatttctttctcttcctcagtttcccttggaacacctggagccttgtactttctgaagttgatgttggccagaacaaagtggatgatggttgggcaatctttctccatatcaggattcttgggtttaaagacatagcactccttcagcccttcccgatcaaacacataaggatcaatctttggaaaggggagcttgttcattttagcccacttttctgcaagtagaagttccttgaacggaggactagagtcacttgg

SEQ ID NO: 160178 - DNA, 1000 bp, Homo Sapiens
actttaatattcatacatgtattctgccatgtaaagaacctttccaaattatgtatcagtctatttgcatcatgtcaaattttcaaatctccatattttcacaagatatatattctcctttggaatctttctgcacatttatatgaataaattaaatagtatctctacaaacatattcaagtaattatttgttttgggttattatgtaacatgaaataattatatatcaatgcagtatttttttcatatgtgacagtgaaacaaggtttttaaacaaaaaactgattttattaaaataaaatttacataaattatgaacagtctatttgtatgaaagcccctcttcagatatattttccacttggccatatgtaacacataccttagcatgacataaaattccaaaatcattcaagtagtagagctaataaatttgaattgtatttttagtgttaaaaagaaaaaaatgtaactatttaagattcaacgaaggtgatttctcattttcctactcttttcatctctctctctttttttttttgagatggagtctcactctgttgcccaggctggagtgcaatggtgggatctcagcttactgcaacctctgcttcctgggttcaagcaattctcctgcctcagcctcctgagtagctgggattacgggtgcccaccacgcccggctaattttttgcatttttaatagagacagggtttcactatgttgtttaggctggtctcgaactcctgacctcatgattcacccatctcggcctcccaaagtgctgggattataggcgtgagtcaccgcgcccggccctcttgtcttctcttagcctacttctcagagtttgtttctaagtggaagcagtcctccaccaaagcactaccatgtggttttagaatgctctgcctgttttacacctgttgagaataaaatgtttggacttatgagtaagcccaccaagacaaaatattgggatgtcaataataacctttt

SEQ ID NO: 160179 - DNA, 1000 bp, Homo Sapiens
ttgctgaaatcacttaacaaacagcaaaacacacatttattgggcatcgccggctgcccgccaggcgctttcactagtgtagtcctcacactcctgaggcaaacagacttttctccccactttacagatgaggaaactgaggctcagaaggtggtacccaggacccacagccaacctctgtgctcgttcctctcatctacccttgaggaagaggggagtccaagagcccagctggcatcgggaaggttcagtgacaaaaagctcagtgccagatcttcatgtcccctccccaggagcaggtggcgaggacggagggcagcacggggtgataggtggtgccgacacaggcctgtgtgtgcccctgcagtgtgcatgctcggctggctgtgcggaagctgtacatcaggacccggccatcggcgctgcccgtcaccagcaagtcaccgcctggggagcactcgcagcccactgagtagccctccaccttgtgcccttcatagcgccgccgtctgatcatccggtagggccacacagtggagaaaagggccaggtagttgccattggtctgtgccaggaacacgggctctctcgggtgcaaggcgaggctggggcaggtgaacctctcgtggaaaatctggttggagattttggcagaggtccggaaatcccaggcaataatggtgcggtcagctgagtcccgggtggaagcgtctgtgctgctcaggaactcggagccttcccggaggaacaggatgtccaaggtctgctggatggtcgccttgtagcttctcatcaccttgccagtccttatatcccaagctttcatttcagagctgaagcctccacataaaaagatgttgtggtcttttggatggaatttcaaggtagtgattctaaagtcacttcgaccactaaatagctgggttcctgtttcaaggtctgttaggtgcagcgcgaagtcaaagccaccactgaggatgcgccggccacagggagccca

SEQ ID NO: 160180 - DNA, 1000 bp, Homo Sapiens
ccgattgtcacttctgtttattgagttacaagttgagatgtgcaggttcggtggcgccagcccccccatcccccccccttgggcaaaaatagctcccagcgccgaggaatggggggtaggaagggtctcggataacgggatggggcctcgagggtccctgtggggctcgtgggtcccaggatcaagcacggctgacacggaagacagcggggtggggggcctgccttggccgtggcgttggggggaaggtgagggagagcttctgtacaaggtcatcttccgtgagggtcccggctgcggccccaaaacgccgatgggccccgcgggacggaagcggagagcggaatgtccgctgggctccctcggatgccacgccccgcccaggcagcctgggggcgtctccctgacctggccccgcccaccggagcgaacggcccgcccaggtggtctgcgctgcagacctggcgcaggctcgggcctcctcctgctgcggctgtgctcaccaagcgatgccccgccggcccagcggctacttcttgtcttctggaggcgccggcagtggctccggtagagccttgggcgagggctcgggctcccagagcaggaattcgtggagcagcgtgttgaccgtctcagggcattccagcatcaccatgtggctgccctcgtcgatgagcttcaggaatgccaggagcaggatctcggccatgcgctggtcttcctccaccggcacaaacttatcgtgcatgccgtggacaagcaggacgggcacggtgagctcggcgtggtagacctcgtcgccctcgggccagtactggccgctcatcatggcccggagtacgaaggatgacacgttgaaagcgttgccctcctttaacagctgcttctccttggctccttggcgggcgaagccggccttgaggaagctccaggccaggcagggcgacaagcagtgcaggacgcaggtgggcatgttgaagattgagcagaagctgggctc

SEQ ID NO: 160181 - DNA, 1000 bp, Homo Sapiens
ttttttttttttttttgagcataaagttatttttttattagtaacagtatgagcactaaaatatatgtccaaagcatgttttaaagcagactgtaaatgttacctgctggcacatttaaccagttctttgctggtttgggactacaggaggcattttcaagccttaaagggaatgccctctgcagcgggatgtgctgacggtcaagaccacgttcgaactgtgccgtcagagcctccagaaaagagaatctccccgtcgtgagaaaacacaaccgtgtgtgcctcgttttcgtggcccatcaatttgtgaatctccccagatttaagatctagcaaatggataacaccattgccacttgcctgagctaaaactcgacctgatgaatcaaaattcacctcattgccaggacttggacctatatcgatggacacaattggtaacagcttccgaaagtcccacagctttgtaaccccacaggcatcacaggatgctatcatgtgacccctgggatcaaaaatggcatcattgatagaatgcatgtgaccataaagtgactgctcacatatacctgttcttgcatcccatatagacagggtcttgtctgcagagcttgtgagaagagtattggagaaaggaaaaaactcaatgctgttcacagaatctgtatgtccatacaaagtacatctgcatctttcactattaacatcccaaattttgctagttttatccagtgaggaggaagccacaaaattgccgcaggagtgccatgtgcaggaccacactgcgcggctgtgtccttcaaaggtcaaaatgcaatcgcctttacatagatcccataatttaactgtagtgtcaccacttgaagtagccaatttgtcgccactgggatggaagcagcagtctgaaagccagtcagtgtggccaaatcccgtgagaagcacattgcattttggaaggcccaacaccttccagagtcggtcctcgccacaggagactagg

SEQ ID NO: 160182 - DNA, 1000 bp, Homo Sapiens
cactgttggttgccttactttaatgctgacctagcagccccgacaggaagctttaacataaagccttgaccctgagaagcatgggtgcgtcttgtcgtgagcaggttcatggctgtgctccatcctcagcccgctgatttttggtcttttgtcctttgatccagcagttcccacgtggatgttgtactgcttctgtccttgatgttgatgccgtgggcagtcaggccccggcgcagggtgtcgcatgcttccagcaggggctgcctttctaggagctgctgccgccgggcgtcccccgtggcctcgggcatggccagcgcaaactgccggaccttctgccggaaccgcaccagctcgtccaccacaccatgcaaggtagcctcgctgccgtctcctgaaacgtactgttgatttgccagagaaattccaacagtttcaaaaaactgttcaaagtaagagatgatggcaccaaacacagcaggacttctcggcccttcaggttccttcagggacgccctgagctgtccattcccgtggtgtgcaaggcccaggatggcatcaaccaccctgggtgtgtcaaaatcatctgccaaggccgccttcacggccctcttggtgctggagagcctctcccacagcatcgcttccctgacggagccgcaggccagctgccccttcatgtaggcacgtgcgtcctccaggaaagagcccagccccaggagcagctgctgagcttggagcatggcgctgtcactgtagtcgatggctgagcggtagctgctccgcaggcagaagaaccggaagacatcgggggaaaaggtcttcagaaagtccttaatagtaatgtagttctttaatgatttggacattttttcttctttgcctttggcgtgcaaatgcccagaatgcagaaaataatttccccactgctcgcactgatgaaagacttcgcactgtgcaatttcgttctcatgatgtggaaaagctaaatctatcccac

SEQ ID NO: 160183 - DNA, 1000 bp, Homo Sapiens
ttttttttttttttttgcttatgacattctttattcaattcacatagaaaagcatgcagtattaatgtaaaacagtacaatattaatgtaaaatgttcagtgcacattaaacagcatacaaacccatttttaaagacctatataggcataccaaatacgtttagaacaatacactttttcagagcctaaattaaaaattgtgcttacctcttacctatcttcaccccctcaacactcttcacagaaaagttttgtcctacataaaagatattctatcagccaactgaaacctctttttcttaagtatggaaaacacagcaagcaaaaatgctaccatgcatagtttccacgaagaacaggaacatgcaaacaagaaacatactactcaaaagaaaactcccctggaatgcaagtggatcaagaacttggcgatgagctctttcaaacctgttacatctggaacaatgaagctatgatgttttaggttcctctaaacccaagtgctccatgccttctttccatagtatgctaaatttctgattttacacacatacacacacacgcagaggagaaaatgtaagctacctaacataaaacaaatgtcttcatatagaaaatgttttctttcatactagcagaacattttcacaaaactggacaaaacacaatgctaaaaaatgcaaacatatacataaaacctaaaaaaagaaagtaaatcaatattggactaaggctagagtgctatttctccatcatggccctgcagaaaaactaggccatcactaaacataaataaaaagggacaggtaaaataatttccaccctgggaaaagcttaaactcaagtgtcttattgagcagtgtatagacaacactaaaagttttatttaagaaatccaagttctgaagacaagtggggcttatcaacaggccactgtatctaacagttaaataacattttttaaaaaaacaatgtatatccaaccgagatacatatcaaa

SEQ ID NO: 160184 - DNA, 1000 bp, Homo Sapiens
tttttttttttttttaaacagtaaagagcacctgttatttttcacctttcgtgtacaatacatctagattgcattcagtatattttaaactgcattcttcacaatgtgaatcaaatgttctacacagagatagatgcaatatgctttctataaactcagtcttgaatgactttctgtaactcaattaacaataaatgcctagtagtagctgacagattatcttaatatgatcccataccttctaacagcagtctgtatgctgatgtataattttaaactgttttcctggcaccttattcatgccaagcataatgtaactctaaaagccatatctacctttacataatgtcttaattttccagtcttctacatttcatgactgggaatgtctttgggaatgtgccctcttcgaactctcaggtcttacatgtaaactgaattcacacatacctcatgatgtaattcatgggtgctatcttgtctcaagaagacacacgtcagatgcagtaaggagaaaaggcctttagtttggtcaaaatcctcccagtcttaatctagttgctgctactttccccagctctctcaaaaagacccaaatatccgagtatggaacacatggtctctacccctgggcactgctatatcggttctctgcaacagacatactccaacttccctcttgagttggcactttgtatacaagatcagtcctcatttgtttcaatttatggttctgagaagaaatttctcaaagggtgcaacattcagaaacagctttaggtaaggactgtccataagcacacagattctctcccctattgctggcttcctggccttctgagctcctcatggcaggagcagaattcacaatcttgagccctcttatagcgttgcagcctcctcatggcaggaccatccctgggcagggcttcctgcagcttcaatggcctcaagtcttgactctgcagggcagggtctaaagtctctatctaaagcttcc

SEQ ID NO: 160185 - DNA, 1000 bp, Homo Sapiens
ttttttttttttttttttttttttttttttttttttgaatgttttgctctgggtcagttttatttaaaaggagcacagacccgccacgttccaaggctcttcagggatggcctcctgctgcctcacttggctgagctctcctcttcagtgtcctcttcctctgcccacatctccaaggcttcctcgtgaggtctggaggtggcctatctgtcaaagcagccggtggggaacatgtggctcccactgaagtagctgcttccataggtggtggcgaggcagtgcctgggctcagctgcaatggccatatgcatgctaagggatgcagggacgggcacgggacacatatccaagggctgcagcggttggtacggggtgtggagggatgagcctgtactccccgagagcaggctccctgaacggtgggcctgcaaggagtcccgataggccaagcataggtcctgcacgggggtctggaactgtgccagggtggtcgctggctggccgagggccgggtaggctggtggctggaacagcacttgagtgggggtggggggtgtgccgggcaccattgccaaggcctggctcttgacggctacggcatccttgaggacgttgtcatacactaccagcaggatttcaatacacgtgctgaggtgctccagggaatagcttgagatcctctgcaggtctctggtccagtagggagaaagctgcaggcaaatcctggaggccccaacacaggccgcagcgaccacagaaggctggaatttgtagaatatgtgatcttgcagggtgacctctaggaagtaatgggcatactccttgaggcactctttggtcttgcgggggcaggtggtgggccaggtgtggcagtggtggtccttctggctgacggaggccaagaggtagtagtccaggaagtgggcaggcgtgggcaggcagaggttccagctgaaggcctccaggagcagcagctctgtgctcagcagctccttcttgg

SEQ ID NO: 160186 - DNA, 1000 bp, Homo Sapiens
tttttttcagaaattgaaaaagatgtattaaaatattcacaaaaatacaactgaagatcaaaaaataataatgagcttgatggtttttccctagctgatatatttccattgaaaaactagagatagtttgaaatttcaatctctaagtaatgccttttgagtgctcccatacagaattagcgcataattttaagacgaccctgtttgccaggacgaagacatggagagggcagatctgccctttaggcaaccttagttcgttatctgcaaccaggaaaggagtgctgaggcacagggaaaaggggagccaaaagggctgcaggggtgggtgtgcagggcttgggaagaggtcctgccctgagaggctcatctcagtgtgagcagcttccttcagggaaacctgtcctggcagagcaccatgctggcagctgcccttgcctggggggaaggttggtgagaactggtgaggattctctgccagaatgccagggcactgacagagtttgaggtgtctggttgggcaggaggccaagaagtcgggctggggaagggagtggtaagggaggaacaggcctccaggtgtcattcgagtgagtggcccccacagcaccagcttcaccaacacatggtcccggcaccgcaagaagaagtgaaggctcttgctctcagggagctccgaaatgtttcatttattcacaggaactgttgagaaagcagtgaaaaaacaatgccccttttctctgtaaaaaacgactgtaaggaaacatgacacaggcctgtctacaatgtgtgtcctctgtacctcaagcacagccctggtcagctatgtggttttcatggtggcaaaggctcaccaggagtctcagcttgaaggatggtgacaatctcaacacccttcccctccaaacataagaggccttccaaaggctcctatagttttcaaaatagatgcccaaaaagttttaggatgcaaggcagagttgaccactttgtggaaatg

SEQ ID NO: 160187 - DNA, 1000 bp, Homo Sapiens
ttttttttttttttttttttttttttttttttttaggtgtctaatacatgtttatttcactgggatggagagcaggccctacttccagggaacaggttgagatctggagtccctgtagggtcagagctagaggacccagaggaggaagtcctggaaggccttcctggaggaggggctgtcagagctgagtccaaactgaagaggcatttgcaatccaggagaaagcgacccctggtagggggagctgcaagaggaaaagctgagagataccaagaaatgcaagggacctgcatccccatgcatccctctgcccatctgcaggggcacttagaagtacacggagccctcgctgtctccttggtcatcgaatttctggatctgagtcttgagatgcctcagtttacccttcaggtagtggcagcgagcctgcttgtccaggaagccaggatccattcgcttcatctcaaactccctccaaacccgggctgcaacttgggcctccttctggctttggggtgggggcagggagctcagcagggcctccagctgcctgagctttgcctgtgcacaccccacctcgtgctggagctccaagaactctccgtactggtcctggaacactgcgacatagcggctccgttccctctcactgctcactggcgggtacttaagctcatagtcgggcactgggtggggcctaggcttatgccccttagggatggctccaataggcttcttggcgcccaggagggcctgggagagcaactcatcctcaaacacaatcttcttggtctttgccttgtggggtcccggctggggctggcacggagggcggggggcgctggttttgaggcctcggggcgccagtccctgcagcgggggcccaggcccaggcgggtgagtatgcaggtgcccccgggagccgcgagtctttgggggctcccgggtgggcatcggcctccgggagaagcagctcaggggtttccgggctgatgggcgt

SEQ ID NO: 160188 - DNA, 1000 bp, Homo Sapiens
ttttttttttttttttttctctttaaaatatttatatggatcaactttattgaaagtgaataaacagagataatgtggcaaaaagaaattttcccaatattaaacccttgatgatacttttaaattcactataaggaaaagaatccaccagtagtaggtagctacttatttttgctgagtgtcctctgcttttctgcatgctccacaatcttttcttccacataaagccccttccgctttcgtactgcgttcatgtacttccgggcttggttctcagagtcagccttctccccaaagtgcaagtattcctcctcagtagttggcacccagaaggggtcactgggaatgatctcccaatggctgaatactagttgtgggctggccaggccacttgtcctcttcctgatttcatcagcaaaaccaaagctttcagcaacaggcagcacagccttgatgatgaacatgtctgtcccttctttcatttcttcttgaagtacccgaccttctctctttgacaagacagcatagactcgaccgagaacatcaccagtggccatgatgtcacatgtgtacatagctgccatcaggcgctgaggtttcacttgcagtgcatagcgacatgcttctttcatggtggcaattagctgtcctgagaaaggtccatagcaatcagtgagtggagattctcctttctgtgatgtcctcttctcaaaggcctcagagcagccatcttgtagctcttggttttcatttccaccagaacaggtttcattttcctcctgtccctcttttgccagatcacttgctccttgttcctcaaatttacttaggtcccatttttccagaacaaaacagacacccatgagaggctcctcacacatggggccagagagggttgctagttggaagccactcacaatgctatagacccaaatctcggtatctactggcttcttttgaagctttgtcagctggacctgtccatactgagttctgaaaa

SEQ ID NO: 160189 - DNA, 1000 bp, Homo Sapiens
ttttttttttttttttgcccaaatgaccaatttattagaggctttgcagggatcaggacactctcaaagcttttctgatatgtcctgaggactctgggcctgagtctactttttaaagccattctggaagagaaaaaaaattcagatgcttcataatactaaactttttggaggctcgtgtattctgtggagccccatttgggttcccaggtgcctcctggccctggggactctctgtcttaggaagggtggccccagtacagcagtgaccttgcagctgaagatccctctgtgaagcagtgtgatctccgatgctgtcctcccctgcacgaggatcacccactttgggaggcagagtagaatcaggttccctcaggctcaggttaggggccaagtgcttgcgcttggcgagctgtggggaccaggacatcttggccagaagggtcaggcccagctttgccaccgcagagtggagcctccctttgaagctgacaggttctgcagaatggcaggaaggctgctgcccagcccctctgcaccctgtagattccaggcttcctcttctccagtatgtgagctgctggcatttgagtctggggagcttagaggcctcccaggatgtacattccttcctccagtgggcgtggtctgccctagagaatgaagtcctcactctgctgggagccctctctgccagctgggagacccttgacctgatcattttcctgcccctactgttctcactgggaggctctccgaccctttgtgggccacaccagctcctggactccgctgccggcctgggggtcctgggagctgggagcttggtcctagcaagcgcttcctggatctcctgtggttctctggcgccccctggtggcctgactctcctggccttttcaggctggatggaaatgcttaatgggctctgacatgtgcggtctgttcctctccagagctctggcttgtataggaagtttcgagctttttctgtctgggc

SEQ ID NO: 160190 - DNA, 1000 bp, Homo Sapiens
tttttttttttttttttggagtctgatgatctttatttcttagacagccctggactggggctatgaaacacagtcaccagcactatactcactcctagggtggctctgtctgtggcgttcctcaccatccccgggactcatagctcagtgccaccccccgacaccatgccctccagggggaggggacagcgaaggggagaggagggagagccctgcacctggccctgtcctgagtccaaagattcccatggtgatcagagggcggtgttgggaatgtgggacacccttggccccgcctccctgacctccccactaccccaccaaaccagccttccttcctcctggcacttccagtgtccattcctggcagtgcaaatgtgttaggtggggtagggggtgggatagggagataaatagcagcctggcgttggcactggctggtgctctgtggtgggtatgagtaggggacggggccgccttcctggagacaagctcctgggtgctgtgatcagaagggtctgtagctccagtagctggagaacacggagatcttgtccttgagctgctggcagagctgcagggagacggtgaagtagaccagggcgtcgttgagccaggggatcacgcactccactttgtgcacgtggctcacctccaggcgctgagagccccactcgaacatggccccagggctatgcagcaccgcgcccccagctgggcggaagttcttggtggagttgggctgcagggcatgcagctggtacaccgtgaggcagagcttgttgaggttgatgtagacgttgaccagcaggtcggacggcagggcaggggcgaacatccgcgtgaggccgctggcggcgatctcggggagggtgagggtggcgggggtggtgagccggtttcgggctctggtcagctgcagcatcactgcgtccatcagcttgaggacctcagcgcccgtcttgaactggtagctctggtcccggctggtaagcaggta

SEQ ID NO: 160191 - DNA, 1000 bp, Homo Sapiens
aagctattttaagtataaactctattcctgaatatcttcagatactttctgctagttcaaataaactcacacagacattaatccaatttgaataactacatatgaatgaggctacagtattattcaatccagagtgtgtcacttccgttcatgaaggcttgctatgcataaatataaaaatattttatcttctgatgctttcatttttgaagcactcccttcaaaggatgtaaaaaaatattaaataaaagagctttcaaagtgttctgttaggctatgatttgagggggagatgaatggaaatggatattgatagttatttaactggagatctttgtggtgatatgtgaaagtataaactaactccaacaaactcgttttttcctgaaacttttggtgtaaaattatatattattattattttgagacagggtcttgctctgttgcccaggccaggctggagtgcagtggcatgacctcggctcactgtacccttgacctcctgggctcaagcgattctcccatcccagcccactcccaagtatctgggactacaggcatgtgccaccactcttggctaattttcatattttttcacggagatagggtttcaccatgttgcccaggctggtctcgaactcttgggcccaagcgaactgcccaccttggcctcccgaagtgctgggattaacaggtgtgagccattgcacccagcctgttattattttgaaaggttattctgcttttactgaaatgcaacaaacagttattgagcacctgctatattattatatagtccattcctactaggctaccgcagccattgatgatcttcctttgtgtgtgtgtgtgtgtgtgtgtgtgtgtgtgtgtgtgtgaagctgtttgtatattttcagtttttcggttagtttgcttgtgaagcagcttggagaagtctcatctactttttatcagttggttggttttagaaagcatctcagaaagtggacccagaaat

SEQ ID NO: 160192 - DNA, 1000 bp, Homo Sapiens
ttttaaggaatgaattcatccatttattcaactttccggtatgcaagaacttcttttcatggagtgtcacggaggccctgagggaggaacggtaaactggggcaggggtgtgcatagctctaggaacaggtttaaggtctaggctttagagttggggaaaggggagctattacagatttcaaaaaggccataactggccttaacctgtgcaaaatcttgggggtgaaagggcagacagggagtcaggctggaggtgatggagaagtgaggaatatggggaggtcgtggtagtagagttcacattgagtggatgtgggttctgagtcagggaaggtggtggcactttgtgtgttgagactgggttggtagaagaacagagctcaccacatctctggtatggagggagaggggaaaagagcagtatgtgagggcaggtgctcagctactgcttccttcttggagcaggtgaccaaggagtttggctatcactccctgcccatcccaggctccctgcttggggaggggcctccactaacctccagtgttttatgtttttagttgtgagtcatggctgaagaaagccagagagaaaataggagaaaaaaggcggagctgaaaatggaggcaaagtccatgggttggggacctagatggcccccttcaagtagctcaggcctggcagcttgtgctgggcttgtggaagattccctcttaagaggtgaaatacctcgggaagcaagccccagcacgggtagggcttgtgggtctgcggggctgggccactagtgttacctgaccatgccagctgcccctaccccaactgcacacaggagcagggcacatggggttttgctgagcacgtcagccaaaccagggcagggaaggtgtcttcgccctgggcaaggccaagagggacacgtgcagtcttgctggtcccacagccggcggcacgcctcactcctcccaagggctcatgtcagtgtcgatggccacgcagttg

SEQ ID NO: 160193 - DNA, 1000 bp, Homo Sapiens
tttttttttttttttttcaaatgtatcagtttattaaaaatgcagcatttttcacatgagctttaaagatgtggaagatggggtacaattaaaaccatgagagttgtgcagggaacagccgtagggcctgtttgcaccttcagatattgcctgctcccaaaaattcagacccccagatgcagggcaagacaataagaaagggtgagtgcaagcaaggagagcctcctgctaagaggctgaggtcccctctggttccaaggatgggatgtcagccttgaccttccggggtctgcagtggccagaggctgcctgtcgccccttcctcctccccttcttgggcactgtgggagcttctgggtcctgctggaggctggtcccctcaggccgctgggttgcagtcctcttaggaaggtctctctttgcccttcgtgtcctggaaggggccttgcttggaggcaaagcgtcctccactctgtcctcaggactcagctgtgtggccttggatttctttttgcgggacttgcgccctttgggtgccaacggtccaggatccccctggaaccagatggtacggccatgccggtcctgcagggagctcatgcctggcatgccatagcagcgcagccaggctcgaaaggcagcaaagtcctcctccccgctctctgacccgtagcccctgccccccaactggaccacttccttgggcactgagtgacatagctccagcaggtctggattctgcagcttggtccttatcttctggctcagggtcagctccgggctcggcctgtgctgctgcagggcctccaggaccgagcgggccttctcaaagggggggatcttcagccggtacaggatctctgcccgcagatagttgccaatgccattgaagaacctctggtccaggagggcctcgcagatgggccggtcaaaggccttatccgctaggtttcgtagcacactctccctgaactgctggtactcctgcaagacacagggc

SEQ ID NO: 160194 - DNA, 1000 bp, Homo Sapiens
tggataaatgaaatggatcccctttatttctacatctcaacaagaaactcaataaatcttaatatcaaatacgttaaggtttgattaaaaactactacataccaaacaaaaaaacagaacaaaacaaaatactactatatacctataatgcatagaaaacgtcttaacatctttacaacatgcccattaggaactacagatgcagtatgctaatgaaaagttaaagttttctttcctctccctcccctaaacctgttcatagcatatgtgatttaaaaatatgttcacaaattctttccaaacttctcccttcaagggtggagcttaagtgtgggcttagcgacttactaatccttcagatgactgcagccctagccaagagcctgactgcaacttcatgagagacctggacttttgacttacagaaactgtgagataatgtttgttgttttaagtagctaagttttgggataatttattattcagcaaattggttataaccaatatagcacacaaacctagaatccaaaagtagaaatgactaaaaaaaaaaatgaacattttaaattaactttcttcccactctaaccacactattttctcaatgggttaacaccatcatttactcagtatctcaaatgagaaacccagaagccatactttactctccttaccaacaacaaaactgagttgtcatttttttttttttccttatacatcacttgagcccactcctattcttgctgctttaattctgggccattgccatttttcagttactacaacacaggctcccaacatttcttctttcgcttcccagctccatcgcattctctagactaatgccaacaagagcccttttcaaatacatatctgatcatgtcagttaattaaccttcactactggttcccacattgcacaggacaaagttcaaatgtcttagcacagtgtttctgtccctatcctgcagttttctctctcatctcccatgttcatagc

SEQ ID NO: 160195 - DNA, 1000 bp, Homo Sapiens
ctttttttttttttttttgttttttcaatctgtttattgtatgagcaacccaaacttcagtttaagtgctgttgaaattttattactagattccataaccctacaattgataaatcttataccattttaggtatttaatgagatacttagaaatactaagaaaaaaaatcagtattcaaagggttaattttgtttataataacaataaataattttataatcttcttcagttcaaaatccagctttgaacccgaggaaggctttcgaatcatgttaattaaatggtggtcctttaaccagtagcagtttgattaccaattactcggaggatctctttgtgaatgcctccttcttgtgtattaatatttgcatctcccacttggccgtcttcatagacgaaaaagaatcgtgtgcagacatggtcagtattggggacaacccatatctctccatgtttgtgcaggtcagatgaggtgatcacttcacataaggctatgcattttaagttacggctttgcaggaattgggattgctgtccttttttctgtgactgtgatgtattgctgcttttactgcttgaagctggctcgtccttggctgacaccttctgtttcttgttcatccctgagtaaccaaatgatatgcttgacattggactaagatagattccacttccatacattgcaccatggagctgcaatcgtgtattagaagcaacaaccagaccattcctcaggatggagtgccagttttcaatgtgtgagccatgaaatgcaaaggtgcttccaaagagttttttagcagctctaaaattggattctttggctggtggactgctgagaagaaggaactgatgtggagtatgcataaacttcaattgcctgttaactggcagtttcacaatatgtgatctattacttgatataacccattgcagtaagggatgagcaagggggtcctgtttatccatttgcttcttgatttccagatatggtgcttg

SEQ ID NO: 160196 - DNA, 1000 bp, Homo Sapiens
ttttttttttttttttttgtgcaaaggatttattagcatcaatgccattcatgaaatatgtctctttactacaacagtgaaggaaggaaaaatatgagttcagcatgtattttaatgttgcaaaggaatgacaactcagcaagctgtagaaaatggcagaggagacggggtaataacagaagcaatgaagactcctggatgtacccaaggacaccctacggccagcagcttggtttctcccagaatcagtttacagacttgctcagcctgcgggagggcccaggatcatgcaggaagaaaacggaatacgcttgattctggaattggtcattttaagacgcttttagtaagatggtttcatatctacacccaagtcttgccaaccaagaagcatcaacgtgaacagctcagagacattcctgcacaggagagcagggaggaggcagcggaaaggtacctatgagcagcagtgcccgggggcgctggccacctccctgtgcaccggataccctcccccgcacccacaggggttcacttacagtttccccaccttgcagcagcagtgaggctcagagtcacccacactccatacatccctctgctcataccctgcctgtagtgtggctccgtctacctacaaagccccacaaagtggacaacgctgggatgacaaaacctttcctcttagatattatatactttgcaaggcttggaaataagctactgcattggtcttaagctagtccggcatgtgaagaaacaagaatttgcccagaagaggactgtggagaaacctctgaggcctccttccagagtaaggcccgctcacttgaccagattcctcatgatgttcagggaggatcctctgtaccccgatccaaaatgattccagtggttcaagtagtgaaagagctgatacaactgaaggcgcttctcgaatcctggggccttggggattttgccgtggtaggcggagtaaaaggagctgctaaagccccca

SEQ ID NO: 160197 - DNA, 1000 bp, Homo Sapiens
tttttttttttttttttgcatataaattttaagttttatttttagaagttacacatattttaaaagaacaatttctttttattctttcattctagtaatattatcactacttagaacattaaaggaagatattttcacttatgatagttgacatcaaaactttgtgaggccaaagcaatgaataatcttcaattcaacaagagatgctgggatacctgaggattatgtttcccgttctgtatgaaagagcacaacattcaaaactacaacaaaattcagacatgagttccttagctaatgaaagtttatgcatttggtatactctacttcatttttaatttggaaaagcacatgttaaaaataattttaatacaaaggcattataagtgtaaatttaaaaatcagactttgtatgatcagtgggaaatgtttaaaatattcagcacacactttcctcctcctggaaattctgattagaaagcccaagtttttgaacttctcatttggcaaacctcaatttaagactaaagtatcttaaacttcttcctccaccaaaaacacaaacaaagtccagttttcctcaataactagagaacagtccctgctcttaatatactgccctttttctgaaaatagttcaatttcatatttattctaatatttattgctactaatgtaaggaatgcttcttgatatccaatacattcttaaaaagtttagcatgaatcctagtatcaaacaaataatacagggagcaataaaattcatgttttctaaaataaaaagttcataaatatcattttttacaataactatatttggtcattctaagcagcacactttttaacacccctcaattaggatgagtcttagaattgatgtcagctcaccatcaactgcatggcctcaggctcctggagccatgagctactctcctgctccatgaggatccaccctccactcccagttttcccagcccttctcccagcctggttctgca

SEQ ID NO: 160198 - DNA, 1000 bp, Homo Sapiens
tttttttttttttttttttcgcacatcaaaaatttatttcttgctcatattacatgtgcatcgcggtcggcagaggggctctgctcatcacaggctatcaaggatgacagcagacccctcccttctgccgcagttacacttacaggtggactcaaggttgaatgtcaaaggcagaaagttacaacctgggaatacaggataatgcctttgtaccccccaggtagggaaagatttcttaagtgagaaacagcatcccatacagcacaactgggcactgcctactcaacagccaaggcttggccatccccactcctcagtatgggccccagaacccagggcctgggggactctgcacacaggcatgtggagaccacagaagcctgcccaatatagcgctgccaggaacagcaaagacaaaaccagagaagcctatcgcgggcaccgctgtgggcagaactatgtcccttcaatatttttatgttcaagtcctaacccctagtacttacatttgaagacagggtctttaaagaggtaattcagggttaaatgaggtcatgagggtgggccctgatccaatagactagtgagcttatgagagattaggacacagacacagacagggacacggcaagaagatggctatctgcaggccaaggagcgaggcctcaggagaaaccaaccctgcccacaccttgatctcaggcttctagctccagaatcatgaggaaatgtctgttgtttaagtcccctagcctgcggtcctttgtcaggcagccccagcagacaaacaggtatgttgccctgggatggatgcaggcccctcccatcctcccatcctcagcagcaccaaccagccccacgctgggtggctgcttgtacttctccatactgagcaccccagcccataggatgatcagctgctgccgtcctatggaactcaggtgtggctctgtggcttcctttggccacagaaatggaagtggggtgacacacattactt

SEQ ID NO: 160199 - DNA, 1000 bp, Homo Sapiens
ttttttttttttttatattttggcaactgtttttaatcttttttcaatccatgtttacgatttgctaaatactttaaaatttaaagcatgggtactaagtccattgtcaagatagcaaatttatcttctgatttgtcttcagctggactgtccacttgttaaaaaattaaatccacccttgctcttccgtcggggagtattgaaaagtatgtgcacagaactgtaggtaatttcaaatttggagtttcaagtgtgtctgagcttcagtgcagcaacgtttgaatcagtgcactcattcccacggtgagatatcggagacagcattcctcctgcatattcactttagtatctgtcacttaataccttacttcaacatagagtataaggttaaatcacatatcctgagtaaatattttcctatcccactctctatcccttcaccactgaaataaaggaagaagagtttacaacagatgaagcagatgaaactaggagcaatgaaacccagaatcctcataaaccatcacctagcaggctgtcaacaggtgcatctgctgatgctgtctgggataatggcattgatgatgcttattttttagaagctactgaagatgctgaattagctgaagctgcagagaacagtcttctcagttataacagtgaagtggatgaaattcctgatgaactaattatagaagtattacaagagtaactaattcactatgaacacttttgtcaccaggctataatttgcctgatgtctgtgagatttgataaatatatcattcaacctgtttatataaactaagttttattactttgctttccaatttttgttttttacttctgtaaaccaatttcattaaaaattagctttggtgtaaattcaggagaaatcgccttattaattaatcaaaattatgttcacatcaacttaattttacaagtttattatagctcatacctgggaccgattaaggtgtcaacattttaaaattac

SEQ ID NO: 160200 - DNA, 1000 bp, Homo Sapiens
ttttttttttttccagagaattgattaatgctttgttgaatgctgaaatacatagttttaattcttttaatgatcctgatttttttagtccagagttatcgaaaagaaagtctttctatacacatgctgaatcatgagaatataatcctcctgaccaaaaagatttacagtattcatcattcaaacttttttatttacaataatatttaacagtctttatgggcttaaatgtagtagatatcacctgtgcatcaagcattacacttcattcctttaagatgtgcttcatcctcactcaagctgcttgccaccctccgatttctggtccagtctactcttgttactcttcaccatgtagatgaagtaggcaagggtctctttttcattcacaggtatgttcctgaagtgtcgactcacagtttctgctaactgggccttattgaagcctggtctggtctgcaacttgtagtgtcgtttataacgtcgtagggtgttcacctgcagctggaacagatcaacctcaggaatgtcagtgtcgtgctcgggagaatctccgccatcgtcacttgtcttcctcttccttttatttcggacactctggatgaaatttttgtgaaaatcacagatatataggtgccttacgctcttgtcgatgtccagcttgagtttcttctgcgagatgctcttctggaccctcttgctgaaggaggcgttgcccgcgggccggacgcagcgctcgccgtcctcgatgaggcagcagctctggccgtagcccggggcggcggcagctggggcggcggggggcccttcgcggctgtcctcctccgtgctgaagccgttcatctccccgccccgggccggtccctctgggggagggtccccggtaggccactccgcggccgcgcttgccgcggggcaggtcgctgagacccccgcagccgagggtcccagagtccgtctccagcccgggcgctgccctgccccgcgtccgagaggcccg

SEQ ID NO: 160201 - DNA, 1000 bp, Homo Sapiens
ttttttttttttttttttttttacactagaaattaatttaatagatgaaaaatattgagcaatatttggaatataaaatttacaaagcatattataatacctaaataatacttaacctaatatagtgcaattttacaatatttatttagcttgctgtctaaaattctggtttctttgaactttttgatcaagaacttttatcaacccttctttgcttattgcacaatgcaagtgaaatccaaggggatatccctccatttttattcagtctttcctatacctattctttatagaggaagaattacatgccagctctatagatacgtatgtatccaagacatggatacttttaatcaattgtaaatttttcttgtgttataaaaatagttcctctcagtaaatatctgtattaagaaaagcaaagtcaaggggtcatttcactagaattcatcatggtaatatttatgtttgcctttacttccaaaaaacaacaaaaacctcattccctttttacatttcatgtgacccacttcctcagatatacctaataaagcctttatcagtggtcaccattgtgctgtttttcctttcacttaactcagcccttgagccagagaaggaagctgcaatacttctattggattttgcaagacattaggtcatgcatgttgcccataacaaggaaactctttagtgtgaaaccacaaggctagtctcaatctcagctccatggcctctgggaaaataagagtcagggacctgcactgattcttcactaacctgagataaaatggtgttctcttccagtatgtcagtcaatttctcaaagacaagcaatgtttccctcagtcacggtgtaagaaaaaaactttcctaactgtacccatcattcttctttaaacattcaaaaccatagttcagaaatccagctaaattgaactttgttttaaatattgattttccattcaatgctttttctagtgttttgagttcctttccc

SEQ ID NO: 160202 - DNA, 1000 bp, Homo Sapiens
gttgttgctgctgtttttactcggacaatgcttattttacagcggaattgacaaataaagccttattttacacatccgaagaaacaccatcacaggaggtttgtaggtcggctgtgtgctttccaaaacagcaaaatagattcttcccatccaaccccctttcctcttgtagagtagggtgtggctcgtggggcttcgtctctctgcaggcacagaaactggcagacctggtccctcctgagcgggccctgctcaagggaatggtgccagattttgaacacaggtaaacaggctccttcataacaacactgtgcatttctgtgtcattttgtttattgctcactgagttgttgccacctcagctcttggtggaaaacagtgggtgtccagaaattgctgacacaagaagatggattgcctatggtcgttagggacacagggcagccccagccagatcccagctggtccatgcagggcatcgtcagtagaagctcaacgtcccacttcgtaaccaggctacaagacaccaagtccggtcaccatggaaaagaattaaacctagagaaagagcctcatgatctgcactcagacgctccccatcagaaaggaactgttttctttatcggtcatgctctttccagagtgactgagtcttggctcagcagtaggacttcagtgagaaacagaagaaataggggaccccgcctagcccaaggccgccatttcttcagaattttctcacttctttccaaacgatcagtatcccccaattaaagcccacagttcaggccaaacatcataaaaaaaaaatacttgtttatttccatctcgttctggggtttataattcttcttttggatgcttttggggaaaaaaattcaccaaggtcaagggctgtgaagacgtttttgcctaagaagatcatcatgcaggcagactaattcttttcctaagctattatttggcaacttgcaaggaggacttggcttaaccttgagaa

SEQ ID NO: 160203 - DNA, 1000 bp, Homo Sapiens
aacatagccaaataagatgactggggagaaaacagattaacacaaaaggtcccacctgtaagggcaacttcctaaagctagatatatagaaccgatggttttaaacataaaacttgattatgtagaagtttgcaaatgaaatatatcacgaaagcaaattcccatgcagctttattcacctcaaccatgtgtaatctacttaaggtgactagtgccactataaggcattactgtcccagggtgacaagaagcaatatttatactcaattcctgaaactgggggtctgatatgctttttaaaaatcctaaactaactaatatcagtagccatggagtcatcggcttgagggtaaactaatcccttataccacttgatttattttattaattagttaataatgcagttaattttcaactgcaaaaagaaaaaattattttgtggagtagaaagaccacagcaataattacttgatgcaaaaaataagacaccttaattgtatttgctcaaatctgttgtcttaatgataccaatatgtatcattataatctattttttaaaaattttcctcattatgccctagaacatcattatactctaaaaagtcaaattccatttcctttagatttccttaatgttgcttgtggactgatgtagtgatattttacattggagcccaccaatgatttgaacaatgagtggttcaaccctagtctaaattgtgcttgaaacagcacctctagccactgagagataacactcaaaggcaccaataacagttatattctagtctacaggtgcaaaaaggaggccttgtagattctaactatagatactggctacttatgcctcataattccaatacatacatccactgtattttagccagattcaggaccttacacacaattctgtgccttaattctatacgcaattttaggaaccatcccaactgcaaaggcactcaaatttttatatatttgggatgtaataaattattat

SEQ ID NO: 160204 - DNA, 1000 bp, Homo Sapiens
ccattaaaaagaaagtacaaggaaggtaatttaattatagtccaactcttggctccgcagttaactttcacatagtaatagaaatagtaatctgagtattttttaacctaataactagggatgggggagggttgctgacaaaagagagctaaagcctcatgtatgacaacagggagtcaacaggtaatgtctaagattgatatatcaagcaagagtcatataagcacattttaaaaatagctgaatgaactggaagtgactgctgggtaggggagcagtactagagaatgggagagactgttttcttgttacaaactgtgtaattccacattagtaagtgggtatgtgtttttaaataagtatgttttagaaagacaccaattctccttgtccttaatgttcacaatttctctctagtgtgtgcactgggcaccctgcactgtttcttgcttcatgttgctttatgaacacttactgtcctcatggcacggttcatgtatttcttagtggtaggtacataatattacattatataaacttacatcaggtgctgggcatatgtctcccatttcatcctcagaaatagctatgacaagaaaggccccgcctttcctgctaattctcacgatgtgaccactgccctgggaacttcccacccacatgactgatttgggctccaggatgtagaagggcatctatatgggcagttctggacttctgcctcccgtggcacttctctggagccccagaaacgcctctcctggtgcgcctggccctggctctgctctgtcacactctgccttcctctcctgggcttgctttctgggcatgagcatccctgtcaggagcagctgctgtgtgatctttaggagctctagtggggctggagccaccagctccctgcggggcaccctctgcctcctgcacccccttctccctgaacaacctttgtgtggcatcgtaggcctaagactggctaagtctaagatttcagagaagt

SEQ ID NO: 160205 - DNA, 1000 bp, Homo Sapiens
caggtttcaaaatgtacagccagggcatgtgctcatttattagggctgactctccgtgtccgcttcctgggaaagaaaatccctgtgacatgaaccgatgaagggacagaagctatcacagatgctacagggctcagagaggggccggggcaatctacactacagaagtaaaagcaacgtaaaatgtttctgggtttcctttcccttcactcaaaaccactatttccttagttctatcaaagtacgtaaggggcataaaatagactcaggaactcggggctaaatcatccaaaaatggagccaaggctctaactagaaactgtctctgtcgtccctgttggcctcaaaaccccgaggtaaaaggctggtctcggctcctcccaggccccctggctcccagcacagtgccccgtcctctgtgttcatcatcatcgttttttaagagacagggtctcgctctattgcccaggttggccttgaatccctggactcaagcggtcctcctgccttggccttccgagtagctgggattctaggcgcatgcccctgcgccgggctgccctgctctctgcaggtgccttctctgcacgggcccagtgcctggatgccagtttgaggctgcgccacgtgaggacacagcagttccgcctctcttctccccgctggccccaactgctgtgagccggcggaaagccccgacagttgcagtcatgcaaggaggagctccacccacttgacccagtcccgcctctctcagcctgttctgtttagacccccttccacttcgggatgaaatcacagctgttggtgagagaacccccgtccggctgggaatccctcgccttctgctctggctcagcccagcttggagtctccgcctgctcactctccggtgaccggctcttcccccacagcgctttccacacaccctgtgcccttgtgacccagcccctggtgaagtccctggcccgggcctccttgtgcacacacccaggccttc

SEQ ID NO: 160206 - DNA, 1000 bp, Homo Sapiens
tttttttttttttttttttttttagtagtcagcaaagttctttattgggtgttaagcccagcaaaccccagatgagccaagcttggacagcacccgcaatgcatctgcccgccctagctgggcgaggtgtgtgccaagctggcccagggaggcagagggctcccttgccaccaccatctcaatcagagcccgcagcggcgagcgactcggcctcagcgaataggcaaaggtggaccaggcagcaggcagcccatatcttgcggccaggtgtcgagtagtgccatgggccatacccccacctggcccaggctcagggtccagcagtacaatcagctcttccagcacctccagctcatccaggaggcgagacaggggttgtgacgccagactggacagttccctgctcaggagtggaagtagtgaggcctccttccatgtgtcccctgtctccagggcgcctggggaggacagatgcgaggaggaaggggtgtgggtgttggggactccgcagaccaagccaggatagggataggggtcggctttctccttgggccagcagagatgccagagcagaataaacaggaggatcgctatcaccgccaaggtcaggagcaggaccagcaccacgagcggaaggaaattcggccaggcctgctgagggacaggctcaggggtcctccaggcaatggaacttgctggtgagctgcgctcctgggagctaggggcgcctgggtttccaggtgtgagggggcagtgccccttggcagggaccggcctctctctgcagcgccacggggttctgcccccgcccgcggcgggagtaggggtcacggctccgccgccgcaggggctacatagctccgcgccgtcggggttgcactgcccagaagaacactttcggaacgggggcgttacgaaatcgccgtggtcattgagtccgcagttttcccggaactcatagtccgggcaggggggcggcccgaagcgttgcaggcagctg

SEQ ID NO: 160207 - DNA, 1000 bp, Homo Sapiens
gatctttctagaatgttatttattaaaaatagattctctatccttcccctcacccctgcgagcaaagtggcctttcccaacatcttttcccaaatggatgaaacaggtcttgaggacgcagatgtggcattctacataaactacaggatcaggcttttctgggacagtgggtctgctggagccaagagtggaacagcacaagacaacatcagcaaaccctggcgcacctaaccgcgggctgccatggatgccgggacggactggagttcctcctgctccaggtacaagtccacaaagagagacccagcggcccagcagcagcctcctgggcaccaccagaaagcgatgtacttaagggcctcaggcggtcgagaggcaacgtggcttccacatgtgtgggaatgagactaaaaagctggctcaaagcaaaatatgaacttataggaaaggagggccctggactgggcaggaagagagagactcgtggcaattctagagatggcagtgcccagccatcaagttctaaagagacccatttgggagtgactctgcctttagccaggttgagctcacagacacacaggcccagaggccgaattcgcggccagcttccaggtgtgccggggcctctcgttgcttttaacagtccagccagagagggttcagttagtgagagtatcttcccatgatcaaacacagatgcccgagtttctcttcactatttcttccgcttcagtttcatatcttttttgttctttgtctctctgttcttcaacttcttgctctgtttgggttcttgtttggcctctaacttccttttcttgtcacttttcaggctgatgatcgaggcgttcggcccagctttgttcaaaacttcattccactcttcatcgtccccacggattatgtattcagagaggtccatgctcttcagcttccctacttccttcttgtgtttctcctgaaattcctttgctgcttcatctaggtcgtcactgag

SEQ ID NO: 160208 - DNA, 1000 bp, Homo Sapiens
tttttttttttttttttttttataaataaatcacattttaatcatctggctttgtttaatctacaaaatcaaattcacagctttttctagtctggtctgttttttctaaccagatggcctagtatattttctaaaaccttccatcttttaaggaaaacatgttccaccttttttttttttttgcaatcccagagccaacttccctaatgcaatcacctcaaagaaacactgatgggctggtggtgaaccacagactcaaagtctttcagaacagtaaaagaaaaaaaaaaaaaaaggaacaaaaggtcactaagcaatgtccagtgttccctggaaagcctcttcctgaatgctccagtcactgagctgtcccctccctgtggtcactcctgctggcccctgtagcattccattccttctgccatctgtttcaggttctgcagtgcttataaggtagtgtctggaggggtgtgagccttatttctttctgctcctaacccaacctgtttctttcatgctgtgtaaatggttctagagcccacctaggccagaaccagttctcagctggtgtgcgggcaccttccatccactgtactatgtgccagttcagagccacagcagtaatgatcacagtgagggctaatgatatgcattacaaagtctacaaaaacaaataaggatttttatttgcagtactttccactcttcctttaaaaacttgccatttgcttatcagttcctctggggctgacccactctaacaagacaaaggatagagaacaaaagatagtcctccgaggttacaggcttggaagggcagagaggagctacgaaccttggaagaaaaacaaggtgctcaggaattcatcgcctaacatttcacttccccacccaccccttagtgctcccactttggcagtgatctctctttggctttaaagagaaagggggaaatgtgccttgttttgcaggtgtgcaacaacacagctctggcatctca

SEQ ID NO: 160209 - DNA, 1000 bp, Homo Sapiens
aataattctctatttattaaaaagggtcctacagctttacagccacagcaccggacacggccctggacagcgacggcgagcccggccaggggccgctttgcaacttcaatgccaagctcacgtctggctgcgaccgtggcaggctgtggcatccccgacagcggccggtggcggaggtatgggggcgggtggcaccgctcactcgagattcacagaacatggcaagcccgcctgactggcatggcagtgaatcgtcctgtacagcttcatttcaagaaaacagttacagtagagttcaagtccgagagcaggaatgtatggtcactgaggacaaaaggcagtggcctggcccgtggcccagaccccgcttcagttctgccttctgtcaccctggcggctaggcacaggtcggggccctggatgcccgacaagtgacaggggaggggcgggccagaaggtccactggtaagcacctcggccttttccgtcaacaggtgccactgccccctgctgggccctgggccttcagcacacatggcacgtgaagatgaggtcccacaggggtgggggaagagcaggtgcagacggttggagtgcagccccgtccctcaatcccatggggcgggctttcgccaaacccctaacgttgcccaccctgaggcccagccaccagccacccaggggcagaggatattggctaagggtagcctgggtcaaggcggccggacgtcttgaccacctgtaacagggcaatgaacttggacaagcccttcagagaaagcagagccggggccttgcccagcccctagcaggtgtgagtcccggcacctggggaagctaaggcacagcacggacacccgaggggggggcaccgtgcactgcttgcacaaaaggaaattgcatccacttcatcggcatttcgatctgctcaagacagtatctgcattttttataaaatttccctgaatggtcttgggagtgtcaaaaaagttttttcaat

SEQ ID NO: 160210 - DNA, 1000 bp, Homo Sapiens
ttttttttttttttttttggagacagtcttactgtgtcactcaggctgcagtgcagtggtatgatcttggctcactgcaacctccgcctcctgaattcaagtgattctcctgcctcagcctcctgagtagctgggactacaggcgtgtgccaccacgcccggctaatttttgtattttcagtagagacagggtttcaccatgatggccaggctggtcttgaactcccgacctcacgtgatcctcctacctcagcctcccaaagtgctgggatcacaggtgtgagccaccacacaggcctggccccccattctgcaattttggttaacagaatctgagggtccaatcatgtaaacaatttatcctatatattatgaaagagtgaagttgtcatagcaatataatgaataaagtctagcttctcccaagaaagagctaaagattaagaagtgctgcattcttgaagttggttcaattttatccaagcttattttaggtaatcaaagcctggagcaatgagcttaggtaaaaattaggaatactgaaagctagatttgctgcatttatcattttcacaacacaattagaaatctcagaatcagacatgaaagaatagtttttcctgagattcaatactatgttggaagcctcccactcccttgaaaactaatatattctattttagtcttcgtaggttgactaataaaaaggtctaataattcaggcacacactttggccaagtttagctttatcacatctaaaaaaaatttatgtataaaacaagtatcagttcaaaaatatagattactttttaagaagaacctgcaggaagtataaaaatattaaatctggtggaaaggaactgttacacctgcctgaaattgagaggctgtaatgttaatgtacattacagtattgttaggtacagctgctctccaggcagcttgttttaccgtttagatcagaggtactcgacacagatttccaattcatgttactaa

SEQ ID NO: 160211 - DNA, 1000 bp, Homo Sapiens
tttttttttttttttaccacataaagtttttattgaactcaaactcaggggctccaaagcctgaggaagaagagggaggctggggtttgcacgcagaggcccaggccccaccccggggccccactccccaccccacctaccttttacccgctcctgactcaacgagagtttcagcagctaccaatctaagctaacccactctaattaggtaatcccctgccctcccccctccctgctctagcagttgccaagccaggcacccaccaaggagccgcggctgaggccagccctccgctgacctctctccatttctcccagggcctcccgctgccggcctggcctccctccaacccacttcccacaagtctccagggcatgtcacttcctccaccctggttctcttcttccagcatcctcagctcctccattctcctgcggcttctccactatcctccctaaaggttcctctagctccctggccccttatcttctgcccacacctcccacccctgctggggccccaggtcagcgccggcccgccgcgtgggtccgctggtggcggatgaggtcggagctctgggagaaggcctttccgcagtcatcgcacttgtaaggccgctcgccactgtggacccggtgatgctgcagaagcgtggaggagcggcagaagcccttgccgcacacggcgcacctgtagggccgctcgcccgtgtgggagcgctggtgctggatgagagtggaggagcgattgaaggtcttgccgcagtcggggcagctgtaggtgcggcctggcaggtgggtgcgggcgtggatggccagcaccgagctctggccaaagcgcttgccgcactcagggcacttgaagggcttctcccgggcgtggctgcgggcatgggggataagggccgaccgctgggagaagctcttgccgcagatgccacagctgaagggcctctgaccggtgtgcaccctctgatggctgcgcagggacgagttctgg

SEQ ID NO: 160212 - DNA, 1000 bp, Homo Sapiens
ttttttttttttttttttgagaagtgtcagtttaatgaagccagcttatcagcagggcggcggagcacacctgccccctcgcaggtgtgcctggctcgggctaaagtgcctgtgcagaacgaggctgcctggcggggttaggagtcggcgccctcgtcctcctcctcgggcaggatctccaggctgctgtcgggctgcggggctgtgtccgtggagggcggcggggtgggcggggcccgggtgggcgacagaggcagcggggaggcggtgggcgaggggctgtggggctctgcgggcggggccagccccaggatctcctgcacgttgtggggcagctcggggcaggcggttagctggcggtgcagggcctcggcgcgggtcagcacgtcctccacgctcagcttcatagtcagctcgttgatgtgcttgaggatctcattggagccgaagccggacagcatgagggtgtccctctccatgtccaggatggcgcaggccaccagcaggtgcagattggggccagggagccctgtccacagcacctcccacagccgaaggacatccgggaaggggaattccctcttgaaccagatgagcagccaccggaaacagaagcagagagagccggagtcctgggaatccaggaagtcgcagagcagggggtccagcaccctcaggagcagcagcagtcgcccgagttgccgcttcatggtctcctggctctcttcaaagttcccttgcacgagctccatgaagccacagaaacaccagaaagcatccacctcgttctgaatgacgtagaggatcggggagagaagatcactcatgccctggacgtagccgaggtcgaagtgatacatgcagtaggtgaggaggatatcgttcagcaggcccagccccgggttctcgggaccctcgtagaacttgttggtcctgtcagtgcggctcacatccctttcgatgaggctgcggtatccatgcagaagtgagtttctccgct

SEQ ID NO: 160213 - DNA, 1000 bp, Homo Sapiens
cagagcacaagttttgtttaattgattttacatcacaccagaaagcattacagggacactggcgaatagaagtaagctggaacctcatcacagagctcctttcttaccctcagcaacaaaaaggcttgatcttagaagttcaaaattgttccatatggtaaagacacattcactgcctggtcaggccttctgtgatctgggcctaccctgttgatccactgtatttccagctgtttttcaataagcaccatccacacgagtcagtattattttcaaaaggcttctatacttgcgatttcctttcctgcatttctgaatttgtcatgttgcttatcttgctcagaatttccttcattctcaaaagtatgggtgtggtacagattttcgggcagcagcatgtaacactttataggtaggttttccaattgtattggtcacagtaggcagagtaaattcaatagttttttggcttaaggtaacaactttcgaatgccctgaagggagttgattcagtaaaggaaggtggatgtctttagaaaagcttggaccagccctatatgttctataaattgcttttgaaggtgcagtcacatagggtgaagagtactcataagtttcctctttattttcaaagggtgataaattgatcacttttgttgggaatttacttggtgtaatgctcctagtaaagataccttcttgacgttgtacggacatatctttgtttttaaataagttcacatcatagtgagtccttagttgtgtctttatctcaccaattgttttacttgaaccaatggcatttgtcaagggttctacatcagtctcctggtgactctttaattgtgcactgattggtccctttattatatctcttccaatagcatcttttaagagttctttatcagtctctcggtgactcttcagttgtgtagtgattggccctattattatacctcttccaatagcatctgccaagaattccttatcagtctctggg

SEQ ID NO: 160214 - DNA, 1000 bp, Homo Sapiens
ttttttttttttttttttttataaagatttaatttatttaaatcacataagattattcaaagccataggcatgattaagtctctatagaatcaagaagattttctgtgtggagaatatctcgtggagatttgaaatgtgtcgcctctcctgagcagccaggattaactctgcttaggacgtttcagataagggtcaggctggcgtccttctttctgcctccatgggttgccaccttttgctatgtcaggggggtcgcttgcttaagacgttgcaaggagcaccccaaatgccaggcttcccaccatagctggcccgctgcagggttcaccagccttgcattgaggtcagcacctcagtcaccctccattttgtcctttccccatgaaattgtggcttttaatgtaggccaaatgctatgacaccaatatcaagtcacgaaagcagcctgtcacctgtttaagctgagaggcagtggtggctgggccagaggggaaggtgggctcctgggcgctgcccgtgggcctcactcctctgcctccactcacactggctcgtgtgaccagacaggttttctcttctggaggaaggccgtgatgccctcctgcccgtcccgcagggccaggttgtccaccatggcctgggaggtgaggtagtaagctgtccccaggtcctggggcagctgcttgtagaaggtggctttgcccagggataccaccggacggctcagcgatgcgatcttcctagcgatccgcatggtctcctcctgcagctccgcctctggcaccaccttgctaagcagcccgtggagcagggcctcctgggcagaaatgggctcaccagtaaagagcatctccaaggccacctttctaggcactgctcttgccaaggcaaccccaggggtagaacagaagagcccgacgttcaccccaggagtggcaaaagaggacttgtcgctcgccacggcaatgtcgcagctggcaaccagttgacagccggcag

SEQ ID NO: 160215 - DNA, 1000 bp, Homo Sapiens
tttttttttttttttttttttttttttttttttttttttttttttttttttttttttttttatatttacaaattttatttttttatcccaaaaatacatataaatgaaaacctgctcttcaaatgcagggaggcctttgcctaacattgtcatatgaaaatcagtatcagctctttaacacacaatttacatatatacatacatacacactatatgtaagcagcaaatactttgctacttacacatattcctctggtggaaaactaggacactgggaaattcccctgctttccaaccttgggaaggtaaatacaacctctctcaacaactttttaaaggatgaaatgtgtagaaacatgtaaacaacacaacctgctttagatctatacatgttattagaataaagaaagaacgctgtcacatcagtgacagtttatttctcaaagaaaaaaagagataacatttgaataaaaatgcaaaactgaagtacagttaatatgatcaaaattgttgtgtacatgctccatggagaaatcaggaattctttcacaaagaacagatccacagccaatttcagtcacttgtgatgctgaatcagcacccactggtagcaaccaggatccttctgtacagtcacgggcttgagcaggtgccataaagcatctgtttaagttaaacagtcaataatgtttactgactgcagtacattcccaccccccaaaaaaataagtgcaaaatcaacttctaagctcaagagctcaaacaagtcaaagctttggtatatactggaggttgttttggtgataaccaaagcctagtaagattctctgctcaggggttcgccccaaaagaaaaacacctggtccacaaagcttaacacctatataaataaagtaactgtacaaagagaacaagccatgatttccccttaaccaagggtttatagtttcctaggcagcagttctgaaagcaccaactaaaaccacaacacttctactaa

SEQ ID NO: 160216 - DNA, 1000 bp, Homo Sapiens
gcactttattccgccacttttattgagcaacagccgtggggacctgattctgcgctaagtgctctactgtgagacatcacaggttgtcattgctagaggcaagaatctcttacaaagatgaaagggcagaacccagtgctttttttaatggttgttattccatgcagaaacactgactgatccagaactggtaactaaggcggtgatcaaacaggaatgcttttcttctcagtttaggacgaagacccgccatgacaatggcgggaacgctggagtaaaacctcacggcggccagcatgaagtttttcgccagatttgtggccccacccccaagtacccacgcggagaggcctccagtcatacagcacaaagggcatcgccttgggcagctcaggctcactctgttccacactgtctgcggtgggaggctcgggccggcctgggtgcatccagtgagtaccacgttcccttttcccggcacactgtctccaggacaggcgtgacctgttctccagaacgggtagagatggggtttcatcaagttggccaggctggtttcgaactcctgacctcagatgccccagaaaccactcatccctgaactaatcatgcaaagtcctccagtttaactccctgttgtgggcggggttcttaaaatttatgaaggcaaagactcctaggccggcccatgcagtctgaatacgctaccgaatgctccacctatggcttataatgcagaacgacctgtttctatcactgcaggacgggattgcaagattttcttatcctgccttggctgcagagtcccattcccgtccaactcaaagcactgggacaatgctggatgtgatagatggtccatgagtatccgcaaaactaaataataagtgggcgatggtgccccctgggtgcgggcagcctctcttactaatttgatagcttcaaggagttagcaaactgtagggtgggtgaagaattcatttgacaaccatagaaacag

SEQ ID NO: 160217 - DNA, 1000 bp, Homo Sapiens
caaggtgagcctgatcacagcctcggtagtatttattttgaaataaaagttcccatcccttgtaggcctcgctgtgaggcacaacgtcttcgaggggaagttgaagtggggtcttcttattcactggtccctagaccgcaccttctggtatcttctaaggcaattctggtaccgcactgtgtctgggttggcctatttaaatgtctgagccagctgttccaggatttcaatgagtttctcctcttcggccggtgaggaggacgctgtagcgagaggcaagtgtgtagaaactggcttccgatctaaaagtgagagggaaccgcagagaggtgtgagctgctgcagcgtggctgggtccatgtccctgtgctgctcaggccttgaaccgacgcctgctggagtggcagcaccctacagctgttagacccccatccctgctgtcaaaggtcccacagggatcaggcagcatggattgatatgtaaagtgcagtttgggaactgggaggctgcagccagggctggacgggagaccacgtttgggtgatcagcaggaaggggtgcggccatcctcccggataccccaggggtcaccagcgcttcagaattcctcaagcaagggtggttctcatcaagaacagaggaaagagaagccaagcaaagagcctggcttccacccgaggtcaagtgctgtcttcggatggcgtccactcacacgcctgcccccttaggagcccactggggagagacgtgaacagatcactgcttccaaaaatagagaagcagagtcccttacaccctttgcactgcagagaagcagagtccgttactccctttgcagtgcagctttgaatagcgcccctcctgggcctcagcaaactgcagagaaaatcttccattcccaaggtaggaactgcctctcccgttctcacaggaccttgatgacagggttatcacaagtctccaaagaagctaccaacctggagtgaagcgcttcccaaaa

SEQ ID NO: 160218 - DNA, 1000 bp, Homo Sapiens
gagactcatctgaggttttatttctatagaatttagggtgccttgtgaaataaacattcaactactctaaaaccctggaaacaattagtataaaagtaatttatgatgaggtaattagctgtcatatctgaatttaaggaatcttttagaaacagcttttcaaaaagtttgtttaggccaggcgcagtggctcacacctgcaatcccaacaccttgggaggccgaggcgggtggatcacctgaagtcagcagtttgagaccagcctgctgggaacattttaaggttcaattaatgcatgctgcttaggtaactatgattaaaatgtatacgttagcatagaactgataataattgagctttagttacagcatttcctttctcctaacatctcccttacccagaaacaacttaaaacacttcaaattttttgagttagagatcacaaacatcaaggtatttgactcttattttccatcacttgctacttgagggggtcacactaaccaattctggttacatactttcctgctatggactctagaagaaaaactgcaaagaaacagaaagctaaccttcttaaacatatataaggaatcaagggtttccttaaactattacctgagagtcctatttttgccttctgtatagtaagcatgtcattctactcactattctgccggaatacatcttcacatttcaaactggattactttccaaatactggattacgttcatgcagtaaaaacaagaatagtgcatctattgaatatttttgcatttgcttattgcaatactagttaaaacaccagtttataattttttttatacattcagttgttcaacaaatgattcttttaatctgcctgaagtttcaagtcaacacgtcactggagaaaatgtatgaaactgtagcactaatttctgaaacgaaggattgaagttcctctttccaacttctttcagaccatcactactccacatgttcctgctcttgtcctg

SEQ ID NO: 160219 - DNA, 1000 bp, Homo Sapiens
ttttttttttttttttttcagagtgaaacaggagtgctttatggtctgagtggagtgtttgggaggagtgcctcccggctcctgccttcgggctcacctgagcgggggcgcagctgaggccactgtgggaaacacaacccccactcccaggagaggcctcacatgctgccttcggtctcgccagccttctagcgtggggcctgggccgccctttagggtgagtctgcacacccgtgttcagggctcccggccggaagcggaaccataggcatgctgcggccccagatgagcgcggagggcaagcaggtgccggggcagcgcacaccccacagccaagcggcccctgcccagcctctgtaaacagaccctcacaggtccctcctgggcctcagtcacatccctgagaaacactggcggctctgccccgagagggccagggtgtccaccgagcctggctgaagccagctgtcccctcccttcttgcagagcaggctcacactgggcctgaaggcccagcacctgcagggcccagcctggggaccaccaatgcccggcctcttccagctcagaagcgcacacggcagccacggggcagcggcaaaggcgatggtacagaggcaaatgcctccccaggcagtgacaggcacgccccccgccccagggcggccactgcccacgccggcctagagctcctcgtagtcgccacccccagggtggcggccgcccggggccccgccccccaggaaagcctccagctcatcggcagccgtcctctccctgctgcgcgggggccgctgctgccgccgtcgccgctcctccttgccctcctccttgtccttgctcttcttgtgtttgctcttcttcttggcagctttttcttcttcctctttgccttttttcttcttcttcttcttctccttagagggggttttgccctccttaccttcctcactgctctccttgggtccggcctcctccagccccagcccgaagaggtccg

SEQ ID NO: 160220 - DNA, 1000 bp, Homo Sapiens
ctggttttcttttatttagtgaaacattcctttgtaagtgaatcttcaatgaagacgtcccgagtgtgtgtgggggcggagggggccggcaggggaggaaagcgagcaaactgcgctcatccccctcccccggggcctgctcactcctcccaactggtccgggcctcctggcctccctcccgcggcctcccagccaatcattcttccaggccccagcccaagtcccaacttgctcaagagctcaacctcctcggggagaagcaggggtgggaaaattcgggtgacccagagactggggaaggcaggggctgagacccgatcgccccgcccccgagtcacggccaacccagcaccggggacgtgtaccacaactgcagcctcccaggggagcctggggtggttgcggggagggaaggaagcgtccctgtgaagctgcagggaggggtggggtcttatttgccccccgcgctgctttaggggaggaggtgcgaaggcaaacactgacaggacggggaattttgaatgctgttcttctaaaccctaggaaggctcagggcacagcaagatagtctcagttggctgcagagacccctccactgacagtcacctcttttgggtccgaaacattcggaagagccactggacgacgaagggccacaggaggaagaagagcagcgcgggccccgggagcccaaggggccatggccgagcactgggcctgggctgcggcctctgctcagggggccggggcatgctctccaggctctgcaccctcgcctgcacctcctgcatgctctcctgtagtgctcgaactgtccccagcagccacacgtccaactcctggggccccggcgggctgccccgcaacccctctttctttgtggggggcacggggctgttcctgggatcacgctttcctccagatgctgcccgctgctctgtccaaaccagctcaggctccagctgctccagggaatcacagaaaacctcggagtccagg

SEQ ID NO: 160221 - DNA, 1000 bp, Homo Sapiens
tttttttttctttttttttcctctgcaaccattttactttattactttatgggaaaatttagatatgcaaagcaatgcagataccaaaatatgctttccaagtgtttttggctgagtttgtctctttcagcagttctgaccctaagatacatacttatatggaaaaagctatggataaaaataaataaaatacatcttaatcatcaatatatagacaaaattgaatagaaaaaagtaagaacattataaagcatgaaaatttacataaaattattcctgaatgtgagggttgaaagactctagaggcctgaaatctatttgaaagagaaactttcaagaaaaggaaaaaagcattcctctacttagaatagatatgctatgatctgattctgaagcaatgggattgaactgaatgatatatgaggtttcttccatggcccactgatttagatgatagcagtaaaaaatatattagtgaaaatcatttaatactgtaaaagaataaacagatctggccaggaattccgtaaaaatacatgtagacgttagtctaaatacatttttaagatacaatatattttgactaaactgacaggatatcaacagctcattcacttgacagtcatctgttataaagccattattatataactttaaaatatatttacagacttaaaaattaagataatgcttttatgtacatcagataaaagtttaattagagtgtagagtgccacttcacaggaattaagataatcatgttttaaacaaaatattttgccatgaagatatagataaaatgtacaaacatgtcacatgatacagaaaaacaagaatcatgatcttcacatttacaggaatttaaaaaatcttctctgatggaaatgtgttacaactcaaacttctcttcttgaaagtaatccgcaaaattgagatattcttcaagttgaccatatttctccttaatccagccattttcttttgaccgcctgaaaattct

SEQ ID NO: 160222 - DNA, 1000 bp, Homo Sapiens
gtccagtcgggttggagtttatttctgccagagcctggaggctgggagggtaaaggacactcctttagtcccagagggaagctccgaaccctcagagcaaccagaagggagggcagagcatgggcagcagcaggagtgagaggggtccccttgtcctgcccctttgcaagggttcaaggctggtggaggcctggggcttctgtcgctcaggagttcaggggtggacgcagaaatgggggaaggagagtggctacgtagagagtgagagcgagattcctaaaaagatgcacagagagaccctcagagaggccaagaaagatggtgagagggtagggaaggagagggagggagagagagagagagagagagaagcagagggaatgggttgcactggctgaggatggtggaggagccgtctcactcccttcctaatgtctatagatcaataacgagggaagaaaggaggacagggagctgatggaaacacagcttgccaactgtacccagtcccccaacaagcaaggtagctccagtccttgcctccctgcctgccccgctcctctgtgtttaggggtcatcctttgatgggaggttgcaggggacccaggtgggggtgataaatgccagagtgctgcaccatttccaaagggcaagaagtcagagggcggggttcctgggacaggggcccgtggggtccagggaggaagggggctgggccccatctgttagtgcatctggggacagggtagggtcactgggggtgggctggtggggacccctcaggctccggggatggcccagacccaggctgtgcttcctctgcctcctcgtcggatgccacgccctcctctagtcggaagacctggcgcaccgtgcgggtggtgaaggtgagggggccgcgtcgaagccggttcctcagtgtggtcacttcacggttcatggactcggccgactctgtgacatcttccagctcacgctgcagcctccggcggccagcctg

SEQ ID NO: 160223 - DNA, 1000 bp, Homo Sapiens
tttttttttttttttttttttttctcatccacaaagtggaaatacaagcaagtttaattctccatcgtaaggttggagctcctgtctgtgaaaggactggaaatgtaaaatgcgctcttcaagtacaaaggcagagaggatccataaacaggcacaggctgccctttggtataaactgttcacattaaatctatgttatgttgctcaagagttaaaataagctcaaaggagaggctgattccaatgtcaacccagggaagacagacactgaaattccaaactgagttaccaaaaacaatagatggatgagacatgcagacatgccacaatccggcacatcagagttcgatgtagtcctgctgcaaacacatggaatccgagaagtccaatgcaaacggaatagatttcttgggatctaatatttttcaaattgcctgaccagcttaccttctaggaaaacttatttaagggaggcaaataatttggggagatgagtataagaggtagtaggaggaagctaagggaaatcaccactacatattgcaggaatgtattagaaggcaaatatggcccaaagaaaaagctccactgaaaaaaacattgaatactgaccacagaattagcaccttgctcccaggtcaataaagtgaaccaaaaaaattacaaagaccttgctcaatcctgaggtttgtgaggaatataggagagttgtgtgttcacgtgactcctgaaaacaaagagcagtactattcgaagggcatgatgtcttgatcttaggatcaaatattctagaccttgagccggagaatctgcattacagtaggaaaaatggggagtgctttatgcctgtggattcaggacacaccagcaacctacacgtgtagcattctctaagtcataatgaccattctcatctcccactgagggcaggtgtaagactcttctcttgcagtgctctgatagaaagctgggtttcttcttcttctctataaatcatagg

SEQ ID NO: 160224 - DNA, 1000 bp, Homo Sapiens
atccaactccaaattgtttaatctcaattccagaggtctaggccaggccaggcacctggggctctgggctgttctgcttctctgggccctacacccagaacctggccttggcttctcgctcccgggtctttagatcgtcatcttggagtccggttccatgttctcaccgctcctccatgatgactccttctgctcagcctcctcccttgccagtctcagggaggatccttcacagccaattcatccttgggtccccttcccaggggacgtcaacagtctaggcagggacccttgcccccaactcaatccccatcaccacagccagcaaagcctccgtcaggggccctgcctcttcacctgctgcctccacaagccccaccagggccagaccccgcttcctcgggcactgctctgaccccagtgtccagcgggcacagtgggcagccagccggggccggcccaggcggaacacctcacccactgactccgggccaccctggggtcccaggtggatgcggcccacggcctcttccagctcctcctccagcccaggcagtaggaaacggccagcagcctccagtgcctcctcggcctctgaacccagcaggggctggcctggtgggggcacgggccccagggcagccccacacccccgacaaccatgcaaatgatgcaggacaggccaggctgcaccaggcgacagacctcgcaggggcaccaggtccatctgggcttctgcaaagctgcctgacagcagggcccggaagaaaggggaggcggtggctgaggccgctcgctgggcagggagctggaggcctgagtccagcaggaagtgcaggtcgggagctgggacaggggctgggcccagcagaggttcatagaggcaaggggaaggtgagtctaggtccatggggactgcctgtgggacagctgggctcacagtgggagacaccaggtcttggaggcaggaaagggagtccgcggcaaagaagaggaagag

SEQ ID NO: 160225 - DNA, 1000 bp, Homo Sapiens
ttttttttttttttttctttgttatttcatcactataattttaatcattaggcatattaatgtcacatacagtttttaaaatataaatatttttaaagctgttttacaatatgataacaagaacacccagcagatacaggttgtacagttaatcattttgactgtgtcagtaatataatcagaatactgtaacggtaagagaaaaatactttttttttttttgagactgggtctcgctctgtcgcccaagctggaatgcagtggcgcaatcacacctcactgcagcctcaacctcctgggctcaaggatcctctagcctcagcctcctgagtagctggaactacatgcatgcaccaccacactcagctaattttttttaaatttatttttagtagagacagggtctcactatgttgcctaggctagtcttgaactcctgggctcaagtgatcctcctgcctcagcctcccaaagtgctgcgattacaagcgtgagccaccgcctggcccgaaaaataccttgtttttaatcattcccattcagcaatagtgaaaatgctctatgtacaacattggctctgaataacacatttcatttctgcttcaaacctcctatgctgtctatcgctgttttgacgactgcatagctcaacagaaaaatgcgtcccattgacgtctcaataataagtctgattaggcagataaattcccaatcataaaagcttttattttaagacaagtattatgcaaatacaggatggaaatcagactcactgtaattgggatgaaaaggcaactctaagaagaatgctgtacatatgacacctattgcatttttatgcactagtcttgcattcccttccttacttcctcgtctttgaagtgctaaaggtaattacactaaaaagttaccaccaggcttaatatgagagaaccatgtgtataagaaagcaagactttcagataagcaatctccaaatattttctattttatatgcatt

SEQ ID NO: 160226 - DNA, 1000 bp, Homo Sapiens
ttttttttttttttttttttttttttttatattaaactatgtatatatttaacacacacatcttaaaaatagctccagatgacagaacagtattgcatacacaggtccatacatgggaccctccaagtcccaggcacccttccctgatcactgtgtcctagaaatgatttcctgtgtcagtgacacagaggaactgtccaagcaagcctccagtcccaagcaagcctccaggccctgagtgttctgatgcctgaagggtagtcataggtcccgaggtggagtcgggggtggagtgctggggtcccataggatgtcctcatatgggcttagaactgggcccgacagccatccttgagccccagtctgctccagcagggctttgagcaagcccacagtgagagggggctctgctccaggctcagggaatggggttgggggccccacctcatctgggaggtatgtcctcagtagaagcaggagctcagctggagccagttctggtgggcacaggcggcaaaggagggggaggtgagcatcaagccggcggtgctgggcaaactcggccagcagcagtttgaagatttcacttcgaagcaggggactggaggggccgagggccaggccagcatccagagcccgatcccattgttccttttgcaccagctgcccgacagcttggagcacagctttaggccgcccactgctcaagagcagctctagctccagagcctcaggcctggtcccctcctcacctagcactgccagagctcggcgatacaggggcagtcctgggccccctgccccccagcccggcccgccctgctgctgtgccagctccacaaagggtggcagccatcgaggctccagctggcacagacactggcacaggagttcaaaggggggcagtattccattggggggttcctttccagcggttattccccctaacactttcttccacacatcagggggtgcttgggacctcagcttgccattccca

SEQ ID NO: 160227 - DNA, 1000 bp, Homo Sapiens
tttttttttttttttaaattattgcactagaatttaggggtttggtgcctctcccgtattttttttagaaattagcatattccataggcaataaaagtaggatgacaactaagaacattttaaatgtactttcaagtttgtgtgactaaaccttgctttgggaaaattagtctaaaaatcaaggagcgggtgtgggagaaattagcttactaattgaaccatcaagccagttggcagttctaaggcttctttatcagcatattacagagtttgtattcctgttcttttcctccttgttgtgggaaacaagctatgcaaccatttgacattctgtattttagatgtaacagtacttaatacttggcaaaaataaattccaactcttagaatggttgcagtgttataagaggtctacttattagatgtaagcaagtttcagattgacaaacagaaggtatatggctaagtcagtattgttttagaatgaaaatgaaatgattcactatttcaaacatctgaatacatgtggccaagaggctgcgaatgggtttgctgtgtgtagataaacagagctaactcattttaaactctgataatactgttcttaaagagattaaactgataatttttaaccctgtgctacattttaatctaatggagatgtatacttggtcttgttcatctaaaggacattcgacttctttaagaaaacagtacttttcattaataatactgattttcagggtgaagtaagctcttgtgcacccttttgctttgaagtccttttgctttccctgtcacccccagaaatcttgtaaagaattggtaaagaatctcaatgagcttttttttttttaacttccttcctataaacaccttcagtcaaagaaagccagaggagatgcactgagactgaaataacatctgttgactaccagacttcactgaaatcggccgtctgctctcctgagttggcattgttgctaagataaagcaaatg

SEQ ID NO: 160228 - DNA, 1000 bp, Homo Sapiens
ttttttttttttttttttaaagtacttctttttttttattgatttcattggaaacagaacaagaaatggtcagagccaaaagactgctcttaaaactgtcaaaaacattttaacagaaaaaaataaacatgactgcattatgaatgtttttagaagagttgcacaaaaaaaaccccactgttactgcactaattacagtctttaaaaaggtatatgccaaaaaaaagtatatgacctgccaggccaccacacaaaaggtgatggcaaatttattcacgctacaagactaacatctttaaaaaagtttttcctgcattttattctaaaatcactttgttctctttatacagttgatagtttatttcacgtggtgagtagaaaccacaccagaatcagcaccgttgtctgtgttttgttttttattttgtgtttgtcctaatgttcagtaatggtagaaaataaatcagtttattcatcatagcatgtggcttaaaaaatcaacagaaggtgccagcgtcaacggaaccggcgggggctgcacccaccaagccacttcctcgaaaagaaacgtcagttagaggtttgatatataggactagatataggattcctttaaaaagcaaacccacattttctccaaagttagtggtggggtcggtctcctgacctctccgagcctgacaggagactgtgccctccgtgcggcccctgggactcggccccagccacgcaggccgtgggcagggcgaacggagcagctcgcgctaacggtggcttcggcggcgccacacagaagagtctgggccggacaggagaacagagcaaccccgtggtgcagcggggacctcggaggtcagaggaagaaacgagaaacttcgcaacgacaaatcagcatcagaaactcagaaggtgatgccagtgcggactcccagcgtctctggcgcgcggaccaaagtgtgcgctccagcctgggcactgggcccgcggtgaggccgcaggt

SEQ ID NO: 160229 - DNA, 1000 bp, Homo Sapiens
gagatggagtctcactctgtcgcctaggctggagtgcaatggcgtgatctcagctcaccacaacctccacctcctgggttcaagcgagtctcctgcctcagcctcccgagtagctgggattacaggccacaaccacgcctggctaatttttgtattttttagtagagatgggcttttgccatgttgaccaggctggtcttgaactcctgacctcaggtgacccgcctgcctcagcctcccaaagtgctgggattacaggtgtaagccaccgcactcagccatgcctgctgtttctcaaaaccaagacctgggggaagtggagaaagatggatgttttggaaatgaatgggctcaagaccaacaagagtgattgcaggtctcagatagtgcctctcccaccctagtcccgacctcctgaggaacccttcaggacatggcctgcagagactagggtgagcagggtatggcaccaagcacccattgaccagttggtgccacgcatccagtgactggaaagagacaacgtagactgaactcaccttacaagggatgaacacgggggggtcccttttggtccccttgagtgagaggtatcaggaatccatgatctaagacaataaatatttagcatctgtgtcctttcagagacagggaccagagacaaatctcttcctaaacatgctcctgtggtttcatgattcttaggagtccaccaaacccctccagcaatgtcaactctgcctgggatgaaacccaccaggagccagcagggtgaggcagaggcagaggcagacttattccagtgtaaagctgcaaggccctctctaaggagttcccagtcccactgctgcccatcaagagcagcgcaaagtgctcagcagaggggccaggctgggtgagggaggccctgtgtacacaggctcctgcacaagcaggaatccaggtgagaagcaaggaccactctggggagatctgccaggagagactgccagagttgggc

SEQ ID NO: 160230 - DNA, 1000 bp, Homo Sapiens
ttttttttttttttatttttttttttttttttttttttttttttaacacttacaaagatttaataggcactctcatgcattgtgggtgggactgtaaactggcacaatccttatagatggcaacttgccaatatctatcaaaagtaaaaatgcacatatcttaacctagtaattctaactttagatttccagcttacagtaaactcactcatgtgcaatgtgacctatataaaaggttataaaatgaatcattatttataatagcaaaaggttaggaaaaaaatgtcagcagggactgctcaaatatattatggtacattcatacaataacatctgcaattatagaccaagaatcaagaaactcttcatgtaacgacatgggacaatctcaaaaatatgttacacagagaagacaagctgaagaacagtatacaccgtacaataccacttaggaaaaatacctctagagggatatttaaggaaaagataacactttttgggaagagaaaatgagttctaaaggagggaaggagacttcactgtttatcgttctgtgtcttttgaattttgaacaattttgaaatgaaaacatcccaatggaaatacaagtcttttaggtaagttcaaatgagcatgtattatatttctttcatctgactgataaacttttccacaatttcattgagtctttcaggctccattagtttatttaccaactcctgctcaacagccattagggctgggccagtaagcttctcttgtcccatggtattacataaatatgtcttaagacgaggcagggtagaaaatgagttctcagtacttgctgaagtaattggccaagacaaagcaatatataatagctttgagagacaaggaatattactgtgaagaccatgctgaataaacaaacagccgagactgacgaagtttatgcaactatcatctatgacaaagttaagctttgcataatgtcgataaaatctaagttctgggataa

SEQ ID NO: 160231 - DNA, 705 bp, Homo Sapiens
tttttttttttttttacatttaaaacattttatgagggataaaatatagtctttttctatcagtatgttcacacttcctggcctctcattgggaagctgtaagatgtccttcaataagatcctgaacacgcgacagaataatctcattagagctgctgcaattttctggaccatatggtgggtctatagtcaggaccccagccacacagagagtccttggagcgtctccctgttcagtgatggggatgtggttcttctcaagccatttctttaggctgttctttctctcttccagatcctctgggctgtatgctttgcagtctccagacgtgaacaaatgcatcagcttctccctcactctatggtccccttcattcatagtttcaacagtctgcacagcatgtcccataattccggtcacagacatgctgccatcttcaaggaagttcacaaggacaatattggcagagactgggtctgtagttaaaacccatcctttatactcattcttctcactggctgtcactcggacctctttgtaaatgtaatcttgccattctaaggggcctttcttcatccattcactcatgattgccacctggctaaatcagttaaaaaactcctcgcaactctgggtactcagcaaccatgctttgaggaaggatcgttgagcggagaccgcctgagaccagcatgctttgcgcc

SEQ ID NO: 160232 - DNA, 1000 bp, Homo Sapiens
ttttttttttttttttttaaattatatgtccttttatttttatagtattttactaaaatatttatactaaaatacttattctaaaatattggctttacatatgtataaagatatattcagctaaaaaattataagctgactttatttcaaaaagtctctatagtatattacgtaggaatactcttttttggtgcatccacaattttaactgctttcaccctctgcaaggctcctcctcgaatgggcagttttttaagagcaatatccgtatcaaccagaggtcctcctactaatcgggcaggagtgctttccactgttactactccaccagagggcaccgttgtgttaaggcctttaatatgtgtttggtgaaatattgcattttgtggtcgtttatggtatctggaggcttctatagctttttcttgaagcctttttgctttctttaacgttttagcgtttgatgttctagccaagaaatcttcccatgatttattagccagctctctttgcttgtgcgtggcctgtatttttgcatatactttttgttcattttgcatgtcttggcatgcttggctttcaattatatcactttgcagagaagcaaccatctttccaatattttctgatgctgttgtaatagcttccaaagcttttttatctgtagtgactggtcttaatttttctaattttatttcttcatatatttcattccatatttctccaattttaaaatcaagatatctatgtatgatacaaagggtgacaaaatcttcagcagataggccaggtaaattttcaaaatctagtttgcccaatatagcataaatttttgctctaatattctcagaaacatccataaccgcaatagatgggcagttagcaggcagtgggatgattttttgctcttcttgaaagctagtaaatagaggtttttttgtatcaatgatcttcccatttttatcacgttttactcctagttctttttcctcctttctcc

SEQ ID NO: 160233 - DNA, 1000 bp, Homo Sapiens
tttttttttttttttttttttttttttttgacagcgtcatcaagtttattacacaattttcaacctatcagaaagacaaacaaatcaccgacaacagggggacgggaccttggcctttttgagggatgggtgttttttttccttttgctatcaggaaataaaactaaaaatggtgtcattgagtaaaaacaaaacaaatggggagaaaaaaattctccgggtaaacggcatttctggtattctatatatatttttccttaaactgtcaccttttctctacattttaaaagacacccggagttgctctcaataagcacatcacttaacacttggccagttgggtggggtgccatgttctgaagtggaggtggggatggggttgggggacaggggaaaaaaagctccaacctgtagcctctgtcccaagggaatgtgcctctccaatcctgcgggggactccctcagtgactgagggctatatgagaaacgtgctgggaacagaggacgggtttagtccaattcagtctctctcctctgacccagaagggtctctagtgaccctatgtctcacatgccaagtctcatctcacatgccacgtctcatgttaggtgtcagatgccctgtagatgcatgcagaagtagcatcaccccatgggtaccgcaggacctcgctgctgcctcctccttcagcagcaaccacattacaatttggatgttatggaaaagcaattccatttgcctgtagagaaaatggcccccagaatgctggtccttagaactctgagctgagttcattcaagtcgggctctgtttcttctggctcctcatctgaggcaggaagtatctccaggcagagtgagaggagctattaagtcaacagtcaaaaggtgaaaagacaccaaatttgtgactttacctgcctactagtgccaggttatcccacaataagtaaaagtatgtacctgggggatgtaagcccatgcttacatcaaacctgaa

SEQ ID NO: 160234 - DNA, 1000 bp, Homo Sapiens
ttttttttttttttttttgaaatcagttttttgaactttattttacaatcagggatgtacttttaattttttacaacattttctccctagagatataatttagatattcctatcttcaaagtaaaaatcaaaataggaaataagcatagaaacagcctattggcagtggttacacctgcatggtatttatgagtctccaaactattggaaatttatttcaaccaaggttctcttaagtcttcattacttgggtgtaactcgagagaaaactaatttatatcaatttacagtttagtggtcatgatcaggggaaagtgatactcttccactgactacaagtcattgcagaggcagtttagaacttttcctttattcctaatatacaggacaaaccttgccgacatctcactacctcgaaaatcaaatttaaatgaagtatccaggagtagcctaaagaatgagtgtaatctggatggattttagtctaaatttatgccttgctcttcagtaaagtatagtaactccagatatatgttccacagatgcaataatttctgttccttgttcggtgcagaatataatttatacttcctgaaatcaactttgtctattcatgaaaatagctgctttttatttgcctttgtctcactttgaatatatatgatccacaggttacagacttttccaataactacatttcaacttgtacttcatcagcaaacatttgagaggatgttatttcataggttaactattttgaattcattgttgatcaagttagtagtagtgggcaattttcttatagaaagcaattccaaacataatgagcagatgcttgccagctctaatcaataagctgtatgccttgtccttctccctgtatctgaggatcatatactactttattgtccatgtcctcatgcaacagacacaagggattactggaaagaaaaagattacaggatcagatttgtccttcccccactccaaaaggccaaaa

SEQ ID NO: 160235 - DNA, 1000 bp, Homo Sapiens
tttttttttttttttttttttttttttttttttttttttttttttttttttggtctggggcatttcagatcaacacactttattaaacaccaacagcgggccaggctctgcactaagaacacagagatgaataagacactgtccctgtccctagagggcttacagtctagtaggaaaaaccaggcaagtttcggctaattactgtactgttggattaaggtaaaatgttgagggggagttggtatcctagaccacctaacccagcctggggctttagacagtgcctgaactgagagctagttgtaggttaaaaaaaaaaaaaaaaaaaaaaaaggaagaagaaataaaagaaaataaaaggtatcccaggccaggagcagcaggttgaaggcacagaggcaagaaacagcaaggatggtgtacacggaataccaagaggtccaggcgagaagcaggggtggcaggcaataagcaggatgtgggagcactacacaaaccctacgtggggagaggggtctcccagaagaggctggtcctgcctggctacagcgttacccacgagagaatccttgctgcttgctggcagcaagccatactggggggcctgggccttcagtatcaaaaatatctcaacctaggggagggccttgttgactgtttgaacatggaaacccttggtccaacatgatttcccgtggtccactgaggaggtttaggccataatggggtaggtgcttagagaggattcaagcccagtgaacccttggcctcccagctctgaggagggccacagagccagtattccctacccccacccacagaaatgtatagcagtctctgactgttgctttcacacaccatcacggttgctgttctgtaggtgctgctcagggaaggtgggaaggacagcaggctatttcttgacctcaaataggatacactccaaagacgggatggcctggcacagaggcccagccctgattcggagagtccgtgtgtg

SEQ ID NO: 160236 - DNA, 1000 bp, Homo Sapiens
ttttttttttttttttttttttttcaaaagggcttttattaaattctccccacacgatggctcctgcaatctgccacagctctggggcgtgtcctgtagggaaaggccctgttttccctgaggcggggctgggcttgtccatgggtccgcggagctggccgtgcttggcgccctggcgtgtgtctagctgcttcttgccgggcacagagctgcggggtctgggggcaccgggagctaagagcaggctctggtgcaggggtggaggcctgtctcttaaccgacaccctgaggtgctcctgagatgctgggtccaccctgagtggcacggggagcagctgtggccggtgctccttcctaggccagtcctggggaaactaagctcgggcccttctttgcaaagaccgaggatggggtgggtgtgggggactcatggggaatggcctgaggagctacgtgtgaagagggcgccggtttgttggctgcagcggcctggagcgcctctctcctgagcctcagtttccctttccgtctaatgaagaacatgccgtctcggtgtctcagggctattaggacttgccctcaggaagtggccttggacgagcgtcatgttattttcacaactgtcctgcgacgttggcctgggcacgtcatggaatggcccatgtccctctgctgcgtggacgtcgcggtcgggagtgcgcagccagaggcggggccagacgtgcgcctgggggtgaggggaggcgccccgggagggcctcacaggaagttgggctcccgcaccaccaggcagggcgggctcccgccgccgccgccgccaccaccgtccaggggccggtagacaaagtggaagtcgcgcttgggctcgctgcgcagcaggtagcccttgatgcagtgcggcagcgcgtcgtccgccagctggaagcagcgcccgtccaccagcacgaacagccggtgcgcctgcggccgctccaccgcgaacttctccgcgcactgcgcg

SEQ ID NO: 160237 - DNA, 1000 bp, Homo Sapiens
tttttttttttttttttagtactcaaacaactttatttcactagccatgagcaaaaagttgaccggctccaggggattttccatcctgccctctccctgctggtggctcccatgatttggaaataacctcatgttccacttggcagtgcctggctttgtgcacccacatggttttggcctgggtcccagtgaaaatggtcctcacctggctggggaacatggttctgagaggccccttgatctgccctggggacatgtgtggccatgctaagggccctgcccaccttcacgtgactggccacctctgccagggtgcaggcagctcctagcatggagacatccttcatggaagtgagctttcccacccacctccatacccacatttctcagaaacagagttaacagggaaccaagagtcaagaagccacagggctggtaacgtgcctacagccaaatctgtgaccattacctgaagaggcaggacaacaaaagtaatcaggaaaggagaagatgtgggctggaatgagataggacaagagaagacagaataaaggcaggaaaatcagaaacaccagagagcacagtagcattaaagggacacaccaacacctgggctcttgcacacaggggagtctaagggttccctgactccctgcacctacacctgaggagagaatccgagttatacgaggacagcatggcaaaagggccgacagggtagtaggtgtagaggcgaggcaggaggctacgtgaagggctgccaacagaaactggaaaggtaggaggccacatcgtcttttcccaaatctccatctacgagttgcctcaactgtccccgtgatactatataggtgcttgcccaaccacctttagagaagcctcagcaagcctccctcaactaggacacagagaaccctggcttttcctgttcagccggcccctcaaagacgagggcagtgcccactgcggactggatggcaacggcggcagcggtgcgggc

SEQ ID NO: 160238 - DNA, 1000 bp, Homo Sapiens
gcattcatatggtttttattctgtgcaaattctactatctgctgagactgaacttctggcaacaggctggctcacaatggctactttgctctctgcttggaacgcactgttagttaatgaggtctgagctgccacagaaggcatctgcagagtcaccatgttaacagagtctttatcctgtatgagatcacgtgtatgtgataagctatgactctctgagcaaggattttccaatttgactgaacctacacatttctctcttgcatgcagcattcccttatgataaacaaggcatgacaagtgggagaaagctttcccacaatcagagcatccatacggtctctcccctgtatgagttctccgatgtctgttgagacatgatttatctctgaaagctttcccacagtcactgcatgtatagggtttctctcctgtgtgaattctctggtggttaatgagacctgacttgtgtgagcaggattttccacactcagtacatacaaagggtgtctttcctgtgtgaaatctctgatgggatattaaacatgtcttctggctgaagcctttcccacattcattgcatacatagggtttctctccagtgtgagtacgtcgatgaataaggaggttgcccttttggatgaagccttttccacattcattgcatatatagggtttttctccagtatgaattcgctgatgtacaatgagatttcccttctgaatgaagccttttccacaatcacggcatatatatgacttctctcctgtgtgagctttctgatgtgcattgagctgtgatttccagcggaatgctttgtcacattcagtgcattcatagggtttctctcctgtatgagttctctggtgttcagtgagcctggaccttttggagaaggccttcccacacaggctgcatccatgtggtttctctcctgtatgaactctctgatgattaatgagccgagacttcttgatgaagccttttccacaatcactg

SEQ ID NO: 160239 - DNA, 1000 bp, Homo Sapiens
ccaatgaaagtctatttatttgctcgtaatgagacagaacgctacaatctgttcaacactgggctggacactgcagtgattaggggcaggtgtggggcagggtggggcctctgagcccgaggacaaatgtccatggcagagccttccagaagactcgtcccttaccctgtggggcagaaatagaaatcacatgatcgccactgattcgcagtggagagggcgctgagctgggcccggcaggcaggcagcctcagcagagattcaggcagtcagcatggtgcggccctcccgccagcactgtcaggtcagcagaggttcaagcagtcagcatggcgcggccctcctgccagcaccgtcaaggagggggatgctgctcctgcctggtgcctgccttcattctgagggcccctggccccagctgagttcaagaggggacctggggctgccccagcaccctgagagcccgtggctgggcagctctggaggcggaaggacacaggtccctgagaccccgtctgcccagggttgttcctccctctccctcctcctcaggctggggcagggtggcgccgctaggaccctctgccatggctttgtgacactgcagctatgctgggcgggactccgccccccaccccacccctgcatcggagggcagggcaggcagcaagcagcatttggaatgcagggtggagaggatgctagaagtatgtgatgcacctgcggcactgacagcatctctgccctcagaggctgagggcccacaaggcacaggactgccccctgcccacaaggccaggccctacaagacagatggcagccttgaggcctaatgtcgagctcagcttcctcctgtctgcatgtggccaggccttggagcagcagcttgtggcagcatgagggagggcggggaggacccaaggagtctcggcgatgcctgtcctcagcaggtcagctgaatggagcatgccaaggtccgacgggcagtgtgacctcccag

SEQ ID NO: 160240 - DNA, 1000 bp, Homo Sapiens
cgccactgagcattttattcaagccagcaaccacggggctctggagaatcggggagcagagtcacgcaagcagaggcagcgtttccttccattcacaccgaggtggcctcctgtggacacggggcctcaccgaggcgctggcggctctggggtgcagctgtgggcggcctgccagctgcttgaggcttcagggccttcttccaggacatggggtggctggccagccctcttcgctacgacccgcaggtgtttgaaggccgggggcagcctgcgccccaggaacggcggggtggtcacgtcgcggatcatgagcacgtactcccctaggtgtgctgccgcagcctgctcctccgtggctctcccctcaggcctgctgcctccaggaggctcctgtgccgtgggtggtgtccccctggggtgcaggccgcctctggatctgccgcctgccttcttgtggaggctgtccaggaacaggaaggggtggtacccaggcgggggcggccccaggaggacatctgtgaactcggcacagccctgctccactcgctgacaggccccgggacaatggggcgcatgtcccctggcaagcaggccaccaggggtgtcctcctggccatggagggcacccaaatgcagctccaggtctcccctgggcaggggcacgtcggcttctgcccctcccttggcagctctgggccccggcaccccagctgcggggctggacacaggataagggatgcattcgaacccaaatggggtctggatgagtgtctcttggttgtctctgtccactttgaaaaagttgacctcagagtaggctgacagctgcacgtatctgacgcccgctgagatctgcaggacccggccgctctcgctcttggcaatttccccgtggtcctgcagcagctgaacgttcaccgagaagggagacccttgggccacttccatcacctccggacccaagatcacgatcctcgtagcttgttctgctgggtggcca

SEQ ID NO: 160241 - DNA, 1000 bp, Homo Sapiens
tttttttttttttttttgtaggctgaatcgtctcaaacttgtcattctgaacaaggtgataaaaagatggaggaaaaaaattcaggcaacttccagaagaaggctgcaaacatgcttcagcaatctggttctaagaatacaggagctaagaaaagaaaaatcgatgatgcctgatatgactgttactaaattttctaattaaagatggtttatgcatgtatatgccattatttttgtagttagacaatagtttttaaaagaatttcatagatattttatatgtatggatctatattttcagagcttatctctgaagatctaaacttttgagaatgtttgaaaattagagatcatgaattatataattttccagtataaaacaagggaaaaatttttatgtaaaaccctttaaatgtaaaatatttgagaataagttcatacaatcgtcttaagttttttatgcctttatatacttagctatattttttcttttgacataactatctttttgaaagcaatattatactgacagaggctcactgagtgatactttaagttaaatatgtagatcaaggatgtccaatcttttggcttccctgagccacattggaagaagaattgtcttgggccgcacataaaatatgctaacactgatgatagctgatgagcttaaaaaaaaaattgcaagaaaaatctcatgttttaagaaagtttacaaaaaatgtaaaatatttgagaataagttcatgtaattgtcttaagttttttatgcctttatatacttagctatattttttcttttgacataaccatctttttgaaagcaatattatactgacagaggttcactgagtgatactttaagttaaatatgtagatcagggatgtccaatcttttggcttccctgagccacattggaagaagaattgtcttgggccgcacataaaatatgctaacactgacgatagctgatgagcttaaaaaaaaaaaaaattgcaa

SEQ ID NO: 160242 - DNA, 1000 bp, Homo Sapiens
tttttttttttttttttaaagaaaatgagtagatacgtatttaaaaacttaacccacttaaaatttgccttacctttcatgactgtcaagttttatggccagagaggacaaaacagttcaaaattaaataattgaagtcctccttgagtgatgtcttagggtttattccctgagaggtggtttgtgccatctagactgaactttgggtaactatcgagtaccagttacacagcttattaaatccagagtcttttcaataaaggttaagtgacttcctcaaactagacttagatttaaaccaggggtctacctccaaagtctattattaaatgctgaaacacaacaagacttagttattactaccgtatgtccactggctttggttaaaactgagaacaaaacagctgtaacatgctttaagtaacaattagcagtgattcccaagtctgctgttctcaatcctaaaacacatcacccttacctgagttaatcctagcacaccaactttgctacttttcctcttggtgtttagtaagcaaaagaaagatccaaattttcctctttttcaaacatcaatgagtattagcttagaataaagttcttattgctgttccttcagggaacagggaaactgctaacttgtcagttccaacaactgatgtaagatcatcttctgaccatagcgaacctgtaaggcttgctgttccctccagctgagtttcgcatagacttccttattactgagtaaaccttggtcagtttttaagtctgtggcataggtctgcaaagtcagtagaacactgttttgaagcagctgtctccacgatgctttgagcttgggaatatttgtgatcgtcaggctgccctcttcccttttatcatctccccctccatcctggtctttaagctctctgaactcctcagcaggcatgcacagtacctttagtgtggtggtcagctcctcttcagtcagcacctcctccctccctatcacaaaggc

SEQ ID NO: 160243 - DNA, 1000 bp, Homo Sapiens
ttttttttttttttttttaatgaataaagaggtttaattgactcacagtcccgcaggctatacaggaagcatggctgggaggcctcaggaaactgacaatcatggtggaaggtgaaggagaaggaggcatatcttacatggccggagaaagaggaagagagcaaaaggagagggggaggggccacacactcaaaaaaccagatctcatgagaactcactcactatcatgagaacagtaagggagaaatccacccccatgatccaatcacctcccactgggcccctcctccaacactggggattacaagtctacctgagacttgggtggggacacagatccaattctacctgagatttgggtggggatacagatacaatccatatcaggggccacttccacggggacgggaagaagcagatgggagtagtcctgggcaggtgggctcatggctgtgtgtgcaccctcagttggctttagtttgctctaagaacgaggtaggaggtggggatgcctggggaagggggtcattcacagagaatggagaagactcaaaattatccatcagcacatgagccttttctacttctaggggaaatatttttcacactgatatacaaaaagtggacagtaccctttctgctgtgtatacccagcacattcattttttcaaaaccaaatatacagcatttcatcaccaaggaatggcatacagtgcaggcagggccaagtcctcagctccaggtctcctgccgatgctgtttgcttgacaacaccacgtggctgggtcaacatgcaccacatggagagcttggcacctgcatccaggccctgacccagggaggaggtgctccaagaggcctgccctgccccaccaggcactgaaagactctcagaggccactgctggggacaaaatccctccactaccccctcaaggagaagcccgtttcttcttccaaacatcccaggagcctcccatggtgcagtgcagagtctgttg

SEQ ID NO: 160244 - DNA, 1000 bp, Homo Sapiens
ttttttttttttttttttcacatttaatttttggaagatttattgcagaattaaaaaaatcacactcttttgtcttcatttcttttcctctgtatgtcttgaaggtgatctctctccatcacttccttgtacatgttcactcctttggagaattattttaatatcaggaaacttatagtctgaataatttgaaatcaggtcttgaataaaaggatgcttcaagagaacagcgacttcaattggctccaggttcttggcacctaggtcttgaaatgtttttatgaagccctctgcataaatgttctctatctttaggtggctggcaaatctattggagtcctgtgcttcacttccccctttgaacactttgagtagtgtttccatggacatcttttcattgtttgcattttcagggatttcttcatccttctgttcccttttctccgtgtcgtcttttaatttcctttcttctcttgcagcattttcctcaggttcaggaaattcctcagctggacctgcatcagttgaggaggtcttttctgcacttggaatggaagctttgacttgttggaagacatgagttccaacagccacactgagggccctgtagactccttccacggtgtctgggtggcaagcaaagtaaagcagcatctgtgtgtagtcaagctggggtggatccttctcatagtcagcaaatagcctaaagaaaaactctataagatgctcctgcctattaaatggaaggggttcaagaggattttctggaatttttatatcttcatctcctgtaaaccacagaccagcctgcatatactgctcaaaagtgatggtgcccaactgctccttatccacagccttgaacttctgaagggtctcaaggagctcctcctccaagggaatgggccaaggcattgaggttactaacaggaacttccgccagtccacgaactcggagttgactgttaataaagatgttaattcctgtaattcaggttgg

SEQ ID NO: 160245 - DNA, 1000 bp, Homo Sapiens
agaagtcacagcagttatcgtttattgagcactttctatatgctgggcactttgccatgcgcattacaactattttgaaatacttctatcccctactcctccctccttaataaccgaggggtgccgctgcgtccagggaggtcaagttcttgcccaggatcacacagccgggaacacacattccaaaacccacgggtttaaccgcgaaaacccgtttgctccttcctcagctccccatttaaataacgttttaactttattcagcaggtttgctcatctcccaccccaatcgtgactccccagaccgggtctccacagggaccaagaggcctctccctcccccttcgccgcgggagcagggaagggccttcggcagcaacttgttccacctccccaaggttcagacgctaaactgagttccagaaggaagggcttacgcaaaggcacccagcgcgccagaagaggggtgtccttttccgtgcccggggccagtcccggggccagtccggagccgcggcggtcacacctcggactcgcgcggcggtccgcgggcgcgctggcagccgtacagccactggatgacgcgcgcgttgcgctccaccaccgacaccggggggcgccggtcccgcgccgagcccgctgcctccgagccgccgccgccgcccgcgccgcccgggctgtccacgcccctgtcgctggatgtccagtcgctggcgtccccggagccgggcggcggcgaagttccggcctgcgggctggcgtcggctccccagctctgcggggagaagcgctctgcgcccagcacctccaccagcgcgcgctccaggccgcagtagttgaagaagcgctccttctccgacaggggcagcgagcacgtgggacacagcgcccgctttcccgccgcttccggggcatcctggggcgcagcccaaccccctgaagccgcaggtcgctctgtggaggccgggctgctcggggcagcgtcccgcggggcacccag

SEQ ID NO: 160246 - DNA, 1000 bp, Homo Sapiens
ttttttttttttttttttttttttttgcacagttaaataccatgtttaatcatcccacaatggacagtagtgcagtagtagaaattataagtgtctctttaaaaagtcactcccccaaagtttccattccccaatacccagataaccatggtggaacagggccagggtgagggggactcaggaagtcttggttccaaggagatgaaagtctttccaagtcaaatttgccttgtgagcagccaagagcccaatgagttgatgcatacgcgctcactctaacacgcacacatgcaagggacacagaacacatacagatggagggacagagaggggaccacagcggggccatcgcacacatgcgctctcatgccacaacattccagtccatctggggctatctcctctggggacagggagcggtggcctaagccccgaagcagcaggtgccggtcagatggagaggagggaggccgtctgtccagcctggctgctctgacaagggccctggcagcgagagaggccacccgccatccctgacacagtcaatcctccctaatctcgggccggatgggagaagggagtggggctccagtgttaagggggggccagatatcatttctttttttttttttttttttttgacggagtcttgctctgtcactcaggctggagtgcagtggcacgatcttggctcactgcagcctccacctcccaggtttaagcaattctcctgcctcagcctcccgagtagctgggattacaggcatacgccaccaaacccggctaatttttttttttatttttagtagagatggggtttcaccgtgttagccagggtggtcttgatctcctgacctcatgatccgcccgcctcggcctcccaaagtgctgggattacaggcgtgagccaccgcgcccggccatcatttctatgctaccatctcagcatctgtggtgaggggaggggtgccacttcctctttgcccagcgagagggcgta

SEQ ID NO: 160247 - DNA, 1000 bp, Homo Sapiens
tttttttttttttttggaaggggagggctgcttttattccgattgaagattcagctcccccccaccccgcacccctacctctccaacacactgagaggctggaacccgggagaaggcagctgttggaggagcgagggaggcagaggtgaggactgcctccaggaccatctcgccttccacgggaggcttgaggcagaggtgagggctccccctgatgagtctgatctgcataacgacatgcagcggcccaaggctccctcaaatgttggcaaagataagttaaccgcttccctggcttagttttcggatacccactttcgagtggggaggtgcaggatctagggcacgaagttgggagttccccagccccagggatcctgagcttctgggccaaggaggagagccaggcaagactgggaagcccaagggggctcctctgacccagggcagacggggaagggataagaggcactacagcagggtacggcctgctctggggactgaatcccccatggaggctgtcatgagggatccacccaggagtcccctttggtggggaggctgccggcagtggctgcgtctggctggcgactggcccagtagcggtggtaggtgtcctggaagaggtccctgcaggcgatgtgggctcggaggtgggcacaggccaggaaagcccctgccagcttgcggtgcagggcataggtctcctcgggtgggggacacagccggtgccgcagcagcaccgggatgaggtcctgtatgcggcgggccgtttcccccgacccaaagtcgtaagggccctgggtggcgaaaggctcccccaggatcatcactgcctccacgtgggcgtcggagaatgccttggtttcaaagcctgtgaggaatttgaggtccctggacttctgcaggacacagtctctgtctccatcagctgcagccttcaccacctcgatgtaatggtctgtgaactctgtcccaaactcccggcttgcaccaaagt

SEQ ID NO: 160248 - DNA, 1000 bp, Homo Sapiens
tttttttttttttttttttttttgagacagagtctcactctgtcaccaaggctggagtgcagtggtgtgatctcagctcgctgaaacctccacctcctgggctcaagtgattctcctgcctcagcctcccaagtagctgggattacaggcaggtgccaccatgcctggctaatttttgttttagtagagatggggtttcaccatgttggccagggtggtctcaaactccagtgatccacccacctcagcctcccaaagtgctgagattacaggcatgagccaccacgcctggccccaaactgactcttgaccaaagaatctgatttggcaaaccaaatcttagtgcagtgttcgctcctcgtccccttacccagaacatgattcagatcctaacataaacacaaaaacaggtcagggaaccaaaacactgtggtcttgtctattatacaaaatattgagataatgttcacgattcattctgttttcagcaattgtgacaattttgaagcttctctcgaagcttcgaaacacttcatttcctactaaataccaaaacgtgtcagacaggcatcaccagtgggaacttggttttgttttgtttttttttttgagatggagtctcgctctgttacccaggctggagtgcacaatctcggctcaccacaacttctgcctcccaggttcaagcaattcgcctgcctcagcagcctgaggagctgggactacaggcacgcgacaccatgcccggctaatttctgtatttttagtagagatggggtttcactatgttggccaggctggtctcgaactcctgacctcgtgatccgcccatcttggcctcccaaagtgccgggaccacaggtgtgagccaccgtgcctggccggggaactttgtttttaaaacgtttacaaacaaaaagattttcgatgcataggccagtcctaatgcatcccataatggggaccaaggcaaaaacacacacacacaactacaaaatat

SEQ ID NO: 160249 - DNA, 1000 bp, Homo Sapiens
actgacaggaaaacattttaattcaaacctctaccactacccagcctgaagcaaagtttaaaaaaagaaagaaagaaagaaagacacaaaaatacaagcacaactcacattttcaaataaaggaaactcttgctaaataagtagcaattatgctgaagaatttatatgctaaagcacgaatgaatataaaaacaccagagcagtcaaccatagctttagcactttgagtatgattaacagaatgaacttccaaaggtcaattaaatgtcgacacactttaaagagatattcttaagcctggtcaatgtataacagcacctcttaattcaggggtatccgtcttagtttaggcataacatgcatgggataaatgtacatatatatacagaattacaacatgtctccaaccagattactacagaaactcatgtatcacctaccctagagttttgactatgttagtattccaagttatgaaatgattaaaagaaaacataaatatattactatgtaacactatccaatgaagatgaaatgcttgggactaaggtttatcaagaagttgatcctatttattcaacaatatgaaatcattcccaaggataatgctatattgtccacaatatgtattatccagataactaagtcaccccccataaccttccctgaattcttgtggttaaagagtttggagaaaaggaatatgacatttaaaaattgccaagtttagcatcagaaatttctgggatagtatagaacaagtcctgaaggcactaagtgcccattactgacatttccatccaagaactcagtaagatcttcaatcccatcccacgtgaactaggccaagttgtacaagaacctcagaataagcaaagaccaccaagattatctgacccaattgtctccacttaacagatcagcaaatatagatccagagaggtaaagtaacctggtttggctcacacagctccttagcagctgtcttaaaactcagtcc

SEQ ID NO: 160250 - DNA, 1000 bp, Homo Sapiens
gtagagacagggtttcgccatgttgcctaggctggtctccaacctggtctcctgggctcaagcgatccgcccgcctcggcctcccacagtgctgggattccaggcgtgagctaccgcgcccggcctatttacttttcttactaagctggggatctccgtcgccctcggcttggcaggaaggcgggggtaggggagcggtgggaaaggggggtgggcgacgactctgatagagggaaaagaggaagggaaagttggggcttactgcagggcaagctccttaggagaaggtggggaggaggaaggagggaggtccaggcccttcttccatcccacgtcctccacttcccaaggtgcaagaagaaaagaggtacagaacacccagaggtgccctcgattccgtcttgcacttgcccttctcccaccgtccagcaataaagcgagagaaacaagtgcaggaaactggccggcagtcatgggagaagccaaaaagacaggtgagcagcgcgtccgcctcccgcgcacaggtgagggctcacttctgcctgtcggcggcggcacacacaggaaagagccaagcgcgtgcacgcgggcccgcccctaggccttgcggcggcttcagctcaggcccttgctcttcctggggcggccgcgctccgcggcttcccgggctgggctgctgtcgccgctgtcgggccggcgccgcacgcgccactccacgcggtggtcgggctcgagcacgcgcggcgtcgcctgcagcaggaactggccgcggcgctgggtgacgcgcacgtcggcgcgggggtaggtgccgtacgcgcgccgcagctcccggcgcacgaagtccggtagctgcagaggggggccccgcgcgcgctccacgcggccccagcgcagctcggtttgcaggctcccgccctccggccacggcgcccagctctcggccaccgccgcgggcgcctgcagcgacagtcccgagatgccggcggcggcgcagggccgg

SEQ ID NO: 160251 - DNA, 1000 bp, Homo Sapiens
cagcatgtaaatgaaaaatttttaatactttccgaacaatctgggtaacaggaaatgaaatgtatttgaatgtctcttctaagtgctgaaggtattttcaaatccaagttcaactatgaggctggcatctggacatttgtttcccagagctggttttagattcttggttctgcaactgaacggttatgaaacttggagaaacaaagaaaatatgcctttcatcgctccggggctcgattttttccatgtgaagcatggtaaaatactctttctgaagcctgtttttgctctaacaccccccgatttgattagtgctttagctctctgcctttgttttcctatttatataaaagaattttattcctttggccttccaggatcaattagtcaatggatccattagtgaagaactttcaaccttgaagtgctaagtagttctgttattgcttgtagagcaagctgatcttggctgcatgtgatgtaaaactgctgcgacttctaaaatcgttgctgagtctttaagagaacaagatacttattgaatccaaaaggccactctgtctcagcactctggcctgtggggttgaagagaggcaggtgtttgggaaggggatgtttgggaaggaggtgttggggaaggagttgttggggaagggggaaggaggtgttgggaaggaggtgttggggaaggaggtgttggggaaggaggtgtttgggaaagaggggtttgggaaggaggtgttgggaaggcggtgttgggaaggaggtgtctgggaaggaggtgtttgggaaagaggtgtttgggaaggaggtgttggggaaggaggtgttgggaaggaggtgtttgggaaggaggtgtttgggaaggaggtgttgggaaggaggtgttgggaaggatgttggggaaggaggggtttgggaaggaggtgttgggaaggaggtgttggggaaggaggtgttggggaagggggaaggaggtgttgggaaggaggtgttgggg

SEQ ID NO: 160252 - DNA, 1000 bp, Homo Sapiens
ggtattaaaatgtctgtgattacttatttctcagcattcatctggtaacttaagcagcatgaagcaagagttgcactttaaaaaatgacaagaaaatagctattcatttagtcgacagagtaaggcccatctcatttccaggatcactagtttctgcttatgacggggtgagcatccgccagcgcggtgattgggaggcgcccctgtgtctttaggctgaggcagtgcccatagctgcagtgcctcgagtttccggagcaaccgcggggctctttcttgaggagtcttgggaggggcggtggcctgcctccccatcctagatcagcgaggtcccaagagtgcgtattgctgcggggtagctgtggagtgtagacacgttccggaggtggcttgacatcctgaggctggggtggtgtgaagggaaagaaagaggggcaggtcccgggctttgctggctctgcttctcagggtcaggccaatgggtctgcagagcagtgcagcggggctcctgccagccgtggtgttgcctctttcttcccagccccattctcgtcttgcagggaaggcgtgtggactccggggggcacaaaggactccagcagggccacagacagaagagtgatgtgtcccttgtcctctgcctattgcaccgtattccataaaaaataaacacttttttggactgtttgtatattgctaatgcggtggcactctgggcactggcaggctgcagagagccgcgttgccattcatccaccagaatccatccagagacagccttgcgggctgggatctttggagctttcctttggaaggattagcagtgcccgtctgtctggtgctctacacagtgctgtgaacatgaaattaaaggataaaaacaaaataaatccatgggtaggaaatcccagggcttcgtggcatcatttggcaatcatttgtactgtacagcatcatgcggtatgcctgcttcctccacgtccacacagacctggccccg

SEQ ID NO: 160253 - DNA, 1000 bp, Homo Sapiens
gtgattctttttttcattgaaaatgtcaatttagaaaacacaaaagatttcacactttattcagacaacactgagagaagaaaagggaagagtgagtaggggagatggggagatccggctcccaaggatttcaggaaacacagtggggcacctgatctagcacacattcagagggtagggaggggaagggatctagctatactctgggcatggagcagggaaggtcgtccttgctatggaggaaaggagagaggaaggacagaggaagagtggtcccccatctcatctcgacaatctcacaagacaggagtatatcgggacctagctaccagggagggatggatgcaagaagggattccaggatctaacagatccttgacactctggatctactctcaagaaacaacctcccccagagaatcaggatctgggggaaatggtggtgtcagccaatctcctttagagaccccaaagcaacaccagtttggggttccctgacacctacacaaaatgtggaaatgaagagtttggcaatggtgagtagatccctttgggaagctggtaagtccctgttctacctaactagactgctctgaagcagagcttgctcactagcggccattcgcaggctcaaagggcaagtgtggcaggcagcacaaagcagtattagagccaccagtagacactagagggaatatggggtttatcccatagataaaattccttaaaaagtttccctggcacaggatgcccttagaccttccatggtgttctaaagtttgacagcaagcaagagtgtgcttctctagataaatgtatgagccatctaaccaagaagtctggcaacagatcagacttcctgttgggaaagtattcagagcccaagttaggagagaaggggtgcttttgtgttaagaaaagctacaaagtgttaggcagtttgagaccctgacatccctgctgtctaagaaagtagaagagggaatcctatgggctctgt

SEQ ID NO: 160254 - DNA, 1000 bp, Homo Sapiens
tttttttttttttttttttaaggtaacatttctaagagcaagttggttaagctctccagttttcctatgacagtatgttgtttagtttaacctactaattcaatcaggcatttctattgattcacctggaaaaggggatacaacagaacatttttaagaggtcattttagcagttttattcaacagatgccataaattaactacattcaggaaaaaaaacttaaacaaagaacaaagccaccctatctagcattctctcactcacaaagaagtatcaaagatatgtttatgttccattaaccgagtatgaagcaaaatcattaaaatattacaactgctaaacacagaagactagaaatcaaatagtttcatacccagtatacaggcatcaaaaacttcaatttccagctgtttttttttctaattcatatcatggatttacttacaaggagcttattcctatgggattaattcaattactcaatggtaaatagattttagctcagaatttttaaaggatgacttgctttaagttactattctacgtgctgctctatttctgctcacacttgcatgtggccaaacagatcatgctctgatcagataagtatactgtaatctacttatatgtttaggagttggcatagggttaaaaggcacaaagctgtattttagtactcatttttcttattacttatttgtaaaggaacttctttggatcctgcttaaatgatcaccaagaaactgcaaatttctatgggggaaaatgtgagtcctcttcataaattttagcagcccttcaaggacatatacatcaaaatttggtggcctttaaagtattggaattttaaatgacataactgcactttactgttgaagacccttttagtttaatatttatagccacttcctcatattttctttaaaatttatcagtatagcatttcatttctatgcatgtatatgtatagtaattcataaaactaaatagcaaactgat

SEQ ID NO: 160255 - DNA, 1000 bp, Homo Sapiens
acactgcttgcactttattttgtacagacatttcattaattattactcaattttgaggtgcaaaccttctgaatatagctttcattttggaccaaacaatttgttatggcaataaataatgatgcattgaaaaaccaatttttgtatttgatttaatgcactcttacatttaagaaattatatatacattcttgaatttcaacttaccaaaatagaatagcttttatttaacagcctaagcttttgttttcctgacaaatactgaaactttttgttacattaatgctgcaaagttgtttatcacctcaactttctcactgctttgctcataactaagtgtgattacatggagagagaaagttttgtaacagtaacacatgatttagagtttaaaatcatatcagaagatgggaattatttaaatataccttataaaaataagtggcttaatcaatgagaaaaaaacccaggggtttttggcttataattagaaaataagtattattcttagttaatagttaattaaaaaaaatcaacaacctaaaaagtaaaaccaattctgatgtgttcagtagctgaaagatatgtatgtttgtaggtataatatacaaatacagacacaaaccattacagtaattttgaaaacaactagaaagcttatactgtgttgacaaatatcaggttataagaggactaccccctttgttctaagcaaactttttctgctgaccgaatagctaggaaaaaactggagttaactgaaatatttctaaccaaaatattacaaagttctaagaaacaactctatcttctagattgaggtcagccaactataccctgcaggccaaatctgcccagctgcctcttttttttttgagacagagtctcactctgtcgctcaggctagagtgcagtagcatgatctcggcttaactgcaacctctgcctccccggttcaagtgattctcctgcctcagcttcccgagtccaactgcttctt

SEQ ID NO: 160256 - DNA, 1000 bp, Homo Sapiens
gttctctgacaggtttattagctttcatgttaatggatgtttttaaaccctgcaaccctctgtcaacttctttccacatcaagaggccatgagatacagtaatggcctcttaagagtcatgccacataaagatgatgactttgatgtcctggcctgcctcctgtaacaatgtgaggctgttttgggcacatgctgtaataacaacaggactatcacaggaacaatgaagcagagaagcagaaggtgcctacaaagttttacctaaatgtcttgtttgtcaggatggagctgatgcgcccatactggcagaacaattagcacagagtagttctgaaaaggaggaagaattcacagagcatcagttatgggtgcagggaagtcgccatctgccaatgggcaccagagtgtcactgtactggaaggggaaaaggagtgggctggatgagatccaggggcctctctgcccatgttcaaagtcagtagctgctctgcctgccggcatcacaatgcatgccgagtgtgaagtgacacccccagcagatggggtttatcatctttacttagtcacacaacatcaaggactggttagttccagggaagggctccatttcattacctgggtcagttctcttcccccgcatgctccacaatgcagtagaaccaaacaacacattcatttacaatagaatgtttaaataacacctgtccaataactgcccttacttctttgtgctgtcgggaaaagaaaaaaacagaaagcaataaaacccaaaccctttggcaagccagccggtgcctattctcctggggcatttttagtggaacttcggctgggccttgccctcctcccaatatcagtgaggaaagtggcagcgggacaggtttggtcatctgcagtggagtagaaagaggaaccaaacacgattcgggccacaggtggattctggcacatttttagattggattggttaaaaatgtcatgttgtacacaggatgcagg

SEQ ID NO: 160257 - DNA, 1000 bp, Homo Sapiens
tttttttttttttttaaaaacttaggagttgttaattctgaaatttttcacttagatatttcggtctgtgcagttggctatgagtacttgaacccatgagtaaccgaacccatgatgggggaggatgacttggagtctggagtatcctatcctacatggcctggaatgttgttctcatgctctgcctgcagttaattgttcacaagtgtccccataagtaactgtcgagaagattctcacaggagaccacgtggttgcctgaagaagccagagtgaaggagggttgaaatcaacgcctttagagtcttaggaataaaagttaaaaagccccagagaaatgttgtcctttgtccacggcacctgcactaacccctcccagaaagtgggcatgcagtttcccaggccaggcgagtgttcgttgctcaccgaagaccagtgtttactagcaggattgtcgccagaagcagctgcattctccccggatgcagacctgcccgttggtagggactctgctcacacggaacatggacggttacacctgtgccgtggtgacgtccaccagcttctggatcatctcggcgtgggtgttgtggaagggcagcccatccacctccatgcccacgatgcccgagacgccactccggactttgtgctgcaccaagatgcccagcattttttcttccttaatgaccgacgggagggcctgagtccaggcctgatctccaggtgccctggagggtccgactgctttcctcaggtactgactgtggacagcacatgagtacaggatgtagagtgcgcaggccagggcatagcctccccagttagaaacaccagcaatgacggcaaagtcagcctccacgtcgcaggcgatgacatccccgtgccgtatgtgcctcctcacagcctccttgactttacccatcccaagctcgttgcctccatcaccgactccagttgatgagattccaggaatcttcttcgcagcaagaaaaagatc

SEQ ID NO: 160258 - DNA, 1000 bp, Homo Sapiens
ttttttttttttttttttttttttttttttttttttttttttttttttcttattcatcattcattcatttatttgattagttgaaaacacttccgactaaggaagcagagagcccacaatcctgtgggaaaacaggcctgggaactaatatctcaggggtagtgagggtcgggcccagatcctcaaaggttccctgcccctgaaattgcacctttgacagctgctgaattccaagcacagcggtaagtgctttacatggggtaaccctaaaaaacacactgggcctcagacactcccgtacacacacccaacctctaccctgtggatgtcctagataagggttttctcttcacaaaggtaaatcaactctttgcctccttagggagggaaggaataaaggcattatttttgagacttttctgcagtccattctgcaggtatcagtagtgggtaatccctccaacgtccaggactccaaacgagcagctgctccctaaagctcacccaccaatcctggccctccacctgctactggggtagaggcctgggctacagacacagaggctgggcttctgcccagctgccagtggtgagacatggccttcaggagctcaggtggctttttaactgcaccatgaagattccaaacttggtggagttcagtgtccacacataacgaatgagaacaggtgtcagcagtgtcaaccaggtccgcaaaggggagaataaaaaagctagggtgccgtatgttgcataaagaaagtagcaggaataaacctgccagatgtacagcagtagcataagtaggtgaacaggcataattttcaagtattttctttgatggagatgagacctgaagttgtgaccaaagcaccgctgcagcaagctccaacacatgtaagccatcaaggggatgttaaaaaacgccagctggagaattccaattataaatgttatgctgccttgtaggaaatgtccattaacaaatatcccaaaggaa

SEQ ID NO: 160259 - DNA, 1000 bp, Homo Sapiens
ttttttttttttttttttttttttttttttttttttttttttttttttttttttttttttttttttttttctttttttttttttccatcccagctgtttattgaaagggaaggtgggatggaaggggtgcaggatgaggagggggcgtgaggcacaaggacagtagggtgtgccctggtgggggccgcctgaggatcccctaggaggcccttcaggctggtggagactgaaggtaagggttagggaggggaggggcgagagccttgagcgctgctctccagctgcatcagagctccctctagtggtacagaagagagatgacgcctccggctggggagggaggggctggcgcctctgagagagcccatttattatcagggtcacggccaagaccgtgggcttggtttctaggtaggtggactttgaggggcaaagacaacccacttttcctgccccctacccccggctcttagagaccatttaaatccatatccaaagtatatccagagccacctgggaccatcaggcctctggctagtctttctgggccaaacctgtcctccaccctgaggaccctcagggaaccaggaaggtgaggggctggctccgccccacctgtagcacaagagctggcccaggaggaggctgaagatgtgtttctagttcctgcatgctgctttgttgtgtgacctcggacatgtcacctccagccttcttcacccacctcacctatcaactagggctagtaattgcctgtggtgggtgggctggggggctctgatgccaaaatgcaggtagaagacacactgtgagaggcaaacgtcttcactcatcctgcagggaaaggccaagtgagcatctgggacccattcgagctgaatgacccccaccccttcatctgtgtctatggagggcagtgcgtgtcctcatcctggcgagaagaggaatctgatccaaagccctcatggcagagaggcaggagctgatggcttgaaagggc

SEQ ID NO: 160260 - DNA, 1000 bp, Homo Sapiens
ttttttttttttttttttacacttgaaattttgactttttttttatttggaaaagagacagttgaatcccttttctttaccagcataaggcagtcaggcaaacctaagagttgcttatttcggcaacataaggcggggtcattgcatgacagcaagaaggcacgaggtcccctcatctgtcctttcccagctcgcaggccttggaaccccgcccagggccccgctgagggaggcacaggcacagtcctaccgactcctgcctggcagctggaggagcccaggttccagcacaaaggagtctgtggacaggcaggggcagaatcctggagggagcgcctgagccaccatcccatgtggcagctgctggcgtagcagtgcctcgggctggcatcgttttggaagcaagtgggttcagtgaagtgtgttgccacgaatagcacccgctgcttttggctttattaacgtggcaaggagaaattcaaaattaagtatgtctcgaattctgtttgtggcagatggtgcggctctggagctcagccctcggcggcctgattcccaggggtccaagccaccctcattctctgagtcagggttgggcagccacttgtgtcctgagaaggtgccagaaggcctgaagcccaggcaaggggaacgggcagtgcctgtgcctcgggggtacctccagcatggcctggagcacatccagccatccccttcccccaaactccagcccttctcagaggggctctgggggtcattcaagggggacttctagcttctctctggaaccctttgtccagagcaaagccaggtttccaaggtccccacggcaaggctgttgggtgctggcagcaagaggtacacagcagttctcccagctcacagcagtgacctcagatctccagcagcaagggccgcactctcgtgcccacaagggccttgcagaaatgctccggtccctgggcctcccccggcaggaggggcggggctcctgcctgca

SEQ ID NO: 160261 - DNA, 1000 bp, Homo Sapiens
aatgttttatagagattggtggggggagggcgggtctcgtgatgtgcaggctggtcttgaacttctggcttcaagcagtcctccctcctcggcctctcaaagtgctgggagccactcacaggtgtgagccaccacgcccagcagagcttcgtttcccaatctagaagttgggggcttcaaacaacagaaactggctggacacggtggcttacaactgcagtcccagctactcaggaggccgaggcaggaggatgtcttgagcccgggaggtcaaggctgcagtgagctgtgatcacgccactgtactccagcctgggtgacaggaagaccctgggacacacagagctttacggtggggccttgttccagttgctgcaggctgccattcctgaaggtcgggggacaagctgcctcttcaaccccagctctgccgggggctcctcagcggctgcggagaagcgactgctgcaggctcttgcaggtggcgagggactccccggtgaacaggtggcacatgacaacctgcaggcagcgagccataaaggccagcacggcatcgggctggagggtgccgctgcgagagaccaggcacaggcgctgcagcgaggggcactggctcagcgcctggaagaactgggcgttggcgctgaagtagggctgctccagcctgaggtccctcagccgcttgcagtgcttcaacatgtctgagagcgcgggcatgtacaccaccttccccatcatgcccaggttggccagcgacagggaccgcaactgctggcactgcaggccgatattgaccagcccggagcccgtaaggacgctgggcagctgtgcgagcgtcaggtgccgcaggaaggccagctggccgatggcggccacctccgagtccccgacactctgtgcgcggctgcagggtgggagcgagttgcggatggcgggctcgttgcggggcatggcggaggagaagttggacccaatcagctcgaggtgttccaggaag

SEQ ID NO: 160262 - DNA, 1000 bp, Homo Sapiens
tttttttttttttttttggagacagagtctcactttgtcgcccaggctggagtgcagtggtgcgatcttggctcacggcaacctccgcctccagggttcaagcgattcttctgcctcagcctcctgagtagctgggactacagacgtgcaccaccatgccctgctaattgttgtactttaatctaattaattaattaactttttttttgagatggagtcttgctctgtcgcccaggctggagtgcagtggcgcgatctcagcaggggagtggggtctctcagcgtgaaaacaggagtcattgtcagcctcgctcccccagctctgcctcccatgactggcgtttttggttctattctaatttcctgctgggttccccatgaacctccgcctcccgggttcaagggattctcctccctcagcctcctgagtagctgggattacaggcgtgtgcaaccacacccagctaatttctgtatttttagtagagatggggtttcaccatgttggccaggctggtctcgaactcctgacttgaggtgatccacctgcctcagcctcccaaagtgctgggattacaggcgtgacccacggcacccagcctatcccaaaccatttttgcacagttagggaaagcatgggccaacccctggggcggtcttggagggtctaatctgctcacaactccctgggggcctcttctggccccaggtgagtgactcaagcccatttcccaccagcacctactctgaatgacttattcgtttatcctgagggcttttgcccaacttctcctgcatcttactcagtgacaggcacaggacggcacagagcagagctgccaaccgatcgtggcagcacaaggtgaaccgtgggatccttttttttttttttgagttggggtcttgctctatcacccaggctggagtgcagtggtgcaatcatagctcactgcagacttgaactcctgggttcaagcgatcctcctacctcaacctccca

SEQ ID NO: 160263 - DNA, 1000 bp, Homo Sapiens
tttttttttttttttttttaaccaacaagactgtcatttattaatacaaatttatatagtggcatatactattggagaaatcagaaattcataacacacaaattcatattggaaatacaaaaatcatttgagagtcaagaaatcaggttgacagcaccacaaatgtttactcagtctgagcaggtgtgtagtatccaagaataacaaatacctatagcagactgagactgaatatcataagactgtgcaaacacattccaacactatttcccacccaacaatagaatctgcaggagtcctctaggaggcctggggtacaataaaagggcagcaaagcagaatggtacagaccattctttcttttaaccttcacagccagcatataaaagcaagtagtaaccactgagagttgtttgttccttctcacttgaaggcaagatataaaaggttagtaaaacacacacaaggcattagtgagcaaatcagagaaattgaaagcagagctttgactgaaatataatccacattagtcatcaaattacttgattcctataatgaagtatgaaacaaaccaaatgaataattctacatcaaaggggtatatctcatctccacatctcttaacactatttaacaagtgtgcatccactagagaagtactggcattcaataacatacatttagtggggtgaaaggcagaaagaaagggaggcagaaatactgcaagggctttcctttcacacacagtttcctatctcactcttgcccttgtcatttcagaccttgtacgtggcggttgctgggagcactctggggctcagtctttagtccttcccactctagcttcattctgccacctctgtactcttcccatgcaatgtcctattcagcagtaatggaaggggtgtgcaagaagaatatgtgggcaaatggaaaggtgctgctttaacgtgtaagcattctggcacttggagcagttacacagttacaaataatgggc

SEQ ID NO: 160264 - DNA, 1000 bp, Homo Sapiens
ttttttttttttttttttttttttttttgatacagggcctggctctgttgcccaggctggagtgcagtggagtaatcatggctcacctcagctttgacctccagggctcaagtaatcctcctaatacgggcatttctctcatcgcttcaaaacccgccccacaaccaaacattcagatgcttattaaggcaacaaaacaagtgacagacgggacaatttttccaattctagatctaattgattaggctatgtctcatgaggagactgtacttgacctctaagctagcatctggaatacaatcttccagcggcttagggaaggtcggtgatagtagtatcgtcaggatcaattccaaagtgcagcttgccgtccttggcggctgcccagggcatggaggtggaggtccactttgccacccagtctcctgttttgctaaccacgatgaggccacctaaacctttaacccttgacttcatataacccaacgataggtccgcagcctcttctaccgtctttccttgttctatgtggaacagggtgagtctagccaggttcaccttcaggatgctttccccatgccctgtggttgagacggctccgatgtcattgtcggcataacctccagctcctagacacggtgagtccccaacgcggccgaccattttattaacgataccgcctgtggaggttgcgtaggttacattccctttgcagtccaaggcaacagcacccacggttcccaagtttttttgacaatctgttttctgagcacctttttcatgcttctctttttccaggcgctttttgtttctctctgtcaccagtttttctccaggaatctctggaacccccatagctgctgcaaactgcgctgcgccttggtcagtcagaaagcaatgaggtgtcttttccatgacaagccgagcaagtttaatgggatttgctatacactggactgcggacactgctcctgcagacaggtcttttccatccatgata

SEQ ID NO: 160265 - DNA, 1000 bp, Homo Sapiens
tttttttttttttttttcagtcagtcattcagctttatttcagtgctggtttttggttccctaagagctgcatgagtgctaggcttcaccacgtgactgggggccccttgggaactgggtactatgggcaggatgcccctgaaaagaactgaagacagaggaatcatacttctctttaatacctctggggaaggcccaggctaaggatgagggcagggaccagtcccagtgccccctggggagagaagagggagaagcttgggcacaaactcccagtggccctgcaaggctatcatccctggatcttgctggagtggacagtcttctgggccagggttgttctagcttgtttctcactgtacctaatcagggggcctaactgcattaacaggcagccagaacctacctaccaaaaagcctgtaacctagactgctcctcagattttggccaagagagggccccggcttgggagctgcttggccctgagagtgagcagaggctcagagaatacacagcacaagggttacagtccctggcctcttcccatcgctggagacaatttaagactgaagggaagatgagaggaggggccagccctctaccctggctcatctgcttctggctatgttcctacaagggaagtgataacagcctgaaacccgtggtaccagggcctaccctatgtccacaatccttggtgagcccttctgtccacccatccacccgctcagccagcctgggcagacacagagcagaagcagcctgaagccctgaagcaggcttaaacacaagtccttgacaggaatccctgccaggattccaggcatagatcctgttctaccagcctccagggcctagagcttggcaccttaggatttgagcatcagtgtgttcctatggttggaacccacaccagctagctcatccagaactagcctcattttgccatctttgagacagggtgctggccccaagcctactcatctagactggacaaat

SEQ ID NO: 160266 - DNA, 1000 bp, Homo Sapiens
ataatacagaaccatttgtaatcaaaatcaatgtatacatgctactcgtttacaggtgtatattcagtcgctgaacaaatctccgttaggggcgctgttcgtgtgctgggaacacacaggtcaatgaagagcagccagaaagccccaagctctggaggcttccactctcgtgaatcagcaccgcttgatcatcctgcccgtgaaggcatgtgctttcccttccagataagttacaaagccagagcacggaagccaggccctcatctttgaacattcagagactggtccgcaggagagggcaccctgagcagctccactcactgctgctgggacacaggtggccacaggagcttgattctctcccacccttctaagaagagaaacgtaaaaacagaagaaaatccaaaaagagacacccacccacatggaaaaaaataaatgtatcttcccatattaaaaaagcaattccatctacacgccagtaaccacccaggccccgagcacaggggcaggaagcaaagctgccccagggagagggggtgcagacagcgaggcagccacccgggacagcaggatgcctctggcccagcagagccacactgaaggaggtctaagtccaacaccacgttgtccatctccacctgcgacgactccgggaggaaatgacggggacagacccgatgaggaaggatgttcacggtcaccttcacacttcccactactatgagggcatttgtctttttcctgaaaatatcaccttctctgaggatttcctgtatttattaagttacaagttggcaggcacagcttgagcaacatagaaaagtaatcttcttgagttatacaatcatttaaattccaaagcactcacaaaattgagcaaacaaagccactatttgcatatttgggaaaggaaacatattgctaatggaagccacaggactggtcaaaaataaatgttttgtattaagtagtaaaataaatggagaattctacccca

SEQ ID NO: 160267 - DNA, 948 bp, Homo Sapiens
tttttttttttttttttttgaagttatcatcagtgcaaatagccgagacgggaggggagtggagatggggaacagccgagatcagcattcatgggcatccacggtgccgaggtcacagaaggaactgacccgagagccgtcacagggcggccttaggttagacttgaaggagaacttccaggtggcagctgctgaggccaggacggattgacaggagacgcctgggccacgtgcccaggctcacgcctggaatcccagccgtctgggaggctgagattacaggtgtgagccactgtccccagcgttttctcagcccgagtcaaaccgcacgggcgtgacatcactaaccagctcctcatggagctctgttcaagtccccacggggatgtacttcaggaagacccattcccgcccacacccctcttctctgtccctgatttaggatgcgggtggccgtcccaggatctgtccggggaggactgcttcttccatacctgacgggcgtatctcgttttgtctttaaaccaggtgactttttcagggaccccctccccagcgctgagctgtacatcctgtgccggatcctgcatgactggccagacgacaaagtccacaagttactcagcaaggtcgccgagagcgttctgagctcctgctgcctgctgtgtcccctgtgtcctgctgaaggatccccgcctggctggccaggactccagctctctgctgtctccctcaggggccggcctgctgctggtggagacgctcctcctggcaggcagacggctgctgtgacggtgccgtctaccaggcagggtctcagtccttctccgcactccagcctgcatcttcccatcttctgcacgatttccagtgtgtttcctccatgggacgccatcgctgccgctcacccctggatgcccacaggctatggagtggcagttctctggg

SEQ ID NO: 160268 - DNA, 1000 bp, Homo Sapiens
ttttttttttttttttttttttttgctcttcccagcaccaaagctttaattcctcaggctgacagcggtgcagggggcctggtcctcatcagggtttcagcagcagatgccatcacatcttgttcttgggaaactgctgacgaccgaaccctggggctgagctcccaagacagaggctgggcagggccagggccttggacccatgcacacctggctccagtccctctggctggtccgtggagagcgctggggtctcgccctcaaatccctctcctgttctctggtgacttcccacttcccactcccccacctctgtcctcacaagcggcgtggctgagggaagagagccatcccactccacgctgtagcagaggctgcccaacctgattaaagctgcccagagtcaagaggagcctgggattgagactaagtcccctcaactgcatgacatgaaaagttcctttttggcaaagctgcacctgagagtcctgaggaattctgaaggggccgagtccccgtccttcgtgccccttatccctgctgtccacgctgaggcctgagcctgcctctctgccttctcagcagagcggccggccgctgtgaccactgctctcaggagagtgggggatgagaggccagaggtgatgcaggctcagaccccggcttcaggagctcggggtggggtcgtgggaccgtgcgcgatagcatcagtccacaggggcaggcagaggcggtgtggagatgccacggggaagccacctgcccacgggggtccacgggagtccaggctacaggcagaaagccttgaactcaggccaagcagcatggaccttccctgagagcctggctggaggaacccagggtgacccagagggggctctggagcgggtccctaacatctgaaaaagtcctcccagggaactcggagctggaacttcgggtggaagttctgctccacgtcaaagggtaccttgatcttgtcagccaccgccagccactg

SEQ ID NO: 160269 - DNA, 1000 bp, Homo Sapiens
gacaccagagggcttcattgcaggtcaataggcctgtcaccatcaccccacagcgagcaagtcttttgttccctcagctcctgtgacaaagtcagaacccaggtgctcagggccgcctgtgaatgcaggtgccttgtcccaatcagaggacatattaatagggccatgatttcctgttgccacaattttgccaaggcaggctggcaccagaacaccaaagaagggaaattatagtggagtagcagtttgtgaatctggagtccttggttcaatcacagaacaagtagggagaggagccaggacctaggccttcaggttttcagcaaggaaggactctcaggccatccttgcagttcagttaacaggaggaagcaaggatccccagagagctggagtactctgactctcggatagaaaggcaggacaatcggagcctggggttcacgtgagtcaggaaagggagctctccacactggaatcgctgtagccgaggaggttctaatgggacgatcttcgacggtttcctttccagctcaaaagaaagcacaataggacggaggacagaggggctagtacaaagtgtccagaggaacatggtcatgggctcgtcaaccctggctgaagactcaagttgggctccaggccctgcaaactgcaagaccactctgcctggcacttggacgaaatctaggagggaggcccactctctaggacacagccctagtgctgctgccacatggtgattcctacaggtcaccacggcttcggcagtcccatcctccaccaggagcctgatgatggcctggcttatagctgtctgcgtagggcaagtggagcccaggcgagtgcactttccctgccggcagatgctggtacaataagcacacacccagaagagctgaaggctgaagacagagacgatatggcaagaggcagtggcctggaatggggactgaccaccctgcagaagttcagccaggtagatgtggggcaggggaac

SEQ ID NO: 160270 - DNA, 1000 bp, Homo Sapiens
ggtagtcaacttgtaccaagtttagcagcaagaggatacttccttagagactttcagtggacttaaactcagtttccgctggtgctatgtaaagcatccacgatggttttattgtactctgcaatctgcttggtcacatttttcttaattggctggtaatcactctcttgactcttggttgctatgaattctttcatcgcaaaattattttgctcaaggtgttgccactttctctccaaatttgtaagctgagaatgtgtctcattttcttgcaattgtgtttttagtgcctcatactctatgttttgcttctccattattttcttaaaggcatttctgtgggttgataatatcattctctcctgatgtaatttctttatcttttcttcacctgatgattttaaagctggcaaatcattatatatctccagatcagttgtcatttgcttaattttgctttttagagaatgctgttcttcagtcatcttactttctagaagctccattttctgcagatccaactgcagacgttgaatgtctgaagtcaaattctgagctgtactttgtgatttctgcacttcagtagatttaaaattgaggtcatcctgcatcatctttagctcttgattggtgatagaggatatctgttctatacgatttatatttcgactgcagtgctccaagagtgcaacaatgttggcttctatctgtgcctttcgtttcagttcctgattctttgtttcctcaaaagtctcaataaaagtgtccatatgttcctcccttttctttagctccttgtatttctggttcatttcaccttggtgttcctctaaatccatgtcaagttgtctaatttcttcaataaactgatttatcttttcttttgtatctgttaactgtctttccatgctggctatttcctgattatcatctttaatctgcttaagtaatttctctctctcttccattggagatcctatgcttttgtcttctgcaatca

SEQ ID NO: 160271 - DNA, 1000 bp, Homo Sapiens
tttttttttttttttgatattttaacaaacgttcctttattaggttactgactattatcaaccatcataaaatagaacgggagtttcaaaactgtacaagccacaaggctctgggctggtaggaaagaagggtggggtcgagggtcccagggtgtcggggggtgggagatgcagagagagctagagggtcacccggcatctgtgaggacggctgggtcaaggccataagctgggatctgtacaagggaaacattcatcagaatgtgacccacctgaaacaggagggaggaaaatctttaaaagtcttacaggtaaggtcccctgccccgaaaaaaaaaaccgtcaaaataataagggggtaatgtacatttctcacccagtcttggcaccaattttgtgctttaaaaaatatactccactgtaagatttacttaaaaaaaggtactctacagcagctgtttaaaacataattcttacagacaaatatatatatatgtatgtatatatattaaacattttaaacaaataaagtcatctattgtacctgtgcagaaatgaaccaaagttagactctaagagagttaacttcaagctcaaagaaatggcaaaggcggtggcaggtgctggggtacgctacgtggaggggttgccagggatagggcacccctctcttccggcagccgagctacccctcttgaggctctgagaggggttgggatgaactggggctgttaccctgggtccagagccccggctggggtgctgagcagagacccgcgctggcttctgtgaggctcgactctgctcctggtcttccccatcccaccctgcccctggcttctcggggaatggagacccactcgccctcccttcttagttctgggggtcctctggcacacccagagcttctgaggatgcacttgggaaatctcagctagaaaagcaaaagcaaaatcaaacccacatcaaaagacccacagaagactaaagaaatgcaacc

SEQ ID NO: 160272 - DNA, 1000 bp, Homo Sapiens
gctttctaaagtggctttaatatcacacaagcggctctttggtctacagtgagagaaaacagagggagccaggaaaggctccccgctggcctctggagtccaggagccttaggaaggctgaaagccagccctgaccagcaggcttagttgtcctgagaagagccagtgaggccacctggtccagttcaccaggtttcccagggaagcacaggcatctctgggtccccgagcacagtgccagggaagacacccccaatccccatctgaacaggccgagggcagcatgggaaaggctcagactgcaggttcatcccgcaggatggtaaggacacgtgctcctccctcgcagagcaggctgtgcacagcccggcacagggccagccagggcggcccctgcggctgtgcagcgcttaccagggggaggagttcagccatcaggaccttttccaagtggatctgctggtccagcacagccactcgcagcttgagggccgccagggtctgcagctcctgggtgctggagtagacaagcagctgggggctccatgcaggctccgctctacccccacaggacggcgaggctccggggggcctccccacaggacatggtcttggtggctgttccgccaccgctgcacgcagctcctgcagcctgtgcagacactggcccaccatggcctgcagcccctccagcgtgagcaggcagcggtactcctgcatccagtccatgggggctgctgagagctcctccctcatgcgcagtctcagcagcgagcaggccttccgcaggcgccccgcctccgcctccacctccacagcactgagcctgggctggggcccgcctgaagctgtctgcatgttctggaggaactgggttttggcagcggcggcatccgtggaatcactggtctgtgtggaactgagctgggcccacaggctcgagttctgggaagctgctttcctgaatgccgcaggcagccgcagcaggtgccccttctcc

SEQ ID NO: 160273 - DNA, 1000 bp, Homo Sapiens
ttttttcacagtcctacacataatttatggtattcagaacatcactttataaactgttgccaaattaccacttaaacactaatatccaaatacagaatttagaaaattattttaaattttaactctaccatccccccgagctctcggctatgaatttagtctgggaagagggctccgtaataggccactgaggtcctctgtcccaccacatcatcctcccccgaaaactagctgcccgactgctctaccagacttgggctagaatttggcttcacggtggcaatgggaccacctgggccctacagtgtggcaaaatcaacttgcccacaaaccccatcccaggtgctgggatgctaacacactgaagctgaaagaccacacttggttttgccacagatcaagctgcatctgactagacagcctgttctctaccctatttcctgcagaagtctttttctttgtaatgcaacaagtgctacacagctcagatccaacgggacacggggaaagaggctgtagtgcacctagccctgctgagggagacccttgccttgccaaagcactttgctcacaaaggcagtttcaaagagtatagcccgaactcattcctggtaaaacaaaaggaaaacatttttgataaatgtacccaaaagtctcaaaagggctacgctggtcttctgaacggaaaccaaatgaggtctccccaggctcatgtcatgagtctcagggaaggtgtgtcctagaccgtggccttgggcctgcccaggccgaggctgccgtcactgcagatcctgcaggttgatagtgcttcctgggaactgggtggcctccggtccagcagggcctccagatgaggggagcacctcctggaggacgtagacgggcaggtccacagtgaggaaggggaggaaggtggctgggccgcgggccgagggcaggacaccttcgccggaggggtcatcctgcaccagctggacctggacgccctgcgccccgcact

SEQ ID NO: 160274 - DNA, 1000 bp, Homo Sapiens
ttttttttttttttttttttttttttttttactttttttttttttttttttttttttttttttttagagaaaattcacagcattttattcaagttaatcaatttcattcaataatctgccatattgttcccagcaccactattactgttattatttctctttgaggaagaccaggtattaagaaatctggtttgaatttccatgatgcctaactctatggttaaaaatccttttccttaccaaaaaggaacttcttaatcaccagagaaacagagggaagactgagatatgtttgcagaaatttatctctactagagacaattcatagttcataatctttcagggttgtgctttacttgggggctccgttttcgggagcgggttgtttcccataaatgtttgcttaatacaaataatttgccccactgtaccacagaagggaaatgagggctagtgtccccagaaagcaagcaggcagtcctccagggaagaagccctaatggctcctagtggtgacagagtcattctgcctccccagcctgtgagcaataataaagtataactaagtgaacaggagaggtaataactagccagataacccatgggctagaatctctaaacagaaatgcttgtgttttgaataaatcagagctggaaagacacacttttggagaagtgattgagaatagaaaggtatgaaaaagataaaggtttctcaccaacgaaaccacaaaaaaggtggtaccagtcaaaggtagacttgggcttttattttggggtgagggtaccccaaatgggttgtgccattttcacataaaaattggaatgataatgaacaagtgaaagtgaaatcagtttccctcctttgttcaataaacatggttagagcacctgtgtgcaagatagtgggacaggtgctgaggggaaaggtaaagctgtttaagctgtggccctgagctgaaggagcaatctagcagtgccatcaggccctgcacactgc

SEQ ID NO: 160275 - DNA, 1000 bp, Homo Sapiens
ttttttttttttttttttttttcggccttttgtatttttatttttgttcatctgctgctgtttacattctggggggttagggggagtccccctccctccctttcccccccaagcacagaggggagaggggccagggaagtggatgtctcctcccctcccaccccaccctgttgtagcccctcctaccccctccccatccaggggctgtgtattattgtgagcgaataaacagagagacgctaacagccccatgtctgtgtccatcacccactgctaggtagtcaaagaagtggggtgagggcatgcagagtgtgggtggccaggcttcgcagcccatgggtgggactctggggagacagcagcagcagcagccgccgaagccccagctgcaaggccaccagacgcactcctgtgcctggttcctcagtccccaacaccaggtagcaagctctgggcagctgggcctggtagacctcatcttctgtcttctctggtggccctggctctggtgggaagtgcgtggaggtgaccagggtatagaagtttcggaggaggcgccggcgctgttctggtgaaggctctttatcccccaagggctccacggtgaagaggcagcgcttcagttccaggtggaggagcagcagcccgaggatgtctgtgtgaagggggaagccactgggcagcgcccggggtcccaacggcagacaggcccgcaacgggtccagcagtggctgccaccagcgctccagaagctgtggatacaactggctgaggggtgggctcggcccgcagagtagacacagctccaggctcggcagcagagtcagggtcaggagccggtgtgggaccgtggggctcccgtgcggcaggtacaccgggtagtcgcgagcggtctgcggcggcagggaccccaccagccaggggagcagcacggcctcgggcgtccccagccgccaccaaccctctgttgctgccaccacccggccggacaccaccagac

SEQ ID NO: 160276 - DNA, 1000 bp, Homo Sapiens
ttttttttttttttttatgatctaataaactttattttttaaaaatgaccatttttccattttctttctaggaaattaaacccttttaattcttatctaccttctacataatggttattgaatactccacaatatattaagtctagatgttatggtacatgcatacactttcaggctgttttatacccactgtcaccaatacacataaatgggggaggaaaagctatgaaactgtatagggctgtatatatacttgtctcagcttaatgcaggaaattggtttaatttccagcagttttgtctaaactgttcaaaaaaaaactatgaacagagttcaaatacaggactgtttgttttgaagagactttctaaagtgtacttaaaacatagtagttttttacctttcacaaaactgagttacaagaatacttttgttttacagtgcatcccttcctaggaagtctcattaaaacactcactttttctaggggtgattttgaatgctgcacagggaagggaaggaaataatagtcttaacttttcttaaaggataccagaaacattgctggatataatttaagattagtgttttctctttcatagaaagaacgtacatactgggacatgagtacagttacagcaagtctaggtgtgctaacaaaacagggcacattcaagtacagtaagattttgcttgaaattaaaaacaaactacatgagattaaagcattaaaatcatatttctcaatctgaatacatgttaaaaaaaaaaaatcaaaaggaacgcagaagtgctagctcacatttttaccatattacaaaagcaattggtacccatgtccataaaggcagcaacaaagctgcttgtctattgaagattactactgcaaattggactgcattcaatgctagttgtaaaaacaccagcttttcagaagttggtatctgtacaaaattgcagcttattttcttcacttctgtcccttcaagtctttacaca

SEQ ID NO: 160277 - DNA, 1000 bp, Homo Sapiens
aattggcgaaaggaaggaataaagatcatgtgggtagaattagagggaggaagggaaatgtggttggtgttgaaatactccaccggtaaactaagataactgtgtttgaaactttggctatctcataggtgtattctagttaaacaaaagtgcaatactgcaaagggaagatactaaatatgtaatatatcattttcatgatgaagaattactacccacttctcctggatgggcattatagagactattgctaagacattgcataaaggactatcaattcaaagtactattttgggaaaatacaaaatcaatacaatcccaatggaacttatataattttgtaaatacatataacactgtctctctaataaggggttattttacatacagaaacataatttactggtaaaggtcttggaaaacctgatacaattgactaactcatgacaaagcaacagttttatcaaaacatactgaaagtattttttctgtaggagagaactgggacactttttccccctaaatttatgcccttgcagactttactactaacttatttgagtaccagaaaaatgctaacatatatctctccttagaatgtcaatatttttatgtccaattcagtactaattgttttaaatatatataaaggtgaacctggacctctaccttgtcagaataatagcagctttagcaggagaaattgtatcacaaatcaaatatcagacaaattttacatggtaaaggagtctatgaaattgaacagaagcctcaggcttcacttttgtggtttacaggtataacttgtacatctttttgagattattcaaagtgcattttcaaaacgggcaactcagtatatttaatataaactgataacccaacactgattctgggcaacatttagtctgcttacacctagaaactcaaaatgaatttagactatctgcatattactttaccactattatctgttaattctggaatatttccatgacat

SEQ ID NO: 160278 - DNA, 1000 bp, Homo Sapiens
gaaaatctattttattacagaaagatcagtttctaacaaatgaaaatgtatcacctgttccttaactgtgtaaataataattaaatttctttgaaactggaatctgcaggtacaggtattctttaatcattattggatcatctaaagtagaagctgtcctgaggaagaggaagcttttgatcttaatactagtatctatataaaatggtgtggatgaacaatcatctaaaatcaatctattttaaataggaatttcctcctgaaaagtttcttacttgctacctactacccacaaaggactgatatggtacagtaccgggattgttcaactttagcaaagatctccaatgcattcttcttctcatcacatctgtcagaatctgctaacagtacaagaaaacagacacctatgaaatcatctaacctgctagcatgtcctttagacagcaacctgtctgagggtccttcagaagcacatttacaatttcataaaacttgtgttcgtatgccaacttgtaatacaggtaaacatcttcacaatatgtgagtaatttcttcaggttttccatgaccatgtcagtaggctgatgttgtttatattttttggaaatctcttcaaatatactggactttaataacctttgctgcttaaattcttccaagtaattaaagtctcctttaagaatcacttgctggtataaaatttcagcccaatctggaacaaaatcgtaggcctcagccacaatagaagcctggtagaaccgaggtagggccagaatacagtccatcagcttgtggcggcccaagttgatgagcattgtgttctggccagtgttcagaaagtgaatctgcagagttatcaacttggtgagccgctgacagtgctgggcctgtcgcacacaggagtccttggcataactctctgctgcatccaacatcagagtcagggccttcagcagcagttgtttcagctggtgcccatccttgaggctgtcctccc

SEQ ID NO: 160279 - DNA, 1000 bp, Homo Sapiens
tttttttttttttttttttttggcaggtttagaaaataaagtttgttgggatcttaaacattttggataaaactaacaaaaaaatatgaacacacattcaggttgtggtgctatgaggagtagcgtcatcttatttagttccttgagatacacgcacggctgctcggtgatcggtgccgccctgggaaaggttggtcaggaggtgacaggggtctccaggaggagctcgggaggtgacaagggtctccaggagggagcaggggctgctcggccaggctgccctggagcttgaggataaggtcaaggttggtatgtgttgctccgacttgagaatgaattaggtgtgtgactgtgtggcatcgtgaacatcagtagtgacgcagccgtggcctgggctttgcctgcagcgcacttaggttacacggagcgggatcagaagcaagcgattcggcacacaggcgcttggccacagcaattaggaaatacatattctgcggcagggacacgatcatattttggtgtgaagaagagggcaagagaagcagaaggagaatgggtcggtaggtgtgaaaagtgtttggcatgcatgggattaaacagaaaaggtgtggctgagatttcccagtggtgctcacagtgcatggacagcgcggggtggggcacggcgggcttcacacagttctgtccgtccctgagtgcttcctcaccaccttgcctccgttcacctggtcgaccgccagggtcttcacctcgggctgggcctgcggcggggtggcgtggtggatccgatgtgccaccccgacgtgggccttgtgcggcttttcgcgggccgggctgtgctgctcgccgcttcggtcggaggcgatgggggggatgacgaggggcctctctttgatgaggtggacctcggcggactccctagccagcagaaatggggtggggtcgggcatagcatccactggttcccgcaaaaggagtttcctgctctctgccccgaatc

SEQ ID NO: 160280 - DNA, 1000 bp, Homo Sapiens
accagaacatcacataagtttatttcagatgtaacagcaatgttaaaattgacaagtttaattcttaactgcaccaagtaaacttagccatttaagtatttttttaagttattccctccaaaaaactgagggagcttttcttttccaccaccacaccatggtttcccaatagttctctttttggaggacttttcaattgatgagtaaactgctttagatatttcagaacttcattccccaaatgaaagctaatctggacaaactatatattgcatagatttctctacagattctttgctttaaaacctaaatgcaactaacatagtgtaattttaacctatttgccccacagtaaaaactatctgtcctgaaaaatatgatggatatatcctgtgattttccagttaacagaattgttctacttcaaagataattattatcatatatcaaaataaccagctcaacataggacattacttcagtctttactgactcataggcatatgaacttgtgcccagctttttacctcttccacattctcctcctcctccataagtggatggaattatttaactaagtttgatgtaggacaattaaccctttacaaacatttacaattcaggttaagtcactgactaccgtggaaaaagaaactctatatataatgatagggagcctacacactcaattcaaaatttaatattttttcctccttaaataacatgtacttgtcatgaggcagctattaggttttcaataaccacatttagggatacattcataggactggttagatagtccaggtgaaatggttatagaaatagaggcagtgtcatctcagaaaaccatttatatatcaaagtctattttgatatctgggaagtttacaaaaaggctgctgcattcttcaaactacttatgccttctgtaactcaagcactcttctcttgccaagagcaagctgaagcttattcatgaagataaaggtgcttaacgcta

SEQ ID NO: 160281 - DNA, 1000 bp, Homo Sapiens
caggcacctccaaacatattttctttatttcctccagagaacaggctttagtactgaggtccttgtaaacatttaacaaaactggtttaagaacaaactaaaagcatctatatccttgccctgtgttgctggggtgagtttatacaaggagaagttggaacaaatgcagtgggcacaatgaccttcttactcagttcaaagtaggtcttgggatgagagttccacacggccagtacagctgactttctgtgatttccaaggggtgcccaagacattaaacgccatggtccttgggaaggactgatgatgtttctgctcattgttgatcagggtcaaaccttttcactaaccgggactgctctttccaagaagtcagaggtcagaaagctggtagcgtcgtacaagaccgtctcgacagcatgtgtagatctgcttctcccatgtggctaccttgtacacagggtcacagtcagccccagtgagctcagtgacatagtctaagtcttgctggacaataaaacagcttccatcaccttggctagcaatgaatccatctctgacacttagcagggatagaactggtgctcctgatctgtggatgacttgtaccggagcccttggactcctcacatccagctgataaatgtttccatcttgagtcccagccaatagcaagaagccagagagaaaagtacagcagttgaaagcgtctgagccaataaagaggaacaccagctgcctgctctgtagtcccaagcactgaagtttcttatcttcccgggccaagagcagcattttggcctctgttccaacctcccgttcactgggcatctgctcaggggagccaaggtttatggagttgtcagcagcacccaccgccactccattgatagaagaaccacaatctgcaaggactcccaagcaggctgagcgcccacaatcccaaagtcgtgctgtcccatctcgagaagcagacaccacattcctcccccgatcaacg

SEQ ID NO: 160282 - DNA, 1000 bp, Homo Sapiens
tttttttttttttttttttgaaaaataaatgattttattgcagggccaatgataggtagtcacaagggcatgaaatggcagatctcttgtctgaagcagagaaggcacactggcagactccatgtgtgtcaaacgctgtgcatgaatcaggtttttagaaggaaggtaggagaggaaaactactcactagcagaactgaactgctgtaaaataggttaaattctttgaaaagtgaaaaatgatagtagcaaaatcatgaagttgtatctgaaccagagccgtgatgtaaccaagtaagatggaagtttccatccagaggagttaattccgaacaagtcacagaaaggtgagagctgccggttccggcacgctgtcttctggaatgccagtgaccgggcaagaaatttgattctttcctttgattctcttgggaaagaacacatttcccaagcccctggagacccacagggtttggcactgtccgtgaggctgtgctcctgaggacggacgttcaggaggccgtggaggagcagcgctgcaggagcagggtgtggcagctgtcgcacactcgcaccggcttggggtaggagggcagggccagctcgttgctggagcaggtgttgcagaagatgtggccacagttccggcagtggtgctttctccgggaaatggagaactccttctcacactgcctacagtgtgtcgcttcgtcatctttcagccaggcgtggcccttcagtgcctggttcacttcttttatatcttccatcttcagcttggactggctgaggtgcaggcccatttcctggagggcttgttcctgctcctcgcagatcttctgcagctctgccttctcgtcctgaagctcccgcaactcctttttcagtccttccacttgttgcagctccattctgagtagagaggaagtgtctttctcgtgctgtaattcgcgctgaagagcctgtctttgctctttttctgatttcaattctttctccag

SEQ ID NO: 160283 - DNA, 1000 bp, Homo Sapiens
ttttttttttttttttgaagaacacaatcttttgaaacatttaatcagtccatagcaaatagttattacataccaaaagctctaagtgttaactagttccaccacaatgccatgtaaatcttgacaatttagaaatcttgagatcaacacttaagttcttttcttgatctctacagcttggtttgtaagtacatacatgcttttgtggatctattcccctcgccacacacacacattttcaaggagccaataacatttttttccatctgtgcctaaaaatgttacaattcagttctagcacattgaccctgataatgaaaatgtttaagttaaagatggggacacaatttcaatcttataaaaatataccagtattaaccaaaccttaaactcagagggcacttcacatgtgcacgagactttcagtaaaaatgacaagatcctagaacagctgtttccaggactttttaatgaatcaagtactctctctctcacacacacacagaacacacacacacatttttatactattggttttgttaaatccaggctatctggattaagtagataggggatgggtttttatagtttttatttttgtaactatagggcagctactataacaatagcttaacaacactgaaaaatttcaattaagttcaccctgtttttagaaagtgtctaagtgtaaatgcaaattcacctcttcttaagttagcagtttatattaaatcagatatggtttctgaaatggaagtaatgtgttggagggcaacccaaaaggacagttgcgaaattatgaatgagaaattaaagtaaaaccaaatcaaaatatttatacattttagagatgggacaaaaaggatattaagaaaaatgtcttctttcctccccattcaaaagcagccattcttctactgtgaaagaaactgacatggatattttccctttcaagagatgtatgatatatttacccactgtgaggcagaggtgatagggt

SEQ ID NO: 160284 - DNA, 1000 bp, Homo Sapiens
ttttttttttttttttttttttgaaggttcacggacagacagggtcgtttgtcacagcagagaagcacctcacggctcctacccgcactcatcgcggacagtgcctgcagcgggagcggcgcgagcaccctccccagatgaaaacaccagcaccaggaggtgggccgtagcccaggctgagggaggaggctgggggctggggctcagggcccccccccgggccacagcgccaccctgagtggccctgaaaatagtgcacagtgctgggtactgccccggccggaggcacctagttgttgagcattccggccacaggccacccgctggcccttccttggtgtggcacgagaccacgggcacttgcaggagctccctgcatgctgttttgtgctttggtctcagggagcaccctcctacctcggggtcccagagtgggcagccgggcaggtgtgaacagtgtgacaagggtaccgtggggcacctggtagtgccacccagaggggcagccggtgctcctggtggtgtggcagcaacagttacaaactcaccccaagtccaaaccccagaaatcctgtttctctggccctccgggtccagaatgccctgcactgcctcctggcctcaggggctgctgcggtggtgggaaggctgcccagcagtgaggaaggcgagtgcaggggctgcggccgcggtcagagaaggagagacaccagcagaggacgcgaagctggaccggccaggttcagagcccgcctcggttgctcccaatcagaatctgctttgtgctccacggcctccaagcactttcatgagcgttctgctcctacgtggccaggtcctaccttccctgacggctctggccaggccagctcggtttccctctaacccatgaggcctgggggggctgtgacagaggctggaagcgtggccagagcccaggggcaggcccgcctggtcacagcaggatgaggctggggtggcgcagctgccggtacacctg

SEQ ID NO: 160285 - DNA, 1000 bp, Homo Sapiens
tttttagcaacttgagtctggagattttttttttaatcctttttagttcaacataaaatgagaaagaaaaaaatatttctgacattttcaaagaacagaaataggaaagtatgttcatatacattcaacgtatactgcacatattggttactacaatacaaagcaatgagttttttttaaagtgtagtttgcaagatggcacggttagtaggctcactggctttcatctgttgttgctggagggtgcagtctgctctcccatacatacagtaccatgtaaacacatcaggctgagcgcgtggtggtggtagggcaggttgggggcataagagttggaacaagcgcagataagtcaacagctttttagggctttcttggtaagcccccttctggtgagtagttggtgaccccaccaagtggaggggagactggggaccatggaaacatgggacagctcccacgaagggctcttgcactgcagaattccactcaagggatcttgggtccaggagccgagctgccagtatcagtggagaaggacaaggtgcatggggatcccgccagcaacatcaggatggccatgccgggcacccgctttcctctgtgcaaattcaggatgaaagactaggaggggactcgggacctcttgctctcctttcccagaaaaaaaaagggtggaagagtcagtgtattcaaggtctctctcttgttttgaagatcagaaggagataacccagaccctctctcagccccagccagcagagaagactttggtttctaacaatgaagagaaataaagataacacaaataatagctactgcgtatgcactgcttcaactggggaaaggagaccactgcatctgtcactggcacaagtaagagctgttcacaattacaatgcctaaaggaaatactttgaacaaaaggtgcaagtcacaattcaaatagaacagaatctggttaaacatttctcatttaaacaaaaattccttttctctt

SEQ ID NO: 160286 - DNA, 1000 bp, Homo Sapiens
aaaaaaattaaataaagttctcattatttccccaatatacatcaaatgagttttcatgcaaagcagcagtcacagaggcagaactgtccccagctcgtgcctctcggcttgaagaaccaccttctcccggccccgggttctctggtgttctcactgaggatggacgacgcccactgtctctcccagctggaactggctatgacgaaacttggctggcgtagggagaggagtcctcccctctccccaggatggggtctcaggggacagcaagctctggggcctgatccccatcacttgtccttccatctgagactcccagtgtgacagcttggacaggtccctcttcccaggaatgcgaggctcctcctctcagctctcaatggacatggcattaatgagctgctccaccttataagccagccgctgccgccgtgcctgctcatcctgctctagggccccgatgagctcctcactatacttgctgacataggagtagatctcattgagggcactcagcatgttgaactccacggcgtgcaggcgggactgctcggcgaggtaggcattcatgtcctggtcactgatggctgggagcttggcgatgtctgcgtagtatctctccacccagctcttgtagctggggatgtccttggcatagagcagcttgttggagggggagtccttgcccagccggtgctctgacgttgaacaagagtccatgaaggtctgggccaccacagagaggcaggcgtccgtgatgctgcccttgtggatgtcaaacacgaactgggggttcttaatcacgttcacccagaagcgcagagggaggcagttgcttttccaggtgtgccgcacatctgtgtcatggatgctgtgcctgtctgcctgctcatctaggaaatcaaacatgtacttgatggccagggggagagcgctgccccggtgcacagtgctgaacaaggtctcaaacaagtcgtccacaaacttctgcagggtgccc

SEQ ID NO: 160287 - DNA, 1000 bp, Homo Sapiens
tactgaagcaagagttttttcctcttttattaagtccgctatactaactagaaggagaatctgtggttttcgcctggtagaccacagggccaatcaccacagcttcttgtagagaacatggagagtgccaagatcaccatcaggtgccgcttccttcctgtggctttccatcttccagtcagcctggtcttttgccttgaagggccccaaaacaacagccctggctatcatcttcatcccaaaagcggagaagatgggcaggcaagaacacggagggtgtcacagagaggttcccatcaggttcacagggcgcccgctgtacctcttggagatgtcagcttcaatcagcttctgcagctccttggtcttctccagtagcaggtccagcttaggctccagagccgcctgctcctcaagtgcctcctgctgcttctgcaccatcagctctttcttcaaagccagcagctgggactgcttcagcttttgctggaggaattcagtcactcggtccacataccttggtgaggccaggatcataaacaggtgttgcagctgaagactggtaagcttgccaatcagatcctccagcactgacaccatggtaaccatcttctctttggtctggccctgcaggatggctggagccagctggaactggctcacagacaggacatctgcctcctcactcaactccactgctctctgggctaagaagatctcaagctccatgagctcatcaaggaactgattccgggtctcagtgtattcaagcagtgtcagggcatctgggcccctggcaacaccttctggagcctgggttcctgcttccagcactgtgatctgcaaagcaacagcatcgtctccccagtctatcccatcacctccaggatcctttgaatctgattccgggaagatgccccagtcgattccagcagcctcggcagagatgccagagtcagtcccctcagacactgcctctaccccaaagtcgccccagtca

SEQ ID NO: 160288 - DNA, 1000 bp, Homo Sapiens
ttttttttttttttttttttttagaaaggcagatgatttctttattgtaaagacagcagttacaaaagagaataaatatgacattaggatatatttgttaaaaatacaacaaaaacccctagtatttgtgagcaaccccaataactcacaagtatgggggataagaacatctacagctggataccctgaaacagatgttagaaactggctaatggtgagtatggccatgactttggggatgtttgaaaggccctggatctgtcacttgggaacgtcagcggtctactgtaatacaatttgcacagagtcagagtgaacaggaacccttttactcattggtatcctaactattctttcgttcttacagtgaagtagtacagtatttaagagtggggaaaaggctgagctgggaagacatagacggagcaaggtgaagagggagggactgggggaatgctaaggggccaggagaaaggtggcaggaaggagcagacctctgtcctttctctaatgtgtgttactgtggtggcatgctgttcctcctgttgaagagtggacgggcagtggtccacccagcctccattaagacccaccattacccaggaacagaagatgcaaaagcaactggcagaatcctaccaaagatgagaacagggaagttgaatgtgaagcagagaggagtgcagagaattctccgagaaaatgggcattttctctgaggacccaaaaagacagacatatctacacaaattgatatagcagactactctttgatggggaatggtaaagggacaaggacaaagtgaaggttgctgagaagatacaagttctggctataagaagggcagaggagcagaggcaggagacagaggtgggcaggcatctggcccaccccaggaccctcctggaggggcttggacactgggaggaatgaaggctggcacgggagctggcacggggtggtggatggagatgctggctcagggaggggaccgacagc

SEQ ID NO: 160289 - DNA, 1000 bp, Homo Sapiens
gagtttccaaaattagaatttatttcagtttctaaggaatgaatccccgagtgtggcaggaaggacacagccggctcctgacgcacacctgatttgattcaacaccgagtcggcacagacacaaccagagatggcctgggtccaggctggggctgcacgggctgtgtcctggacagccaggagggaggccccgcacacagacggccgccgggcagggggcctgagcgggacaggcctggccacagcccatgtccttggccttccacataggtgcacacattgtctgcccagagagggccaagatgccccaggcaccccttcgctccgggggctcaggacacaggctcccagctgaggccacgcctggacccagagctgatgtttggctgcacgcgagcccactcgggacagacccaagaacacgaattctctccctttggatttaaggctggtgttttttgacatttacttcagtttttctctctgaaattaaaattacctgagtaaaagattttaagacattaaaaaagccaaaaacacagaatccctgcaggcagacggtgccagggaggtggcggccagggccaggatgccaggggcacggtggggtcggctggagctccagggctgggcctttcccagtctcgcctgccctggagcccccaggagccgcccctgggccgacgctcctgtggccggagcacaggaaggcacagtgaggtagggacagtggccattgtcccccgcctgccaccagggctgagagggcagcgcacgcctcggcccctcctataagcccctgccccctcggagctgggtgtcttgtccagaagctggggaacggcccctgcagtgtgggaggggaggggctgccgggaggcctgagctcagacagttaaataatcctttatttgggtgggctgggggaggggtgactggcccaggagggcaggcgaggccgggcccagacccccatggggggtggcaggggcctcgggcg

SEQ ID NO: 160290 - DNA, 1000 bp, Homo Sapiens
tttttttttttttttttttttttttttttttttttttttttttttttttttttttttttttttttttttttttttcagattcattactgcagaatgtaatgaatgttagcgtatcactgctcccactatatccttttatgtcaaaaaaaaaaagtaaacaccacataaaatataaacataccccaaacagaagtcagcatcaacctaaggatcctactgtaagattactatactaacccaggacagttccatcgtcttctgacctatttacaaaaaaatcctcattctgagagctctggaaacattacaaatattgtattagattcctcttcttgaggtagttcaaagtcttaaaacagagcaaatttacatacttttctacacaccaccgcggggtaattatcataaggcctacgactaaaactcccatctcctgattctcaggctactatactcttttccttcggatcaaactacaggaaacacacataaaaagatgaaaagtcatgcaaaaatttaaaacaagcaaagccaccataaaaaagaatctgtgtcatcatattcacagtctaaactttgctaaagacaaaaaaaaaatacttacttggtttatccaagctacagacatgttataaagtactcaagaaattaacagcttataaaaatagtggaaaatttttcaatgggagcataaaactaaaatgaactcattatctggcaaagagttcttccaaaatgtcaagtccacaggaaggaatgtgtggccaacctcacgcatcagcccactcataggccaactgcctctgccctttgctcacgttggcttcagaggtgcagggatgttggcagatgcctgctccaggtaggccaaggagccctgagggatgtcggcgggctttttgtgctgcacgttgatgtcctccagcacctgctgccaatgcctcagctttgtcaagtgcttctggactagtgcatctttccgctgtaattcattccttag

SEQ ID NO: 160291 - DNA, 1000 bp, Homo Sapiens
gagcattgctgtcaagtccccacagctgccacagaaacgcatgtgctgctttccatcatcccttgcattcaaaatgctactgatgcatagcacctaatcaagtccccaggctgcagttccactcggaggaagctacgtcacctccatcgctactgtgttgtctgctatgttgttcagtgctggcttttctgattcatgattttcccttggaactgaatctacagaggatgaagatgggaccttggaaacttgacagtttgctgcagcggccagctttaaggcagatgatggaacagcacttaaagtcctaggtatatgtcgtgcatttattggggcaatagagtttacagtggcaactgatgaaggtacagttaatcgaatgttgttcccaatcagaacctgagttgttgcagaattggcagcagttacttgatgactcagtgcactgtgggaacttgaagtctgtgtaatatttgaaggctgtaacaaagctgaacctgccgttgatggacttgtatgtacaagtgctgttggtgtagtactactgaggtgtaagcccttgtatactcctgaggctggaaggacgccattcaccccgattccaagcaccacatcatccttcatcttgaatcccatcagttgttctgatgtcaccaaagcagaagcagcaaactgtgcactagcagaatccaaagtcttagaaacaaaaccctgtagtgttctttctaaaccctgtatattcaggcgaaagccacttttctgctggttagatgcaaggttctgtgatgtgttggtggaggaattactatttgcttgctgttgctgaatttgtgcaagctgctgtttctgcatgagtgccagttgctgttgatgttgctggtattgttcggctgtaaatgcaaagtgtgctgaaccactgctacttttactttgcgtagaggtactgcatgtctgggtcccaggttgtgctgttcctgttcggtttatactcctatataat

SEQ ID NO: 160292 - DNA, 1000 bp, Homo Sapiens
ttttttttttttttttttttccattatacagtgtttaattgtagggttttggcactttcatgtataattattatacaattatcatcatacaaatttttatacaattatcatcatacaacttatgattatcttaaatgactagattttatctttttgagctgggtttgggttcatagtgcagagttctctcgctctggtcagttaaacccatttgtttttggccttgtgtcattttattttatttattcatctttaatttcaacctatataatacaaggtacatatacaggtttgttacatgggtagaatttgagaagctgaggcttggtgtcccaatgatcccatcgcccagacagtaagcatgatacccaacaggtgtgtttttcagcccaggtgcccctcttctctccccggtctggtgatctccagcatctgtggttcatgcgaatttaatgtttagctgccactttccaatgggaagatgcagtatgtggttttctgttcttgcattaggttgcttaggataatagcctctagttgcatccatgttgctgaaaaggacatgattttcttgtgtttcatggctgcatagttttccatcgtatctatgtaccacattttttttcattgaatttactgttgttgggcacttagattgattctctgtccttgctggtgagaatagcactgtaatgaacatattggtgcaggtgtctttttgataaaatgaattcttttcctgtgggtatatcccgagtagtgggattgcgggattgaatggtagttctattttaagttcttggagaaatctccaaactgctttccatagtggctgaacaagtttgctttcccaccaacagtgtctgtttcttttgctctgcagcctcaccaccatctctgactttgtgactggtaagagatggtaactcattgcagttttgatttgcacttatctgatgattagtgatactgagcattttttcatgtttgttggccaatt

SEQ ID NO: 160293 - DNA, 1000 bp, Homo Sapiens
cctcttcataaaaaaatatttattagtttgaacatcgatttaaaaaaaaatcagtcacataaaaaaaacccttcatgacatgtcttttccctccacgcctcctgagatggacgtgctcacctgggcctcggaaatcccacactcttcagtcggcaaactgcgaacaagaacaggaaatctgccacgcagcaaacacttggggaggtcagtgggacactgttggttttagggaagaaaatgcccctgtagctccggcggggaaccccaaaacggtcagcaaaggcaggccacacggagtgagccggccagatggagcaggacatcctgagtgtggagggggaggcgggcctgggtcctgggcagggtggcctgagagcagggactggtacaaaacccagagacattggtgggtagcaaaggtctggtttccaaatgcattttgtaagaaagtcagtctgtttagaaaaagggtttaaaaatcaggggaaaggtacaaagttctgagaattctcaaagaggccggggtggggctggcctggggtgagggctggagggctccgctgcagctccctggtagccatgctctccccctgggggactcgtgccagagccacccaccttgctcggtaagagtgggcagggctcaccgctgaggggccagcgcttggcccggctcctatccccacactccgtgtgcagaaaaatcttggcctctttctccagctttgaggagcccacagcctccgagctgaggggtgtgtgtgatgacagctccagccagggcaccctgtcattggtagaaccgggggccaatgtcaaaaaacaaaagccgtgactcctgcgctgtacctggagtcctccatgtactcctccacaggacccccggccagccccagccctccccgagcagcagcggtcagggaagctggtgctctacctgacaatgtggggaaaagcctggtatacaggctagaaaaagagagtaaaaactctttccacg

SEQ ID NO: 160294 - DNA, 1000 bp, Homo Sapiens
ttttttttttttttttttctgaacatttatttatttattatttatttttgagacagggtctcactctgtcacctaggctggagtacattggcacaatcacggctcaccgcagccttgacctcctggccttaggtgatcctcccacctcagcctcctgagtagctaggactacaggcatgcgtcaccacatctggctaattttttttttgagacagagttttgctctcgttgcccaagcttgagtgtaatggcatggtcttggctcactgcactcagctcacctctgctcccaagttcaagcgattctcctgcctcagcctctcaagtagctgagattacaggcacccgccaccatatccggctagtttttttgtatttttagtagagattgggttccaccatgttggccaggctggtctcaaacacctgacttcaggtgatccacctatctcggcctcccaaaatgccgggattacaggtgtgaaccaccgtgcccggcctactttttgtattttttgtagagatggggttttgccatgttgcccaggctggtctcaaactcctgggctcaagcgatccatcagctttggcttcccaaagtgctaggattacaggcatgagccaccacacctagcttgtttattcttttaaaactgcctattttgccatgaaataggtacccttgctgtgaaagcctgtgaacacccctggatgtgtgtaccttcatttaaaaactgccttagagggcatgaaatgtcatcagggaagatctattccgagctgggtgtgagctctagccctctccctgaccatcggtttgctctggggtatgaggttctgagtgtgaggcgcccactggggcctggcgtcagggccgacttgcttctcttaggctctgcgttcaggggctacctcttccaaagactacacagctgcaggcccagcctcagagcagaggtgatatgggtattaccaggctctaatggaaagtgtgctctct

SEQ ID NO: 160295 - DNA, 1000 bp, Homo Sapiens
tttttttttttttttttttttttttttttttttttttgcccctttatgtatttatttatcaaaacactcgcaaacctgacctcactcaccaacacacacacacacaaccaggacacatgtgccaggccttatgaaaggctatcaagtactttgaaggacaggaaggaatgaacacacccaggtggacgtttggtttcatttgcaggggttcagggagggttgcaggggttcagggagggctcttgtcccacaaccggggaagggagagggcagagcaaggcaataaatagaaccctgggcccagcctgctttggtacattgtgggtgcatccctgcatgtggccttggcagcatctgctcccggcccttaaccatcagcaggagtcaggagggtggggcccaggcagctggtgcaggcaggccagatgtgcagcccaaggtccctccaaatagccctggagccctgcagggcacgaggtaagaagggggcagatgcagcagaccctagctgtccacgtctgagggcacagtctttttcctcgtccgaaccttcagggagcgcgaggtgccctcccgcaccggtggcttcctcttgaccacacgcaggctctggctgcggattaggggcttctctcggggccgggctggcgcccgggggactgcctcagtatctgaccaacactcatcctcggtgtcgctgtcctgcaggcccccggcccggtacccaatgggtggcctccggtgggacacctggtcctccaggtagagggggtcatggtaggcaggggcaggtgcgtcagagatggagcgcaggtcctgcatggagaagctccgcagcctgccggccagcgccccctgactcttggtggcagcctgcacagcagcggaggcggcaatgttgaggccccgcttcccgaagctgagcacggtctcgtagctgcgctccttggcctgcacgatgtacgcgtcgatctccttctcatggcgggacagggacggg

SEQ ID NO: 160296 - DNA, 1000 bp, Homo Sapiens
tttttttttttttttttttttttttttttttttacaagtgaacagttttattaagaattaaatgagggtatggaatttgatacagtacaagtaagacactgaagatgggtataatagtactactggcacaaaaagttaaatttcacttcaaaaaaaaaaatcccaaaacaaaagaaaaagcattcccatcattataaagtaggctattccatgcaacgtactaatactccccctccccccaaaaccccaacttcccaacaaacaaaaagctatctgaaaatgctgccatgctaacatatgaaccacggtatattcattcatggaaaaacacactcattaagcaatggtttagataaaataacacagtttgcagtattgtaaactcatagaccacaatgatttcacatgaaaagcaattccagattcactcatagggtgagtaatatgggctacatagttgagagataatgtaaatataaaccccattaattctctcattatcttctaattataaaacctggaagcttagataatctgaaaaattcatataaaatttggcatactccacttgtgttccaagaaatgactttcggatatttgtaattattagagagctgtataaaaagcacttcaagatcaggatttgacttcttaaataatgatcataatttacatcacagaaacaactccagaaatgcacttactctgattaactcttactcaggacaaggaacatgattttctagcactttatgtacaagttactgcaaagggccagttaatttacagactgaataaaacgtaaaataaaggtgaactggtacagacagtgatggggaatgtcctcattaagtgagtaaagatctttcctcgactttgaagggagctagagtcaacaaataaaagagattgccaagccataatggatgtatgtctctgtaacaagatgcttaagcatgcttcctggaaaagagtgttatattagaaatagggatggcat

SEQ ID NO: 160297 - DNA, 1000 bp, Homo Sapiens
ttttttttttttttttttttatatatatatatatttatttatttttaaaaactccaggggatgtcccaaagttagtaaacagttctgtttcttgtcccttttatggctgcatgcagtttcaattgttcagtacaacagatgaggcatttaaaaggtctccaacgtcaagaaacactaactcatctctggcatatcatattttttaaggcagaagtattttctgtaatggttactacagagtgtttactggttaatttttagttaaccagaaccacacatcccatagataattccatttaactgaggtttatatccgtaagagcattaccatagaaaaatttccctttagcaatttcaagagacctcagccaccaatatacctaccttctttacaatataaagtgaaatattactttagatgaaaattttttgtatcttacttagaaaaaattaagttgatatttaaaagaattttgatttttaatcaccttccacaacgatttgatataccttaaactccactttcattttttataagagaatcactttcaagggaaaaaaatggatgttactatattttaaaatctgctttataaaaaagtgtataaatatcaatctgccagatatacttcctatccccaacacagctgtaacactgactaatggggtcatgaccatgaagcaaattttacttcctaaatagaaatgtgtaggtggcagaaagcgtatttttcagcaggagtgattctgttggatctctttacaatgtcagagcagttgttagaaatgttagtattttattcggtttcttgctgtgaaggattatcacaatgttgaagtgatggctgttcacccagtcgtcatcaccgtcatcatctcaatcttgggaatcatcagcagtgtcccccacacagagagacaggtatagtggtgcagtttagtgacagggaatccagtcttagatcctgtttatatcacatttttgtgaatttacacaaaa

SEQ ID NO: 160298 - DNA, 1000 bp, Homo Sapiens
gttggtgtccccaggcctctccctcgggggcttgggcgcatccccacagcccccaagggatgggggctctgccacggggcccaattccacagctccacggctggcgcccctcccgtgcccatggggcagagccaagtatttccagaggtggcttggaggccctggggtggcggggagaggaacagggagagcatgagacagacccacagggctgaggccaaccctgcttttatttcacaagagcttctcgatggctgacaggagctcgggtttcaggatggagtccggctcggcccccgcggccttgatgtcctccagcacagccatgtcccacgagaaggtcaggagggcagagggcaccagcccgcactcgttcaaggccaggttctcgtcctcggacagcttctgccctcccgaggccagcagctcaaaaggcagccagtcgctctgcagggcctcccggacgaacccgtacaccgcccccagccgctcccgagcgtagaaagtgccctgcaggaggcagccatcggggaggcgcacgcgcagcagcgtgtagttgtacttgcgcagcccccgctgctcctccttctcccgcatggccttggtccgcagcacgctcagccgctccaccgcctcggacctgagcctctgctcccgcttgatctcctctgctgtgaggttgaagaagtccccaggcagttcgaactgcgaggccaggggcgagggctggaagacgcggcgctgcctgtccagcttggcgcgcacgggctccgcagccagcagctgttccttgtgcctctccaggctctggggctgggccaaggtggtctcgctcagcacgtagaactcctcggggtcctcctgatcctgggcgggaagcaacaccttctggaacccaatggcctcaaaaaactcgtgggtcccttccaggcagttaatgcgctcctgaaacaccttgttctgcagcttgatcttccggtacttctcctcctcggggtgc

SEQ ID NO: 160299 - DNA, 1000 bp, Homo Sapiens
ttttttttttaggctgtggaggactttattcattagacccagagagccatgagtgcctcccacgaagtccccactgcagggagccagggtcctagatgccaggccaatgcatgtgccgtgagctggccgaggggtctgctggtcccaagagcgcctctgtgttcttcagacagctccgggtatggtggcctcgccaggtggcttgaactatcttcgctgccatttgctgctgcctcatctgctggcggatcttaaagcccctccaggcggactggatggctgtggccgctttgtcctggcgatgcggctgcctgggactcagggcagccagctggtaggcggaggcccaagacactgccccggggccctcagtgccctggcccatgccctgcaccacacgggtgggctgtgtgcgtccacaggtatgacaggtgcgagggctggagcccactagcatcaccacgctgggcgggctcccgatcctggagctcagggagtggcagacgctgcaagcgtgtgcctggcaggactggaagcagcgatggtcagatactgtcctggctctgccatcctggaaccagcttcggtcagacatgaccccggcccggctgcccagctccacccacgtgacggggtggagcatctgccagtgccgggcttggtcccggcgggtgctgtagccgcgccaggcagactggatggtcgtggtggctctgcagaggtgtgccaggttccgccgcacacggtagccgcgccaagtagcttggatgaccatggccccccggtgccacagccggatcctgcgacgcgccaggtagccacggacgcccgcctggatagtgatcactgcgaggatgcggatctcctctgcagcctgcatggacaccattggctccccggaccgcctgggaggcaccaccgccttgttgcgccaggtgtcccaggacgcagcacccctggctggctcccatgcgcggttccacgattggccaccaaccac

SEQ ID NO: 160300 - DNA, 1000 bp, Homo Sapiens; identical to SEQ ID NO: 158843

SEQ ID NO: 160301 - DNA, 880 bp, Homo Sapiens
tcagactcagacatttattactcaaaatggaaagaggtgagtatgggggatggggtacatatgggagcctggatttggggagtcagctctgtacagtgaggtcatcaggtccttgtgggagccttcactggggacaacacagaagccccatttcaggcccagatcccaatccctcctcaagtaggggacagcagagtataggaagcaaagtggggagcccttctaggagccaatggaggtcctggaaggaagtgggaagggacccagaaaaaggagagtgaagggtgtgaggtgggaaggacggatgaggagaccactcggaacagtgtttaattaaagaaatgggagctagggagagacgattctgtaaagccaggggatacagagacacagggagagaggctcaggccaaggcaggtgggaggaggggcagccaatggaatgagtctcagtgcagcagccagaggccaaggccagccaaggaggtaaggaagacaaggcccagggctggagtgggccggggtcctgcgctgttgcagttgtccttgttgcagcaggtggtgttatatgtcagacccagcttacggttggtttggttgaaggcctcctgacagggctcttctggtgtgccacagcgcagattggagaaaacccacatcttaccaaggtatgcatgtgttgtcaggcattgctgtcctggctccaggcggcaggactgccggtccacacagcccagcacagggaccttgtagcaggagtgacagcgaatgtcagctgagacccagcagagcagaacagacagggtgagcagcataagggctttcatggcgagggtcctgagaatggtggcaaccacagcagctgatagagtagattttca

SEQ ID NO: 160302 - DNA, 1000 bp, Homo Sapiens
ttttttttttttttttttttttttttttaagaattgctctcctttactgagcacctcccatgtggctaagcagcctcctgtcactcaacaccctgcgaccccatacatttactgtccccaatttacagatagggaaactgggcccagagggaccccgaggtcctagaaaggacagaagcggtgccatgccttagctggggtcagctctgacagtctctagagtctgtgctcttgaccactgtgccatcctcccccatcactgggtgtccggggtgtggatggtggtgacgttggaggcagagtccctcagcactccacgccgtagcggtcgaagttgcggagcagcaggccgatctccaggtgcacggtgccaccagcagctgtgtgcaggcgatagcggtcggccccactgtagatggtgtccccatgcagcagctgcggcccaccacccacgaaagcccgtgccaactgttctcgccaactgcccaggggccgccacgtggggcaggccagctggtgggtgcccgggctactgggcacatggcaaaatccatagcctgcaagctggcagcggccaaagctgtcctgggaccacacctggaaatggagccggggccagccttgaagacctttggtggcgaagtgcaggtcgatggggtgggaccagtaagccatgtcccctatctgcggggtgtccacttgcgtttggccctcccgcacgcctgacaggagcttccatgccgcccctgtgtgaatgccccacttgcagaagaggctactttccgagaaaccgctggcccccatgatctgcccgatcacgtgcacctcagccatggcccttagcgcacttaacggttaggagaggagaaagcggcaaccggggttgtagttcatgggcttgactgcttcttttctccgcgggcgccgaccaggcctggctcgcgcctctcccaggacccgcctggctgcgagatatgtaagccgcgatacttccgcgacc

SEQ ID NO: 160303 - DNA, 1000 bp, Homo Sapiens
ttttttttttttttttttttttttttttttttttttttttttttttgaaaaaaaaccgccagtattttattctcatggaaaaacagaacaaacccacaagttggagtcacggagataaaatacagatgaaatggaaaacggtctgttgtcatgaactctcactttcaaataccattttatatggaagttactttactgcggggcaaacagaaggccatgctggagtctcttacttttggaaaatggagaatcaaaaatttgctaatcaacaaacaaaaaaaggagggaaactccttggtaaagctctacaaacataattatacatttatattttaccaataaaagatagctagggtagaaaaaacagatggttagaaactggtgccaaaccaaagtgaaagctttggtgccttctctaaactcctatcctgtttctttagaaaacaccagttttctaaagaaagattactctgaattcaccagggttctatcaccccaattcatccctccctttccacccccaagacacgaaagggccatgtagttttttgtccggcaccacttgggaaggggctgggctcaggggctgggaagagctacctgctgccctagcttgaaagggaggaggtggccacaccattctttgtatttttatcacgcacataaaagaacaaaaatcatttggcagttttaagtttaataggtgcaaacctttacttcaggaattaaaccccttatgataaataaaagaattaaatcagatttttttttaatacagataggggtctcgctatgttgcccaggctggtcttgaactcttggcctcaagcgatgttcccaccttggcctcccaaagtgccaggattacaggcctgagccaccacacctagccctaaatcagaattttttaaaaaaaatttacttaaaagaaaaatggaaaaataaaactttcaacactagactgccgccctgttaagaatgtctaatatgcaatcaaagt

SEQ ID NO: 160304 - DNA, 1000 bp, Homo Sapiens
ttttttttttttttttttaactttctctcttttttttttttttcaaattactagaattttattagccaagggatagcagctggaggagaaataacaaaaaaatacatcttaagaatccttaagtacagtgcatatttacaatttaagtgtcatattttagaaggccactgtccatcagctcagtaaatgtaccagcttctaaagccatgatgccataggtccatttgttgatgaaattcctacccactgtcctcgggcatctgactctggtctctgcactggcatcaagagaacgctgctcggtggtttaaggctaacaccttacagggtaacactgtaacactggccctggagccaggtgcttttctccatgaaaacttccaccttggtagctcagccgacatagacaacacacaaagcgcagctctgcacttctgtccttatcttcacacagtgacatccacaccaggtggccaaacagaagagaaggcagaggcccaccaagagctgatgctgcgcagtccttgggggatcatcctccggtctcactggggacgaacccaggttctggagcctctcccctgacagacagcttgtcaccggcacttatgggtcctctgggatttcagacaatacccaacttctgtaggttcagaaagtgctttcaagcaggcagtggcacccacacccggtgggacacacctcctgggtccgaaaccactccatcatgtggctggtgtggccaccgtgcccacaggtcaggcagaaattggacgatccccgcacagccacgtgacagatggcacactggaacgtgaagcctttgcagatggcacactgcgtgccacggacctcactccggcagtggctgcagtacacgccgaactcgatccctttgtgagggtcaggaggacaggagacaaacttcaacacttcagctcgcttctctctcagaccccaacggtagaggatttccccatagcatttcttaaagtcatca

SEQ ID NO: 160305 - DNA, 1000 bp, Homo Sapiens
cggtgtaatactttattttctattgtattaaacgaaagccaggaaaataccaagttatttaaaggcaaatctttactccttaaagaaaaaatacaaactgtggtatttttaagagatcgttatattttacataatataaacaaaatcactaatgcatctatatgcttggtttccttaaactacaatgaaccacagaatgggtgaaaatgcatttactttttggtggcaaataaacatactggaaaaaacacgtaacacatagcatgcctttttttccttactgtctacacacaggaactgacataaccaagttttaatagccgccacctcctcttccctgtccaaagtagccagttccataggcccccctaccacctcctcgctggaatcccccagatcctctgtagcctccactaggccctctgtagtctcctccagagttgcctctaaagccacctcgggaaactcctctatagcctccaccaacacctgcaccatatcctgcccgaaaggagttggcgctgccaccatagcctccgctaccatagcctccactgctatagccaccgccatagcctccaccactgtaactagaacctccccttctatatccgcttccattgtcgtatcgggccatcttgggaggacgtggaccatctccataccgtgtactgccaatcataaggttgataccagcagctgagggtctagagatctgacggatcatgttcagcatacgttcatttacggggtccaactggctgatgatagcaggttgtttggttacttcaacaaccaaagcctccatggctgcccggagaccagtgatacaggcagcagcttcatgagatatttgcagtttaatccagtcatctacaagcacaatctgcccatcagattggactttcttggaggcaaagagaagcaactgcaggggggtgactaaagtcatgcctttagcagagatggctcgagttcgaatcttttcaccaaatacaaa

SEQ ID NO: 160306 - DNA, 1000 bp, Homo Sapiens
cagatatttctaggctatgtggctcatctgcaaagtttttcaaattgttgcaaatttccaaaaatttttgcaatatatatttttttaaaaatccacttataagtggacccttataattcaaactcttgttcaagggtcaacttatacaatgctggacactcactaaaaacttattagaaaaatgtaatatattatagaaaaaagaagaaaagagatataaaggaaatgaaaagatggagaatttcaacagagaatcggcatccacaaaaaattaccagacaccttagacctgaaaaacacaacatctgaaatttaaaactgaaagaaaacacttattaaaaaaaaatcattataatgatgatgtaaaaggatctagtggaaaaggtggatggcatgcacgagcagatgtggaattccggcagagatgagaacgagaacacggaggtgagaggaaactctggagaggagcaggatgggatctgagaccacgcactccccgagagctcggaggtgagaggaaatgctggagaggagcaggatgggatctgacaccacgcactccccgagaacacggaggtgagaggaaatgctggagatgagcaggatggcatccaagaccacgcactccctgagaacacggaggtgagaggaaactctggagaggagcaggatgggatctgagaccacgcactccccgagaacacggaggtgagaggaaactctggagaggagcaggatgggatctgacaccacgcactccccgagaacacggaggtgagaggaaatgctggagaggagcaggatgggatctgacaccacgcactccccgagaacacagaggtgagaggaaatgctggagatgagcaggatgggatctgacaccacgcactccccgagaacacggaggtgagaggaaatgctggagatgagcaggatggcatccaagaccacgcactccctgagaacacggaggtgaccggaaactctggagaggagcagg

SEQ ID NO: 160307 - DNA, 1000 bp, Homo Sapiens
tttttttttttttttttttttgagttaaaagttttattcattcaacatctcacattacaaatatttaaaaattatatgcatactggtataaatagtcatttgcaaactatttaataacattaatttttcactagcacttcaacaaatgaactcttttaaaaaaggaactgtgttatataacttaagagtagaacatacaaaaataggaacttaacgtgaaaatgactttaataaaaaatgaattacccttatttaaaatgctataataaatactacaacctccccatacacagtaaaaactatatggaaattcagccaagtagtacaattaactgacatacttaaataacttttccttctgataatatgagcaatacactggaaaaaaaattagggattagtaaaaactagacacccacttgctaaaagtttcacttccaaaaaatataacaaaaatctgatgaaaattataaaaactaattatactttaaattttaaaaatataaaaaataaaacagttgaatacaatattgtcccgattcttacaatgctatcaatcacagtagctttaaaataataaaataaagcaaatgaccaaaacctcttttattccatttttaaaaataatctcaaatttacattagtagaaagattgatttctgattcttttctttagaaacaccagcaagaaagaggattactcttaacagtagaaaatgacatttttaaatgtctgcaattaaaaacaaagaattacactgcaaagatctttcaaaagtttgaaataagtattgcacataacttgaagttaacttgccacaattcatcacattcaagttttaaatcaccttttaacagaagattcaactcttcaaaacaaaaggggtgaattatcaagtctttccaacagcactctcataaaatgctaaattcattcactgcaagttttattttgcattctgcagaggtctgtgtatggagaagtatatatattatacca

SEQ ID NO: 160308 - DNA, 1000 bp, Homo Sapiens
gaaaccaagttcatctttatttaaaggattgacaatcccattttaaacaattctttgatttacaaagagggaggtagactcgttagcctcccaaccttagcttaaatcgtgatgttgccaggttcctggtggttcagctgaatcctagacagtttcccttctcttcataaagctgagaagaaaaaaaaattatctccatctaggcccacgggaattttgtgcatagacagtttgaattggtctgaaaagtgtgactagctacctacctattcacaatgcctagaaaatgggctaccagatatggtagtggtcaaagccccgactttcctgtctgaggtactgggtttgctctaaggtagaccttggcaaggcccctaatggtccgtccagcagagtgatgctcgtgtccctcggctgtcaggtgagcgtgggtttgtgaatcagctttggataggatcatttctcttggatttaccactaggctctgtccctaacagggtctacctacctgacccccaagctggctcagtctcagcgctaaggtgtactatggaagggtccggacaaagactaatatttgagatctcttagtagcacaacgtgaaaatggtaggggattttgtcctccaacaccaaagacacttgcttttttaagaacaagaggatgtgtaattcactgaataaaatggttttcctccgtctaggggggattctagcatctgcccttccatttttgttgagagaagtattagctgatctctcaaatgcagatgttaagagagtaacaactgggttgatccacctgttgcttttacaccatagctccattttccaaaaatatatatgtatgtacatatatatatttcagatttacagggaatttttttgtgaacaagaaaaaaaaattgtctatagaagtcacaagtgtctttcttctcaggagacctcaatgatttccatgctgcccgaaaagctagactgactgcccactttccccagc

SEQ ID NO: 160309 - DNA, 1000 bp, Homo Sapiens
gttacataaactactttatttaaataaaaccaggaaagaccctttcccccttacacaccagcacatgcacacacgcacacccacaccctccctccctttcggctgtctgcccatggccacctcaaaccccgaggttctcattgtgaccaacctccctcaacctgtagacccccgtgcagagtccagttgcccacgcatcccggttgctggcagaacatgggcctagaaaagagcactccatcttcctggggtgggtcaaaaggaaggactggttctcccaaggcacccagatctggtgtggcttccctacaaactgggagcactgccaggcagctggagctgctccctgcggagggcagaacttttcaccccaagccaacccctccctgtaacaaaggaagtaagagggttggcagccaagcttcagtgtgccccgagggatcctgcagtaggtattttcagtttggggaagagcaagggagagcaattgagcaccaaattccctaaccccgtcctgcaggagggtgctgagtcagttcagcatcctctacccagaaaaagtaaacacaactgtgcagcaagagtgagggtgggaatgacaggggcctaagccttcaggacctcatgacttcacccccaacatgggccctcttagggacccactagcaccttggcaatgttgaggacccagcccagcggaaacaccatacccacaggagccagtctggagttggtgatgctccctatgttgacagtggggttgggtttctctccctgacaccagcttcctgcaggccctgtaagttctgctttggggcacacatcgcagagtgcctcaggtcatgaaagggaatgctgaagggaaaggtggtgtcttccggaggcacacagtacatcttacaggttacacacgggcaggctggagcaggacggggggcagggctcagcagcatacctagggtaccctccagagttgccttgggaaggggggcggggctgg

SEQ ID NO: 160310 - DNA, 1000 bp, Homo Sapiens
ctagctctcttccaggtggaggctgatgaactcctggatacacctgcggaactggagctccgtggggctgcccgccagggcgcccgggggaccaggggcagcctcggcctcgcgcatttcctccgccatgcgcgccagacggagcagtgtcacgatgtcagcgttggccgcctgcactgcgatggccaacgggtcccgctgctcttggtccagggcgtgctggtccgcgccccgcttcaggaacaggcaaacctggccggtgcggcccagcagcgtggcgtggtgcaggggcgcccggccccggctgtctctttggttcacgtccgctccgttttgcagcaggaactcacagacgatcaaggagccccctagcacggcctgcaccagcggcgtcttgccctcatcctccgcgtccgcccagttgacctcggccccgtgggccagcgccgccgccagcgcaggaaggtcgcgggcacgcgctgcgcggtgcgccaagagccccgggtgcagctcgcgcacgtccgccaggccccaggcctcggcctcagtgtccccgtctgcctcaccgctggactcctccgactctgcacccttgcgagggccagcccctgcggcccctgcgtcgaagtaggagaagagcgagtccagctcgtcgggacagaagagggagtctcggcggaacttacgatccagggtgcccactgaggacagagcggccacacagggcagaacgggctcaagccggaccttgcggcgggcagtgggagcgcggggagagctgtggggccgcaggcacttctgcaccctccagcgtcttggggcctccagggctggtgccatgggcgccttccgcagaaacttcttttccacgtatttgtccttgatccaggcctccttgtcctgccgggagctgctggctgtgggtttcctgctgcctgcaccctcacactgggcctcatagatctgattcacagcgctgtttccaagctcacacatcagc

SEQ ID NO: 160311 - DNA, 1000 bp, Homo Sapiens
gaattccggaactacattatacttctctgtgaagggaattttgtagtgcagaagttctcacattttaaaaaacataataaaatactgaagcggatttagcatatgtttaccaataaaaaattataaaatttctcccaattgtacagcttaagaataaaccaacataagagtgataatactgataagataaaacaatgccagatgcatatctaattaatcagcttcctttaacctcttgtattgttgctctctgagtcattaaggttttctaatctgctgcatgttacaaacttgttcctaactttgaaaactgcatgaaaaattactaggtctgaggttcaggcacacccggatttattttgtgtgtgtgtgtgtgtgtgtgtgtgtgtgtgtgtgtgtgtgtgttttgtattttgtatttttttagtttttactttacacagtagtgaacaggaatcacagcatacaggttactgtgtttccatgaaaagcaaggataatattgaacgaaattcattatcaattagaatttattttccttctagaaaaacgattaggcttcatttgtcttttcttcagacacttgctcactactctcgcctactttttgtcctaagctgcttgcttgactttcagccctgtcatccttcatcagaccttcagtttttgcttcttctccctcattctctgcctcttctacctcttcttcttccacttcttcctcctcctcctcctcttcctcatccccttgtggtttttcacattctttttcttcctgcaattcttccatctctttatcctcctcctcttcctctttttcactgtcttcatcctcttcccttgtcaaactctctctctcgtccgagtcgccctgtgagggagacgccctggcacccacgtgctcattcgagaggatttcaggccctgcctcttcctgctctgtgctgtcacgttcttccgcttctctcttacagtaggagtagcgatgattcatgtgttg

SEQ ID NO: 160312 - DNA, 1000 bp, Homo Sapiens
tttttttttttttttcttttttttttttttttttaatgaagtggttagaaaggtttattttgtgcttaggatatttttctaaggcatcacaagttacacatccaaactcttcaatggtacaatattttaaattctaaaggagagggctttaaagaaaacttgtatattacgatactgtaaatctaatggattcacacagcaacagagcctagaaagaaggggacattacagaaattgtctactacgtaatggtcagttgattcattgtatttatgattttcccccttcttttaaggtgaaaactatgtattctagctctttaaggagtaaaaatacactaaaatgttccatcctactgacttttacctgtgaaatcccacacaatattaccagtcaggaaagaacacaggataatatgaagtttgtcttttaaaaaatataaaaatgttattattttaaaacatcaagcattacagactgtaaaatcaattaagaactttctgtatatgaggacaaaaatacatttaagacatatacaagaagatgctttttcctgagtagaatgcaaacttttatattaagcttctttgaattttcaaaatgtaaaataccaaggctttttcacatcagacaaaaatcaggaatgttcaccttcacatccaaaaagaaaaaaaaaaaaaacaatttcaagttgaagttcagcaagaatgatgtaaaatctgaaaaaagtggccaaaattttaaattacaacagattgttcaatttgatggatctctcagtaaacttcagtttgaaacaacaaaaaaatactgtttactaaaacataaaaaatgtttccaagaaattatcatccaatttgaaaaataaaaaatgtaacccatagtaagtaagaaaaatacaagagaaaatcaaactttgttggaatcaagagaataccatgaacttaaaaacttcctaaatcagtagcatatcctgtattaccatgtgtagaaaactgta

SEQ ID NO: 160313 - DNA, 1000 bp, Homo Sapiens
tttttttttcagtggaaaactccaaagccaaggttttttattactggtcaaaaggtgctcgctaacaaaacagtgttggggagaggtacattccacagctctgtaggagccccagtggggccatcctgccccaccccgccccgcctctccagtgggcattgtaaggcatttcacacattggtgttttcactttttttttttatatatataaaaacaaaaccagtcctggagtagaaagaaagaccctgtgatgaacttttaggactaaactgaaatggaaaggattggagtgtgggattctgaggggctgggtcagtggccatggtggtccagccccccatggttggcagaagccgctggaagggggcatgaggagagggaagggcacagctcacatgagggccaaactcagacaggtgcacccgtcttcatcattttttcacttttacatactgtagaaatttaagcaaaatagctattttatatatatttatatatctcatatatatatatataaattaggcaaataaagagttcaggggacactgagatggggcacccctaggggcctcctaggatgaggagggatgcaaggtctctggtgcccaggtcaccagcccaggctgggccaagggtttgttcattattgctgatttggggcctgggtctcagggcggggagcacctgcaggccctgccttccagcccttcctggcctcttggggctagggagccacccaggctggctagggtgaggccagggactgctgccctcaaatccacatgggggttaccatcagtaccccctcctgcatctgtggatgggagctccagaaactctgtgctctgctgggctggggcagcccccttctgttttgggctctgtggggccttggcaggtgggggtgtgggcagctcagataccatcgaggacttgatatgttgagctacaaaattctcccaactcaaagcggtctggcttcctgatgtcttaaaaataa

SEQ ID NO: 160314 - DNA, 1000 bp, Homo Sapiens
ttttttttttttttttttaattggtaggtttttcttttgcacttttcattaagatacattgggaacgagcaggtagacaaagccagagcctggaggcttgcaagagattggaaatgtgtgacatcaagccaatgacaaaaaaaaggtgtaaatctgagaactgtagtgatttgtatccctatagttatagatatcttaaaactaattgagcatccattatgtcttttttaattattagacaatatcatatcgtatattaaagtttttattccttagtaagaatttttaaatcacaaaatagtgtggcaatatttaggtaatagaatttatggagtgctgaaaatactagaatataaaggtaatttctagtttatcgtcacatactaaacttttctaaaccagctggtttctcacagacagtatttaatttttttaaaataatttaagacagcataagcttgtaccaagcataagcattgtaacaaaagtgcaacttttcagcaaatcctccccaaaagatattttaactcaaaatatcattagcacatattttctccctacaaaaatagcatgtcagacatcattaattggatgtattaacaactatgtacataagagccaccttgtaggctaagagtttaacgttgtttaaacacagcgtttgaggcaaacagtagcaacagcagcagcaaatgcaccaaactgacgaaaagacccagatattttcctcactcatagtcagactgttgtgtctcaccccttacataacatccaagtgagatttctcacagtgctaccttggcaacaaactaaaaatatctagacaaggtcttggtttaagccttattaaaaaagctttctttgtgattatctggtatctggtttggtctccagaaaatacatagacttggagataggaaggcctcacaggacttcattctatatctttacagcatttgcaatcaaaactggccagttaaatgctttcgttcacttttga

SEQ ID NO: 160315 - DNA, 1000 bp, Homo Sapiens
tttttcaagaaaaattgttagttttattggtattacagtgtacttttaatacaagctaaatacaaacacaattcttacatattcagccacttattctgcaaaacaacatgccaagatcaaccttgaaaagtttataaaaaccaaaatccagaaaatatcttcctcaactctaaggactccatatacaaatgcaaaaattgctatttgtcaataatcacattaagtgttgagttattgactgagcagtaaaaaacaatttctgatttttaaattaaatagctccagataaaagcatgttattttccacatacgctatctttgtattctgcacagagttccaaggcaaagattgctcctggctttatgaattaccagagatgatgacttgtgtggctgacttatcacaggtcttttactcttccttcctgatagatccttagcttctttgggaggtggcatatgaattggtttccacggaattggattataaaaggctggttctggataggaatttccactgtaaaaacctgtaagttttccattggcataaccatagctctttgcagctggacgaggtttatgtttcgcattttccaaccattcttgaaactttttttctgctatttcctttttctcctgtatttcagcttgctgttgtttttctttttccttttctttcttcttcctctcacattcttcagcattttttttctttaaccattcttgatatttttcttttgctttttcttgcaagtattctttctccagttcctttgctgctttttcctccatttctttattaattttttgttctctttcttttcttttttgctcattctttttctgaacccattccttgtgcttttcttcagcaattatctttcttttttcacgttcttccatttcttttcttttttctagttgttgatttaattcctctagagctttcagttgcagccggtcacgttcttctttttctttgccaataaaccacacctcc

SEQ ID NO: 160316 - DNA, 1000 bp, Homo Sapiens
gggtttcagaaagagttctttaataagggagcagggagaaaagagaccattgtgggggcaatagccatggaagacattaaggacggaagagtttgaagatagtttgctggctttttacatgtatgttccccttagcatttgcttgtgaggctgtggtagagatttaaactgttttcgttttcttttccttgaacattattctatgctgaaactcatcaccaggggacccagctagagtcttgttacattgtgacacaggcaagatcatgtggtttgtttggaacatagaccacataaccatttacctggcagctctttggctttgagatgaaaggaggcataaccaggtgctgcaagttggctctgtaaactcagactcctgagaggactgcgtcacatagttctctattatccggcatgaatagtgactgccatcctagacctgaagagaattgttggtgcgatgtggctgaggagtagtcggggtctctcatgacttgtctgcacttgccatgtccatttgcttcttcctaatcattttcaggactggaagccagaaatgaatctttgtaagatagagactcagccgtcttttgacttctcccagcggctgctttgatctttttttaagcagctttgcatgcagatattggatgcgcttcctctccacgctggggtagaaagatgctgacaccaggattttaagttgcataaggatagaggacaacagtcccagcatcactaatatcaaaagaataacactgagaggaacccaggtctcagatagaaggaattttggttttgggatacagttgggttcaaacacagatatattaaaggaagaatcatggataatatcttgagttccttgtttctctccgtgcagtttcaagtgaacctcaaaccctggcaagctttgaaactgcttgctcactgagaaaatgagccgatacagcagataatctacagctgcaaacagcacccagatgcagagatggat

SEQ ID NO: 160317 - DNA, 1000 bp, Homo Sapiens
tttttttttttttttttaaacaataatagcacaatggttttattgacggcagaagaaaaattcttcctttcacttgtaaaaggtatttgcttaatttaactcagtatttttttccattctttgtgtgagttgactgttttttccaccctaaaatctgttttttctttcttcaaataataatatccaccacagctacttattctgaagagaaagtggaaggtctgtcaacaggtttccaccagggtgtttcagtcactggctcgtttcttcacaaagagtcttttcctattagttccgagcccggggtggttggtaaaactgttgggttggccgagtggatcgtcttggctggccatcacctcccctacggaactccagagtttgatcgtaggtgccttcttcctcccatgcctctgtttgaatgggcttgatattgctcagtagcacctcttcatagtttccgtagtcaatgaatttaacaactgctgtcatacccgaagaatggagggcttcaacttctgcccggtaaaacttgttgtcttcccaataaagtgcaaaacattcatctccaggtttccacatttttgcatactccataggaatagatgattctagtattttttctggcttaattggcccagatcttcgtttgggcccactattgtaaaatattttatcatcacagggtacagctgtgacaggtcctgctggcttaataggtcctattcgtcttcctttcagtggcatttctacttctccatttggaacaccaatgaaactattacttcgaactggattctgataatcagtatttacattaaaatgtttttcaatttttataccactgaaagcttcattatttattgtttgtgatttcctgtcataaaaatagtcaggaatagatgtttggctttctctttttccacgtttttgattattataatctacagatccttgaggaagtggattttcttttgcctctgcaaaggagggacctttt

SEQ ID NO: 160318 - DNA, 1000 bp, Homo Sapiens
tttttttttttttttttttttttttttcaagctgctgggaatatttatttatttatttggtctattaacaccaagatctgcaaaaaacaacctctaaacacaagataagaaaactcgaacattaacattcttcaattttgtgtaagctctgcagtacggaaaatatacaaacttcaaacagctgcaaaaatagtgtctttgggagaaaatagagtctctacatcgatacaagaaaaataggcatttttctaatccatccagccctggggcgggcggagagtatagagtcgccatttgccacctggaggaatgccagctctcctccccactacccacctggggctgggcgggctgggctgctacttaagacaatctttagtcagggtgaaagcgagatgaaaatgccacttgggaaaacacttgtttcctccctctgccagcagctgaattggtcaagtgttatggcccgttagggctgctttggtcagctcctccaatgagagggaggcatgggaatagggctgagaggatgggggatctatcttatggtctcctggaggagagggaaggaaatctgtggcgtcttctctccttcgttcatggccagcttgctctgtgacaaaaataagggcctcctatacagtcatttggactgacacccaggggtgggggactcaagaccttctgggtgttttccaccaagtgagggatgtggcaggtacacaggtgtgaattgtgagctgcccagctactagtggagaaggcaggtcccatcacgttcagaggggccggtgcccatcaaaaagaggacccagggctttgacacagtaagtgaaagaaagtgctcgaaggccgagagggaagggcccctccataccccatctcaggggacctggggagggacctgccaccaaggcactggtctctatggtaaagtggggcaggggtgggaccctcagaccatcagggagctctggaaaagcacaggctcttctgatgg

SEQ ID NO: 160319 - DNA, 1000 bp, Homo Sapiens
ccaactcttaaaaattatttaatagaaagtccaatgtcaaaatgtaacaataaacaaaaatacacatgtataaatatgtatatataattagacctgtacactttctcagacccttttcaaaatggaatagaatcatcattacatcttggtggtcaaatcaaaaataatattcaagcgacatgggcccactgctacgtggggggtagtactgctggagcacttcgagggttcaaagaattccaatcaggagagagctggggatattgccagtgtccttttctggagacccagagagggaagatgaacaatcaatcgcatggctctgtccagtgtacctgacttttgcttagcacctgtagccactactgtctagggacagctctcctttagggttttgaattatttacatttatgttgtttgtgagtgagttttctttcctcatctcccagatttgaagttcctggggattctgccttaggactttcttattctgcaggccaaatgtcgcacagtggtttgggatgctatttaggcgtgctgatttgcactaaagcaagggtgttcaaagtggggtgtgcacataccaggaggtgcccaaggtccccctcaggagttcagagagaaaatgccagaacctctgtttataatattttgtgtcttattcatttaaagtttctatgctgtatactttttataatgtgcctaatatagtagtacaaaagtaaagggatatatgctttaaataaattaataaacacacagagagagtgcatctcacgaagtttttgctgacaggcatgtgtaattgaaacagatgggggcccactgctttggagaattcatgtgcaggcagagtggttagggaggccacccttccgggctcccacactcacctgaggaagcctctgcaggtgttcagaagagcaatgccccaagatacctcccagacctgattgagaggtgatgcctcgtaatcttgatgctagattttccttgaat

SEQ ID NO: 160320 - DNA, 1000 bp, Homo Sapiens
tttaaaattttttgtagagatagggggtctcactatgttacctaggctggtttcaaactctggcctcaattgatcctcccaccttggcctcccaaagtgctgggattacagtcatgagctgccacaaccagcctgtaattatgttgttactgattttctgtcagttaattacctttagcctggaataccacgctgaccattgattgctaagcacctggagccatgtctgcacacaaagggtgctcaataaacactccttaaatgaggaatgcaggagggagtgaggaccagggccctggcaggaagcagaggacaggacagtagctggctttggctctggccacccctttgggactagagttctgttgactggataacctccaggctcctccacgtggggccctgggcccgcctggggaagttgagtctgtgtaattccttggagatctcttggaaggtcttgcctttggtctcaggaaggaacaggccagtgtagatggccccacagacacagacaccaaggaaagggacatagaggaagtgggacaaggcctccatgataaagggaaatcccaggccgaccaggatgagcatgatccacatgagcgccccgcagaccatgcaggcagcaggcctggccatctggtcaaacagctctgtggccaggatccccgtcactccggcagggccaatgccaaagctgaggatgaaggcaaagatgcaggccatggccaggtagagtgtccaggggaaggagctctgcaggcacagggccacagtgaagatgctcccccagcaggtcatcaggctgtacccaccgatgagcagcacgcgccgacccaccctctcgattaccacacaactaacaaccgccgtgagcagctcgcagctcccagtcccgatgatcgcgtactggatcttcgcttccggcactcctgccttccggaacacggaggaggcgtaggcgtacaccgagtcattcccgcagagctccatggca

SEQ ID NO: 160321 - DNA, 1000 bp, Homo Sapiens
tttttttttttttttttttttttttttttttttttttttttttttttgaagaagagacaggtctttaatgtacggagtctcacaaggcacaaacaccctcaccaggaccaaataaataactccacggttgcaggaaggcgcggtctggggaggatgcggcatctgagctctcccagggctggtgggcgagccgggggtctgcagtctgtgaggggcctcctgggtgtgtccgggcctctagagcgggtccagtctccaggatggggatcgctcactcactctccgagtcggagtagtccgccacgagggaggagccgagactgcaggggtgccgcgtgtcgggggtgtcagctgcctcctgggaggagcctgctggcgacaggggcttgtcctgacggctcccttcctgccccctcgggctgctgcacttgggggtctcagttgtttccggaggacagtctccgggggacatgggccggtcctgggcagcctcctctggtacccgcggttccccagacttgggggtgtcggccgcatgctgggggctctccgggacgtcccgagacctccgccgcacgatgcccaggtccccgacggtgatgggggaggtggcaagcgcggttctgcggctctgtgccagcttcttcaggacgccgctgaccttgctgctggaggcggatccgggggcagaggggaaccaggagcggctgatgatctcggtccgcttgagtttctgcttgtcctcgtaggagtccagggtgtggaacttcagcagagccgccagcttgcggtcatcttccgtctcgggcaccagcgggatggtcaggctcgccttggcctgcaaggcctggtctctctcctcctcctcctggatggcttttttcttttcccggaaccttctccgcagcatgctgttgagggcgaagtcgtccttccaggcgctctgggcctcctggatgtggctcagtgtgggcagcgccttcttgagtgtgctgcggtc

SEQ ID NO: 160322 - DNA, 1000 bp, Homo Sapiens; identical to SEQ ID NO: 158775

SEQ ID NO: 160323 - DNA, 1000 bp, Homo Sapiens
ttggtgagtaggtgagtttattgggacttacacacaggtcaatcctgggcagcgacaggacagctctagagatctgtgcttcctcccaatgctaaactgctttcatgctaatcttctgactgtttacttaccggctaagagcgatgggactgttttcattggttggttctcagatactctctgggaagtttgggttctcagggacacctgctcctcagctggggattgtggccatggcctaccacctgcctctcagggttcaagcaggggacatgcaccctttagtaacctggaggggacccgtcacatgacaaccaccccaaccaccatcatgaagaagccactggctgactgtgatacacccccagaaggacaagggagagtggatgctggaaagacagagcgagagaccatcaccagggaaagactttattcttggaaggacatcaaacctgggggggggtcggtagtggagctgctgtttcttctcctgtatccaacagttctaactctggttttctccattttcagctctttcttttcctggccttctcattgctggttcctgcaagctccccctctattcttcgcccaatatattctttagtccaaagtaaactacttcttcccattccccacactctccagtcctctctcctcccttattgcaggctccagtgttcctgccttctccttggtgcacttgccatctgcattaacccctcccttgctgtgctcagctacacaaatgccaaagtcactaacactcagttccataagctttaccttgccctccttatccccctaataaaatgtctgcattttggccaggcgcggtggctcacgcctgtaatcccagcactttgggaggccgaggtgggcagatcacgaggtcaggagatggagaccatcgtggctaacacagtgaaaccccgtctccagtgaaaatacaaaaaaattagccgggcgtggtggcaggtgcctgtagtcccagctactc

SEQ ID NO: 160324 - DNA, 1000 bp, Homo Sapiens
tttttttttaaggtgttaatgtaagatgtttattagtggaatttatttagtacagtaatcacattagaagtcccaatatacaaactgttgaagtccaaagtcacaaaaaatacaaacttaggtatacgaatgaaattataaaaacattatttaaaaacaaagttctacatcttcaacattgggccaaaaaaggaaaaaaaaagagagagagaaagagaaagaaggcatatgaaaatcatcacatttcaacaaagcagccctgaccagtctggctgcctcaccattgagatactggaccacttgggtgtgaccactatggcaatacagcatttcattatgggactggctactttgtataaaactatatgtgaaacataaaatttctttctttcaaaatgaaacgtccaagtgaaacagatagagctaacatataccaaattttagctggctgttagtagaaaatttcaacaattctgtaagttcaaaaaggaaacatatttgaaaaaaacaaatttcaaacaaaaataagcataaccaaatggaaataaaagaataaataaatgtcaatcatgaagtgtgagtgtacacaacggaaagtcatacccaggcttctccacccataacttagacagctacagggactggttacgagcaatagaaagatgtcaaacatgatttttaaaaataactactaccagttttgaaaagatccctggcgaaagaaaccccaaaatcaacttaataaataactgtacaccaaagggaaagggttgtgttttctttgatggtgtattctctatggcaagagagttttaatattttatcaactgctaagaagataagcataacctctttcctttaaaacatatcaccctcaagtgtcttctgtccagaatccatagaagaaatttttgtcagagaatccagcccttgtgaccagacccctgtagaagagggaatgcttcctaaattccggaagtcgctgcaaggattcagttta

SEQ ID NO: 160325 - DNA, 972 bp, Homo Sapiens
tcacctctgtttttttaaccgtgagtcaactacaaccaatatgaccagggtaactatcacagtcaaacagatcaggatgagaaagatggaatatccaccccaatggatgattagatcatggccccctagactgctgtgtttcacccgacaggacaggccagctgcctccccagccgccacatccagggttgctcggagataccatgtctcgtcagcattaggcaggacgtcccctcgctgagtgccccgctgctcctgctcaccccgcatccacatcacccacacgggctttgggtagaatcctgagacatggcacacaagctgcagacggccagggccaggactggggccacaggacagccaggcctctggcttcactttccgtttcagttctgactcccctgcttccatgagccccgctagaaatcgagggcaggtgtgaccaagaaggctttgcagtatttccttaatatctaggtagcgattgagcactttacagatgttctgggcccggatccctgctcctggagatggctcccaggaaattccttggaaactcaggaaatctgacccttgatatgccatatttaagaagatttgtggggcattcattctacagccagctaatatctggatctcgaaggggtattcaagctgaaattgaccagcagaagcttgcactatctggataaaactatggaagtataactggaacagtgactgtaagtttttcagctcctgcttgctgaagtttccatgggaccagggcttcagaaagcggatggtgcccaagacagtgtcccagccatgagtctgcaggtcacccagccatcctgagccctcactgtgtgcccagctgtggttggcaaaggaggaagtttggagcatgcggaaggacagctgctcctctgctgctgctgtattttccccaggacagcagagaccctcgaagaggaggaacaggagcagcat

SEQ ID NO: 160326 - DNA, 1000 bp, Homo Sapiens
gctgagtaacatctgttttttattgatttaatcaatacattgggaatttagcagcaagttaatggcaagcagttacaaaatctcctatttttctacatttaaaataagctgtcttaaacaatctatagcaacctaaaatctcacgaacacatgtgaatgactgaagcacttctgctgtaatacgtatggcaagtttattagtaattttctaacaaagtcttctagtgcaaagtgcacataattatttggcacctccattactatatttggcctcttgttttcccctataaatagctgtgcctaaacataagaatttgaagtaaaaatgagcaagtgtgcccacagccttaaattgaaggtatctgcccccctaaaaaaccttcgtgtacatcttgagttgatttccactgcagcccactgccaagcctactggtggctgtcctttaatgccatgtgcagcttatgctgctttggagataagcagcttcaattttaagctggtgcaaacacatggcggggctctgtggagctaaaaggctacaagctcagcatagggctgtcttcttcccctcctaccccctcatcaaagtgctaacaagagcagctttgtttttgtactgtccaacactggagggaaccttagagtttctttttggttctggacagggcgccggatttagcagggtacttggttgctgttccttggcttggagtcacaggggttttctccatttctcccttgatttcagctggaaggagtttgctagatgtgaaacttgaactgcacatatcaaagttgtccttactggttgcaggaaattgcttttcataagcagtagactgtttttcctcctcttcatctgaagtgtaattggcatcagggacatttccccagggttggtaacttttcaacttttcttcagtggacggcttattcttctcttctgttgtgttttcctcaacactttctgggttatttttccattccttcatcatctct

SEQ ID NO: 160327 - DNA, 1000 bp, Homo Sapiens
gtttttttttttttttttttgagcattttcaaactttatttacaactgtcacagtgacaaaaagtagtttggaaaaaaaaaaatgctagtttctccctgagcctcaaaaaagaacagatagaagttacaggaggttcatctcacaacaggcatttttactgaaatactaggaattttttcaatacaatcagttagaaatacacacaaattacttgaaaaaaaaaaaaaagaggaggccagataggagctcagccacttgtccaagagcagctgggtccccccagcaggctccaccgctgagggtcctgacattagctgtcagcccctggcctgctcagactgcaaacggtcatacaaagtggtctagggaccagcaaaaataataaaccacccccataaacagacacatacacaaagtagatttgttacgcagtttacaagcatgttcccatcacacagcaagaccaggacaggtgattcagggtagcagataagggaagacaccaaaacacaggaattgaaaaggcaagacccccgtccacaaggggaggcgagggaatgagagtatggatgaaccactctctgcagccaaaacagaacgaagcggggagcaagagagaggaaagcccctctcggtgcaggctgccggcctctcccacttctgcgaggagttggaagaagttattgccattgatgtgtgtcacacaggcagacaacagagggaggaagcaaggggtgccggcgaccattggcttcccagaacggaattccgcggactgctgtgtccacagcgcaccctcgtcctcctgccctggcatccccagagccacaatgaccttgaggtattaaatacagctatatacacacgtccagaactgagggtcaacctggactgactggagacctgaggggacatgctgcgtgccttggttggccgagtttagctcaaggaaggctctgagtccacctcttggccacacggtactgctctcggcggact

SEQ ID NO: 160328 - DNA, 1000 bp, Homo Sapiens
aaagagataaacagaaagtagttttattttttctaaataggattttgatcacaaaaatgctggtgattcaaacctttaaaacagaagagcatacaacctaagaaaaatgcaaaacaggctacaaacctgtacatcatgttactgcactgaatactgtaggcaactgtaacataatggtatttgtatctaaacacagaaaaggtatagtaaaaatacagtattataatcttatgagactgccaacatatacgtggtctgtcattgaccaaaacatcattatgtagtgcatgactattaaaattgtgcaaaacaaacccctgtatccatagtgtttaaaccataaaaccaatacctggtatatacatgacaaaacaaagcatgtaaaataatatgcagcctaaagaattcaaagacaacaaaggtgacaaagtcaggtaaaagaaaggcaattagggacataagatattttttaaagcaggaagctgatgatgtccactgtaagcctggaagaaaccaggagtctgaacacggagcagttactgataggaaggataaagtgctacatctctaacagcaagcaaattaactctgctgaaattgccagaatgaaggccaaggtggttttcagtaaagagtgttctccttgacagcatagccagcatgtggttgagccgggacctgataccagcgaagtggaattgccgctctttgttcaagtttctaagtgagtcactcaagtacagttccaggtggggggtgcccaggtacttgggatagccaggattgtggaagtcagtggttctgatggaagcgggagaaccagtggagcttgccacagagccttgggaagacacagaggaggaagacttcaaactggaagatctcgatacagacatttttgagactggtgacccttctgtagattgagttcctcgaggaaagagaatgttctcatccatgtcagtctgagtagtggtcgatctggaccaaatcgtggttt

SEQ ID NO: 160329 - DNA, 1000 bp, Homo Sapiens
tttttttttttttttttttttttttttttttttttttttttttttttttttcagaagtaaaagatttttattgttctatagacacttctgaaaagagatctaattgagaaaatatacaaagcatttaagagtttcatccccagagactgactgaaggcgttacagccctcctctccaaggctcagggctgagaacggttagcatatcgaatgatcagtaaaaacatgcaaaagtgagaaggaaagggaaaaaggtgcattcccctaagctgagggggatggaatttcagaacagaggaggcagggtggacaagtaccaggtggctctccctttccctctgtgttatctttcaaaacagttccaagcttggagaaagcaatgagctccacctactcagcagaacccacggctcgtcccccgtggacgtgactgagcagtgaccttgcctgccccgttcctcagccgcccatcccactgccttgactgaggggaccctgcttgtgctcctggggggcaggactgggggtcctagctccttgcttctttggttccactcagagaacagttgtgcttgacggactcatccccactccccaaactccaagctcctgctggtgggctgaaggcactgacagagtccctgggacacccccaggtagccaccttctcttgtgctctggtgggtccctccctgggcacatcgtcccatcctcagctcaagccccaggtctaggaatagggacagtgaagaaagtgtaccctccaagaaaaagcttctgaggacttttctaattgtgcagatacttctgaagcccatgccgccccgcccccacagccccatccccttgcccagggcctcacatgcccggctcccccaaccggtccttccccttgggctgccggtgcagctgtgggcccaggctttggcaggcccagcttcaagacagtgggacacagaaaacactttgcagcatcgcctctccctccgccacacccaggt

SEQ ID NO: 160330 - DNA, 1000 bp, Homo Sapiens
ttttttttttaatataaagatatattccataaaagagtttggcagtcaaagagaagcatcacacttccgaaaaacacaagcattcttctcctagtctacagagaattgtgtaaaaaaaaaaaaaaaatcgtcatcaacagccaccagtatacaccacactagaatgtacactccggcaagtaaattaaggttgcagtccatccctgaacgatgagaagtggtctgagctatggcaaagtgttagaaggtagcccagctagacaaatgccccagctatccccaggggagttattcagtacttaagacttcatttccaagagcagccccagaaaagccctgacaggaagggtggaccagtgatcaccgatatcccattaggggcggtcaccagaaacaaaatgcctggagcttctgagcagctgcagcctggggttgtggctaggcacggggtgtggttgcagaagaacggctgtctccggggagaggcaaatggcaggccagccagccctgggtacatggccacaagaggagccctggccaacagtttcaggctggccatcttgggctggggctccctgggcttgcagtggggagggtcaggattcaaattctgggtgacaatttcagtagcaccaagaccagaagacagtgaggccacgctggggagtgggggagtgcttgtatgtgggatgcatggagggaggctgcagtatgtggaggagaaagagaggctgttgtgggctggttcttaagacactcaaggggactcaaagggtcggctccagccatggacactatctaaggctgctcagaggagaatgctggaggagaggaagaggaagtgaaatggtgtgagaacattcttacccctataaataaactatttacacactttaagaaaaggagagccggctctcagtgaagaaccatgcccaccgcgccaccggcgccatcagggcttaatgctatcaagaccagaggcagttccggcgccaggaga

SEQ ID NO: 160331 - DNA, 1000 bp, Homo Sapiens
ttttttttttttttttttgacagtacaaaatctctttattgctcattttctgtaaaaaatcgtggctctcggcggaccctggggataggaggtgcaaagtgcgctcacacgcggcccgggtccgcggccgagagctgtggggatctggagcgggccgggtcgcaagaagaccctgaccgtgctccggcgctggggcgcgtgctaagggcccgcggggtttcagctgtattttcgaacccctgtgcttggccgaggggttcccaaggctccactccgccttggagggggctgcggaagcccggaggtgacctgggctctgggaggggcgtccccaacgtgggggaggggagacaggggcctttgaagacagcgcgggactcggagggggtccccccgacctcagacgtggtaaactgaggccggcgaggagggaggctgagtccggggaccaggcggcccctcactgctcctccggcccgtctcccccctgcgcctgttcgtacgggcagggccggcggccgagtccagcgggctcggggccaggcctgggccctgcgggcggcgcctcctcctccgcgccgtccccatgctcgccctccgcgtcgctctcgtccgagttgtcctcctccaagtagcggtaaccgcgcaccttgtgctggggccgcgggatgcggggctggcgcggggccacgccccggcgcagcttctgctccatccgcaggtaggagaccgcggccgccaccagcgtcaccagcagcaccgccagcttagccttcatgtgcaggctcgagcccaggtacacggtgaagatggccacagcctgccaccagtggtagatggtgaagatgaagtcctgtctctccttgtcttcgtacaagattcccaggagtgtgctgagtccagtcttgttcagggcactgcccacaccccaaagggcagctgccacatagaggatccagctgtgttgcaggacccgaggcacaggggcccagaaaaagag

SEQ ID NO: 160332 - DNA, 1000 bp, Homo Sapiens
ttttttttttttttggtggagagagttgtgtttattcaccatgtcatacgcgcatatagggaacctctatttaggagctggtggcctgcactcagcaccgcacagataaaaatatacgactttcaacacagatccaaataccctcacattttaaaagtcaggattccctacacaagttttaagctgacgggattcaagttctgagttttcatacatagctttaacttgtattaaacacatgtttatttacaacgtggagagagaataaggggcagttaaggccactttctcctgtgaaacactgcaaaatatgtacataagtacaacctaatataggcaaaggttctaaaaatcatctttcttggcttcacgtaattgagtatcagtcggggagtggagagcggctgccgatagcaccaggccatgccaggccacgccaacaagggcgtgtgcattcactttttcattgagctgccctcagagctgctgccgagctgagccctgcacgggcccaggtgtgcgccgcaccccagaccggtctgaagcacgtgtcaccggtccctcagttccatttccaaatccaccaaggtccagtcgacagacatttccaaaaagaatcctgttctaggaccacttgcgctgagagcacacccgggggtcaaagggcagccaccgggggtcaaagggcagccatcaggtactccccagggaagggcttgcggccaccagtcactgcaaccccgcctcacctccgatgcctgctgtgcccagggtggtcccgctcatagcgacggcctgtgcgttcatacgacctcgagcgctctcgtcgctgatctctgtagtaatgacttttcttcttgtattttcccggattatccgcccgctcccgtgacctgcttcgagaacgggaagaactccggctccgagacttgtgtggcttctgggggtacttgcagtccttggacttccgggagccccgaatctcagagcctttgtaggg

SEQ ID NO: 160333 - DNA, 1000 bp, Homo Sapiens
tttttttttttttttaaggaaaaaagtaaaattgtttattttcctcccaagcaaaacaaaatgaacaagttcaatcaaaaacatcccaatggaaaaaaatcacactaagaataaaacacttacagaacggcaagaaaactgggttaacatataaatttgtgtctgttgaaaccagagtacatgctagaaaacattaacacagatacgacagagtgtggtttttttttagaaatgggtaatttctctctccagtatcctttcacttgtatgagatatttctcctctcctgttttcacaaaccaagaaatccccaggtaggccaatcccagaggtgccatttagcagtatgcagcagcccagtttcagcataacaaaacatgccttggtagtggctctctcatgcaaataaaagaaagcttaagaaattcttgttgtaggtggattaggcaaggctgccattcagctggtataagctaaaagtaaaaaatcaaaacgctcaagaaaacggacacaattttggaatgattaaagatgtctttataaagtttttttcaagacttcattctaaatacacagaataaaaaatggtgtcagctcacttgtaagacaccaaccagattttccttatactgtctcaaaatttaaagatcaatttccccagagggtgtgcaatgcatcataaaatggcccttttttgaggatgggagaggaagggttgggcaggatggaatattaaattgtaacatgataaacatgcaagactgttatccaatctagataatttatatacattttgatgacttaggaaaacaaagcaatcatttgtgacaagcctaaaaagcttgacatatttaacatacttaggaactttttttgtgcggtgggaattctctaattgtatcatgtgggccttttgaaagtaacaaacagaaggccagtctgttgcaagtttgctgctgaacatcacattccaccctaagaaaacacaaggtggattgca

SEQ ID NO: 160334 - DNA, 1000 bp, Homo Sapiens
tttttttttttttttttttcaaattccaacagaagctaaatacaattggaaactggtaagcactagtcttactccaaaggagtaggatcattcagatttactccaataaaagtatgcaacccttaagcaaagcttttcttcatttaaaaggagaaaaaaaaaaacctatacagtagtctttccttatgttcattgcacgaaatgagttctgcttttagaactttgacactcaatggttaattttacaatttaagattccaactttataaccttttttctactccaaaacacccttgtaaagtttttctttaggatggtgtaaaaaccagcatttctgcacaattcactggaatttttttctttgtaataaaaatctcttctctgtaaaaccaaaaacaaaacaaaacaaaacaaaacaaaaccaaaagaaaagtcctctacctatcatggtttctgcagctatgcatgtatttctgttttatagctgctttatagctacttcagactccagatctgctttaatgtgtataactgcatccacacgcagcagaatactcttacaatagcaacttggggaaagagatctggaaaaaaaaaaaatacatgagtaccaggaaacaaacatggcccagtaaaatatgaggcaaaaatgcctacaatgagatgcgtttttcatttaagatttctttcccatggttgtattttctttttttaaaccagttctggtcattagaatgtatctgacagtgctctggaacaactgtgattatagcaaagttattgtttttaaaaatgttatttatacctgttacattcacttctcaccctctaaatactgatgacagatgtcaaagaggcaaaaaccagcacaaatgggaagaccataaaaatgagtatcaccttgtgctttcagatacatttaagcatttcagtgtacaatagtcctttcatttcacatttttagtaagatactgatgcagtgcagcaaatatgcaaagca

SEQ ID NO: 160335 - DNA, 1000 bp, Homo Sapiens
gtgtcagaagtgggaccagcagctcggaccgccgagccatcacttttgcgttttcacacataaaatcctgattgtgtttccttgatttttcttctttttaaaaaaaaggcagttcagaagatttacatcgtaatggggaagtgaataaataccagcacttatggttcttataaatttatgttttgaagacagcatagcactcaagaggaattcgactgttaaggtcggtgaaaccttgttaagtgtctactcaattcatgaacttccatctcagtgcttttgaattcattgagctcctttcggatggcagctttgtctgcagcggtgaggcgggtccacggcttatctgccctgcggtcatagtcctgagcgtcagccacctccacgtagtcactgaagcggatgaggatctttctttcccgaagctcttccaccgtgggcctttgactgagctttcgggttagcctcctcttgatctctctcttctcctcctgttcctcttgttcattccgaggtttcaaaatgttcctctgttccagttcctctgcagttggcctctggctcagccgcctggtgagcttggtgccaatctgttgcctcagctccagccgctcctcatccgtctgcctgggaaggatgttcttttcttccagctctcgcttggagggcctgttgctgagtttgatggctaaggagtccttcctgcagaccttcatggccagggagctggtgtataatgagctgtcgtcgtcttcgtcctcctcctcttcctcctcttctcttgtatacaggcaagaagagtcttcgtagtctgactcatgaggcacattttctttattgtcatcacattcaatcacaacagttggcacttgtcttatttctggaaggcccataggtcctgctttggtgaccccatcacccgagtgcaacccagagctgtggtaagaagtggaacaggggacccgctgctcagagctttccagcctctgcatggtcatgg

SEQ ID NO: 160336 - DNA, 1000 bp, Homo Sapiens
ttttttttttttttttttttttcgagatggggtctggaatgcagtggtgcgatcatagctcactgcagactcaaactcctcggctcaagggatcctcccacctcagcctcctgagtagctacgttgaaaggcatatgctactacacgcagctaatttttaatcttttgtagagatggggtctcgctatgttgcccaggctggtctcaaactcctggcctcaagcaatcctcctgccacagactcccaaagtgccgggattataggcatgagccactgcgcctggcagagcctggtttttttttaatacttaatcttagccaaaaggctgagaagcgatggagaatgtggatttttggacgtgaattctgttgggtttggttttccagtagcctattctcttcgcagcctttgaacctaacacctctttggccccagctgctgtctgcacttgcagaccctcctgcaagctcaccctgtactaccgccgggggatgccgtgatcaaggagcatcctgcctgtggctggcagaagaggccattcactgcccattcgaaatctcaggcctcctctgactctgtaggaccctgtgccagtccaaggggggccggggtctcagctctgttccacagtgcacacgcctgacccaccctgggcccttcttggccccaagactctccctcggctactctatcaggaatggttttgaagaatgcaaagcaggacaggctcacaaacctcagaaacctaaactatatagcagcggcggtggtggcagcagccacccacaaaaagcaagaggcaggtgaattcccagcatccccctccacccacctgcctcctctgcttctgagagttaaggtcacgccaccaccttggtccctattctcacacactagaagacgggttagcagtttggcactccatgttgaaaagttgccaacccctgcccttcaggaaaatgtcctcggcctccacctcccacggacagctctgcctcc

SEQ ID NO: 160337 - DNA, 1000 bp, Homo Sapiens
gtgggtcatgctttgttttattcttgaacctttagtcccatgtatgaatcctgagtgttaccctcctgaatgctgtgcactacagaatgaactttagttcacagtaaatgagggatgctttttcttaagaaataaatttaattcaaggtggttagtgaatgtgaggcaatgtaatgccttcacgaaagttaaagtaatccagttacaaaagaagcactgtgtatagtctcaaatagctgaaggtacaatgggctccatattttacaaagtacaaaaaattatttcatatacaaagaaaaatacaaataatgtgcaaaaaccattttcacaggtggcaatttataaaatggaaatgatagaaaagtccttcattcttaattatccccagatttcttatatattaacacagttctatttcctagtgtgtggacaattttaaatttgaaattctgatttatttttaatctacaaagtatttttattttttaaaagggaaccatttcattattgaaatcttatgaatgcatcagttaatttatattaaattataagcaggctatctgaaaaacaaggatatagaaatcatatatacacatttttgaaatattagtttagtatttaacatattaacatttcaaaacaaatgcaatgatctagctacctatgacgccagctggtgtcagtggttgtagcgaagatgctgtttctgtttaccatgagcaaacagcatttcttgggtcttaagctaaacaatcacaagttatcaaagtaaagaaaatctaaagacagttcttacttttcatgtgtagaagtgtagtttgggtatccagtcatgccacagtgtgactgtggtcaacacagcccttgtcacaggtgcgtatggtcctaaatagctggcctctgtctttccaacatcttcacttcattgggaattcagtgcaagtgtttgttttgtgagttagtgcattcagctttttttgcatgttattttgaaaaagaa

SEQ ID NO: 160338 - DNA, 1000 bp, Homo Sapiens
tttatatttaacaatatatatttatatatattttctaaatcagtacattcagtttttaacttgtttttttcttcacaaacagaagaactcttacaatagtagactttctaaaataaatactattaaaatagagcttcaaaataaatattctatacaaagaaaacctgtggcaactttgtggtggggtggaaatgggctacagtgagggggaaatgaagttgggatgtggcggggtgggagcctcgagcttttctgtttgtaacatgaaaccaagctgtgggacagtaagaagagaaagcaaggcaagacactgcacgcagttacccacagcagaaaatggcaacgcaagattcatcatcgactgtcacagtaagcagagggggcacaaaaatgcttgtcaaaggcatgaaccagaaggctagtgaggctcgcaggatgccctagtgaatcgtacagtgtagagctgtgctgcccacgcccgccagacacttcctgggacagcacagaaggagaacaggacgcttcaaggtgacagtcatccgggttctggtgcagatcaactttccacgtgtgccatcttggacaagtcattatctagctgggcctcactcgaggtatgatggcgactgacaggctccacaaggctgaaaagaactagccatgtcttccatctcagctctgagggggtgcgtaccaaaggaccaaaggaagggattggtcttcacccccttcctgctcaggaaagccttagttgtgcccatcttttctctgggagggctttgctacccaagacccagttcccagggtgctcgcggaagcgctgtccttcattaacacgggcagccagagccccctagaagcgtcctggatcccaggtgcccctcgagttaagacagaacccccacctaccccaggtttaccagggggcgggaactaaccagcacttttcaaaaaaggtcaagccgaggcatcgtccagccaaacaggccattggtgacag

SEQ ID NO: 160339 - DNA, 1000 bp, Homo Sapiens
ttttttttttttttttttttttttttttttttttttttgctgaaaacacaattctgagtttaatgttttctggaaagagctgggggagcttaagcagcgagtgtggcgctctgcttccgggcacgcccacagcaactcggcttcagagtctgacccgcagaagttctttaaagagagggacttagggaccccagatcccggcagccaggcccagagagggaagcaggattagtcaaaaccaggtgggggatggggggaaggaagagaggcagcgggggtttgggggcccagcgggtagcaagagtgaccctgggcatcaacatggggtgaggtggagaggggctatggggttcctggagatcagagtctggggtggccatgggcagggcgagagcaccgtggagacaccgcaaccctgctccagctggtcctgcaattgccacaggggctattgcctctcctgccacccagctcctgagagtgaatcctgacacgggtgattgggacgtgtacttcctcttgactctggtctcaggactgaggctcacaggagcctgagaaacagacaagcgggagctttctagccccttccagctctcccctgctctgaagcctagaaaaagcccctctcaggctactggtcagaggcctggatgagggcagtgggggcagaaggggtctggatcagccttgctgccaaccaacacaacacacgtggaagcggtgatgcttagcccacgaggagatgggagactgcagtgctgcttgaggtgttttataaaaaacagaagccaaggccccggggccttctggggctgatttgtgtgggaggcggcacagaaagccgatgccagggtggcaggcatggagaccaccccccagggctctggggtggcacaggggtggagcagagccacacatggatgtaccaggagctctgcccctcatagaaacatctgcaggcctgggggacccaggggtccctggccactgtcaggag

SEQ ID NO: 160340 - DNA, 1000 bp, Homo Sapiens
ttttttttttttttttttttttttcaggaaccggtatttattatcaaagtcatattcgatgtcaacaagatgccacaactacaaaaaaaattgcgcacattgcaatctcaatgcaaacagtcaaatggaaccccagtcattaaaaaagtaattcaaattaccccaaaaagcaactgaattttttaaacatctttatacatccagccaacaaattaaaatggttaacaagaaaaaatacaaattcagaggtctcgtatcgatgtttaaaaaaggcaactgcttaagcgtttctatcaattcgaacgtcaatctctcggccactcagcttcatgccattcatcatccggcaggctctctcggccacctctggcgactcgaacttaaccacaccacaccccttggacttcccattctccatcttgatgtcggcgtacagcacgtggccgcactcgttgaatttgtcctttagcatcttccatgtgaaatcgaatggcagatttctcacaaatatctggcaggccttcctggccaccccaggagcatggcctccagctccaccaaaggaacctgcgaagcttcctccgaagttgccacgctccatctcgatggcacggtcaaagctggcaccgccaccgccacccatggccaggcccatgcgctcaatgccagcgcccagggccgggcccatggcggggcccatgcgctcgaggctgttggcacccatgcgctccaggcccatgcgctcgaggctgttggcgcccatgcgctccaggcccatccgctccagattgttggcgcccatgcgctccaggccggtggccatgcgatccatcacggggcccatgcgctccaggccagctcccatacctgcgggcaccatgcgctccatgctcgggcccatgcgctcgatggcagggcccatgcgctccacgccagagcccatgcgctcaatggtctggcccacacggtcgatgggagcggccatgcgctcaaggccgaa

SEQ ID NO: 160341 - DNA, 1000 bp, Homo Sapiens
ttttttttttttttttttttttttttttttgggtgcctgtttattatttttcaaaacaaaacaaaaacaaaagacattcaaaattcccctgtggtggacaactgagttgatgtggctgatccaggctgtctcccaggttgtctcagggagcatcagttgtactagggggtgggctgttgccctggcacggctggatgaacacttgcaccagggatggccatcagaagagctgcaggccagttttgagcccatgcagctgcccctggctccagagaaggccctcgaagttgctgctgctgctgttgctgcagttgccactgccgacaccacagctcaggcccaaggtgtcagtcttgcatgttgagggttccagccgctgctctagcacaggctggtccaaaagatacatggtgtcataattctccagcatgagctctgctgggtcctcggtctgacctggcattcggcctaggggaaatgtgtcccatcgcacgtcttctgagctaacctgccatgcagagccctgcaaagctcctcttttctgggccagaagcctagcattctcggcagtgggggactcttgccctgtagagaaaggccccacctccattctgtcttcctcttcatcatcttcatcatcttcatcctcctcttcctcctcttggtcatcattttcttcctcctcctctacctggtctggcaagacctctttctcctccttctcctcttccttgacatcattaacactgccctgctcctcctgttgctgggcctttgcttcagacccgaagctggagctggctggcttgacgctccaatacaggctgtctagtgtatatggagacttcccaatgggggaggcctcagagccctcctgcaccaggctgttttctccactctgggtataaatggaacagatgcgcagcagcttctcctgctcctcgtctggcaggccctgccccatggctttgaagatgatccgaaggagttgggggctggc

SEQ ID NO: 160342 - DNA, 1000 bp, Homo Sapiens
tttttttttttttttttttttttttggaagggaccactgcctttattgcctctgtgctggggtcccagcctggggttcagaggcctctgggggcaataggtgaccctggacccaaattattgctacttggccaggtcaccttggggcttcccatactgccctgagaatgggtgggatgagggcatgcaaacgatatgcaaatgacatgcaaaccaacccagaggcctctggcacatccatgggtgctggaagagtcagagcctagtggcctgggagggcgacggggcacccagctcaggcccagcctcggaggcaaggtttgagggttggggggtccctgagcatcagccctgcttctgccgctggctgaggaggagcagaagcctggtcccaagacagcaggaagaaagcaggaccctcgctaggcggccagatggcctgaggcccacccagacagggacgggacctgccctgggtcgctcagccaggcagggacagcagggaccagaatccaggtctcctgagccaggcagaagccaaagtagcttggaggctgaagtgacaaacaataaaatacagggataaataaatcaataataaatagaaagcaagcagcccagtccctgatccctgggctgagagcccttccaccaggcccaagtccaggaggagacaagccctggtctttgcgctgggctggccagtccagaaggctccagagggaggcaggcagggtcccggggccctcggcgtgtgcaggtctggctcagttgttattcattatccaccaggaggctgggaagaacacagtggtgagggtgtccggggcccgcaggtggtcgatgaggatgcgctggaaggccttgctgccaggcgactgctggtgccttctccaggaggcctcatcctgccagaactcatacagggtgaaggaggcaccgtccagcatcttctgggcggactgcagacaatggctctgggcccctgtgaagtccacata

SEQ ID NO: 160343 - DNA, 1000 bp, Homo Sapiens
ctagcatcatgggtgttttatttatttggaagtgaattttaactatcaatacaaatgccaagatactacacaaaacatccacaggaacttttttcatcttttttttttttgaattgtacacaaacattcctacataatccaacatacaacagagaaatggtacatctttttctttcaatttgcatacaatggaaaaacaagtatatatatattttacaaagtttaactaataagacactagagcaaattgacagtttaagtctataggtgagaaattatctaataaaaataatcaattttttcagcattagtcacttccataaccaagtgttattctgattaataaacttgctgccaatcagaattctggtatatactcataccattactcaacttgtagtactgctccccaccttagttcttcacaactaacatagaaaattgttgaaaagtaggggcaagcatttgcaaaaacaaacaaaaaatccccagcttattataagcatgaatatgtatgatggaatttcttcccagcaatagacttccaaaccatcaagaaatcaccagaactaagtttgccaagttattttgcctatgtccaacaagagatgcacttatatgtccaacagaggagctgaaaattaaacttagtgtttagtttgggggtgggttgggaaattcagccaccattttaaaatgactgtcttaaaaaaaaaatgaccaccaaaaataggttcactaaatttattttaaaaatcataaaacgtttcttacaaaagagcattacattctgcacactgctctgaacagatgccagggacatgtggactattgttacttttcctccctgtcccaccccccaaatgttacagtgaccacaaagcaaggtgttcacaataattacatggggggaattttttaaaccaccaacaataacgaaaaataaaatccactcactctgctgctgtttcaaaatttcaatgttagtttttgcacgccc

SEQ ID NO: 160344 - DNA, 1000 bp, Homo Sapiens
tttttttttttttttttttacactctacatgctttttattacaagactactgaccatacgaggaaaattcatcatctggtaactacacctaaagcacaagtatttggaaaaaaaaaaaggataaacagattcattaaattatatgattaaatcactgacccaatagaaaatttatataataaagccagaaaaaaagttgtaaaatatagtttacaataattattcacattcaaggctgtacatcaatacatacaacaacgtggccccgaacatgaattcaattcaaataattcatatattagaatttaaataacacagactgaactagaggccaacaatagccagcaaataaccttatataagaataaaaatacaaaagtgtatatcctagtatcattgcatttgttttcataagttcttttaatttttgctttgtctgtacatcacagttacagctacagaccaggtagagaatattacgcatgttctgcttgccacccacctgaaagacgtactagtcatttatcctattttatgttgtgaaggaacagctacagcagctctaaatactgtaacaatttaattttgccaacatccaacttacttacagtcgtaatagaggcttttaccagcacaatgacccctattcgtagtcattctgccaggtggttaggctatgtgggttacacagcttaaaaaaggtctgccttttgtaaaaagttctctgtacatagtttggtgtttcttcatatggaagaaatgagttacggggaaaattcaggtacacacgtaggctcgttcagttgctcaccacagccatctcaacagatgaaagtgctctttgttggaaacagcttcctcctcacaccagttctccacaggcagcctcatctacaaccctgcaattttgggccagaagtggtggcccctcagaggctctgaagtgcctccagccccgattcaggcacttgccacgtgtgctgcgtaagaagggaccccc

SEQ ID NO: 160345 - DNA, 1000 bp, Homo Sapiens
tttttttttttttttttttttacctttttaaagtaacatttaaaattacttcctttaatataaaagaaacacacaagacacaaagaaagcccaataaagctgtgagtcccagtttggtagctgaggaggagtctaagaaaacaagccattcctcagtatccctgggaaagaaggggtgagaggacacagatatcaccaggccctgggtgactgcattgctggggccatgcagggcctagctctccaccaagggaaagtgctgattttccttgtcatggtcctggccttgctcccatgctcgtcctccagttttcagaagtcgtccagttccaagaatggctccttcctttagttcactaacattttcacttaggggtgaaggccgcttaccctgtcgtagtgtcagggtgccaggggagttgtcatcctgcaggatggtgaggggggatctccctagtaccttgctgctgtttggtttccatctattgcgcatagaacctgaagatctgggagtctcagggtcccttgagggcttgtcggagctctggctggccacaggggtttctgtgggctgtcttgcttcctccttggaaaacacctgtttggaggggaactcagtctggttccaaggtggcatctgttcctcaacagataactgggtacccagaggcaagtccaattcagaagataaaggtgcctctgggggcagaacaggctctgggggaagatttgatttagagtcttcagtttcaaatacttcactcagctgtttcaccagtgggcttggggggtctccactgctggtcttcataggtgtccgtgcaataccaagagtaggagagcggggatctgagtcctgggcatgtttaagaccctccagttgctcccctgctggtaggcctggctgtggagagctctccacctggatgggagtgcgcaggatgccagcactaggtgaacgggggtccgccactcgagccagatgcttgttgtgcggcgg

SEQ ID NO: 160346 - DNA, 1000 bp, Homo Sapiens
ccaatttaacaaatgtttattcttaggcaatataataaaataatatttagatataattgacagaaatattagtacattaaaatattaacaatcttgtcaggatataacaatataaaatattcaatatattttaaatatatttcatttggttatagagtaaatattaaattaagtttagtcgcagtaagttacatttgatacatagagaatcttagtaagttagccatcaagttcaaatgtaagcattttaatacttcataaataagttagttaataatgtttatcttgctgaagacttctcacaatctgtgtatgcacgctgtgaatcaagtgagcccaatttaagaacagttacatttaatctgtaatattaatcttcactaattgtataagctactcataagctaagtatctgaaataatgcacatgagctataatttactgctaagtaaagtcttagaagtgcaactgacagctggttcatatggcttcattggaattcaggttttagcatcacttgtcttcctcagaagttaaatactggtaagagggcatgagaagatggaggcctgagtggaggccagtggtttgacattagcaccagtctagggcttttacttatgagtaaaagtagataaccttagagtcacctgtgagtttgaactttaaaaagaggcacggatggagcagttgtagccagccgtactggtaactgcctgcggagtgtgcttggattgatagaacaggttttctcagtatttagagtacatcagaatcatgtggtgggcttggtaaaacatagatatttcgggccctcccccaagagtttctgattctgtaggtctggagtggtccctagaatctgcatctgtgacaagttcccagatgatgctgatactgctcttccagagaccacactttgagaactactggcctacagagggtttgtagagattagctagctctatatccgctatagtaccttgggacaataagacat

SEQ ID NO: 160347 - DNA, 1000 bp, Homo Sapiens
ttttttttttttttttttttttttttttttttaaggattcacaaactatggcattttatttcagagcctttgcttacatttgtacaatatattacataattcttcattgtttgcagatcctaatatatactttatagcttttattctataagcttttttcttcaacattttgctgtcaacaaatctttacagtcctgtacaaatttgaataacttgaaaccattttcaacaaaattagttactgtaagcacacactacaagactgaaaatgcttttcttagaaaagttgaatgtaaaggattctgacacgttagcatctacaacaaaacgcattgaaattcccacgtcgtattgccaggaaacaaagaaaacatgccagccccatccaaaaaaagtacacagaactacaattaaaacagtaaaacagtctgtacaataaagtactgtgtattaacagtgccagatattaaatagcttgaatgaacacatccacaatatacaaatgtcttacaaaggtgaagaattaaatacaagtgccaaacagaacagagattggaatcatacaacataaagtcaatacaagtgaaaacaattttgcattcattttggattttatacaaggcatttaattttataggcctaccacccccattagctatttatatttaaaataaccaccatccttttgagacagttcctatcaacaatcttgaaccatactaatacattacttgttcctgaagtccttttgttgtagctcataataaaataagcaatacaaatgaattatctgtatttaagggaaaagaaacatttacaagaaaacacaaaaatataactgttataattcattatgaataaatatacactttgaactggctaagtacaatctttatacattgtttaagatttaatacagtttattagccattttcttttttcacacaatgtatatcaaaattaaaaaaaaatactgatttatagaaaaatggcaaagtac

SEQ ID NO: 160348 - DNA, 1000 bp, Homo Sapiens
gctgtgatgttctttactgtactgtccccagttgaagatcccagctccacacccagaggctacatagaccacacacgccagtggggaccttctgagccagccaaagccacagtccagacacctgttaccaggtcctgcccactttgcctcacaggactctcttaaatctatctgcgctctccccatctgtccagccccgacctctttcctgatcttctgacctgtcaacttccctcccttccaccctgcacatagcacaaacccgcccatctctaccctacctacaaccttgccatggctcccccagtgcccttggaagaaagcccaggcccctgtccataaccttcaaggccctactgacgcccctagccccatacctcacagcaattctacacttacaaagtcacatgccatttgttgaggacctgtcctctctcttgctccctggcccttgtatgtgccatttgctgtgcctaaaacgcactcctatccatgtctagctggctccttctcctccaggaagccctccctggctgaggcaggcatcacctctggactcccctataccagccctgcccagtcgctgcctgaggacacatctgcctcctccattggactgtgagctctatgagggcagtgttggggctgtcttgattaccactgtgtccccagcacagaggatgctctcaggaattgaccaagcctcttccctgaagttccctgaacttccatggttccccagtgccatggggagaaagtccagcttattcattttggccccaaaggtgctgtgtgaataagctccgcccttctgtactgcacagacttcaaccactataatctgtccagctcccatgccttttctcctgctcatgacacttgaccttcctttgaggaacccctactaagtgcagctctgagtctggccactctagagtcacagtgattggtttagagaaaatcacatggcccatttgggccaatgagagtctgccctggg

SEQ ID NO: 160349 - DNA, 1000 bp, Homo Sapiens
ttttttttttttttttattagtgaattagtttatttaaaaccatcagtttttccaatgtgaatggactggttcatatcacaccatatttagagatacaaggtgattataactaacgtgtctacaagacatactgggtcaaacaatgtgatcaatccaaagggtatctttttaaaaagaatttaagtactcagctgcaaagataagttcactaatgagattttctttttttttttttttaaaaaaaaaaggtttttaatgagtcaaatttattacaaaaacttagtgtgtaatcaaagccaaatacattcctcaggcatgccagcggcaagcaaaataatgttaatagaatgttattaaaaaataaaactttttctgaatgatatatataaaacatcatggcacattatcatcatttgacaacagaaaacaggaagatatgtttcaatactgactttttgttgtttcaataaaggtaaaaaaacaaaaatttcaacagaacacataaattagaaattctagagggtaagccataaagaggtgttctcttccatgcaactgccagccgggcatggtggctcactcctgtaatcccagcattttgggagactaaggcaggcagatggcatgagctcaggagttcaagaccagcctgggcaaggtggcaagatcctgcctgtacaaaaaataaaaaattagccaggcgaggagtgcacacctgtagttccagttactcagaaggctcaggtaggaggatcacttgagcccaagtcaaggctgaagtgagccaagatcatgccactgtactccagcctgggcgccagagcaagaccctgtctcgggagaaaaaaaaaaaaaagcatgcaattccctacaaataatgtataatttcaatgcatgagaaaaagcatctttacaattcgaatatatctttcagccagtaaaggaacaactccgtaactccccatctgctttatctacaaagacttagtgattacacaa

SEQ ID NO: 160350 - DNA, 1000 bp, Homo Sapiens
tttttttttttttttttttttttttttttccttttttcaccatatcttttccaatggaactttggagtcttggttccggacctgctgtatttctaagaggaactcttcccatcaccatgctgccttctgagctaaaggcatgtgcttctgaattgtacagagacagaccttcaggaaaaatgttctgaattttcaaatgtacatcttttaaaatgtctaacctaaaaaaaaatgaacaaactgaaaaaaacatttgttcctttgttattaaaaatgactggtctacaaaggttttgttttagtagatggggctacacagtacgtaactgagactgaagacaaaaatcgaaaatttgtggtttctaaaaagagaaatacgatatataaggttggcattaccagttttggggagaaacactgaataagttaaaggaaaaaaaaagatgagaatgagtgatctgttttatcttaagaaacttttgtcccatacagaatctttaaaatagacaattatataaaatttatctattgttcttatgacatttaaataagttaacacacagtggaaagcgtggcattagttgtcttcttcctcatcccctttaattactggagtaccatccagctttttcagtttgggcactctcttggttgcttcttcaatccagttattctcagcagaatgtttctcttccaagggattgcctacaaacaccaggtcttcgaggcatggcagttctgccagcttcacaaactcagcccagtcttttaccaggttattagacatgtagagaatcttcaatttcttcattatgtggatccctttcaacttctcaataaaattgtaggagatccacagttcttctaatgtgtcccctactgcctccagtccatttaagttctttatgttgtttcttcctaaagataatatcctcaagttttttaagccattcaggttggcaattttttcaatgcagtttgtagacagtgaaagcttctc

SEQ ID NO: 160351 - DNA, 1000 bp, Homo Sapiens
gtagttggtgtttgttatttattgattctccctccaaaggggcctaagctcgacaaaaccgttacagttgtcagaacccagccacagggctcagcccccttcccccacgtcacgtctgcatcactactgtgggtgagcctggacggacgggggctggggctgcccgtggcagcggcaagggatgctttccagagacagccaccacgcaggagggaggatcaccccaggcaacccagacacgggtgttcacatgtgaggctgtgagctccacatagcacaaaggaggcttgctgactttgggcggccatgtctgctgggacctgggtgatccagtgcgtgccacagccagaagcaccattccctgcatatggccactagccaccctggggtgggacagcctgtctagacagacagcaccttgggggctcccctgagggtcagtgagggcctgaccccaggcaggactgcgtggacgctgttctccagccgggacagacctggcctccgctgccttctgccctactgcatgggctcccagcctggccccgcacaagcctgggtgtgatgctgggtgcttccagggcatccgcctcgcttctctgcctttaaggcacaagcaaggggggaaaacatccctcagtggctccccatatccgtgtaggccacgctggactgcaaaccactgggtcatgaaattaggtttgtaggccacaaccagccttgtgttatgaaacagaaaacagaaaacatgaggacatgtaacatgtaaaaaaggaaagtacttgttcacaaaacttttgagttatgtgtgtgtgtaagaaccagatcagactggaaaaaactctctcccactgtgggttcactgtcaacaaaacatcaggccagccagtgtctaggctgtctcctcaatttccccaataatgtgcctcacattcctcacagaagcctcccaggcttcctgcacattctgtggcatttctcagtgacctagagggatctt

SEQ ID NO: 160352 - DNA, 1000 bp, Homo Sapiens
ttttttttttttttttttttttgaaaacttcacagttactttaatctgcacgggttccggggaactcctctgcccctccccgctccccttcaccagcctcccaccgacctggcgtccccaactcagcccaaggagctgtcagggattggaggcggctgggtcctccggcagaacactaagacgggcccccggggcggcccggctctgcccggggccgaggcagcgacagcagatgcccgaccccgaggagcccactcccagtgcgggctgagggtcagcagccccgggaggtggccccgagccccggcggtcgcagggcggggcctccgccagtcccgggagtcctctgcggcgcagggctgggctccagggcagcgggaagaggcaggccggagaggcgggcctgggcaggcagcagctcccgccgcggcgcggggagcaaggtccggaggggccggcgacgctgccaagcgcccgcggaggcactacgggcggtacatggcaaaggccaggagactgaggagcagggtgaagccggccaggcccagagtggcggtcaggggaaagaagggccggtactggatctggcagtaccagagcagcagcaacagcaggagcagcaggggcagcagcaggctgccgatttccagcccggaggggccgggctcggaccccggcgggcaggggggatttgggggaccgactctcgtggacacgtggcagtggagaacgcagttgggagggaggtgaaggctgcccagggtctgggtgtcgtcgcctagcagctgcccttggtagatgagtcgcacctgctgttcccggccgggaaactgggtccttttcaaggagccaatggtgtcgtggggccaggccctggccacctgctctgaatcattgaggaatttcagccgtagcacgaggggctcctgcggggagtccggggctggcggtgttgctgtgaaccccgtgctgggctctggctgtgcagcttgacctctgt

SEQ ID NO: 160353 - DNA, 1000 bp, Homo Sapiens
ttttcatggtacaaaaatgtttatttaaattaaatatttgcaacaaattaatattgacaactgttccaaagtatgagttgttctttcaaaaaaacgaaacagtttagcttaatgtctgtgatactgttttatgagattattcatacatgctctggactgcgcatcagtcaatcatatcatcaacaatttactatttattaccaaatggcatataaagtaatagcataaagagtaatcataccttataagtgattttacaataggacatcttagaaggacaaaaaggatttatcaacaatacaaaacataagataaaaataataggagattatataaaacatatttcatacaggaaataatatgctaaaatcaaaaaaccaacaactgtctttcagcacactgttatgcatgctcctttaaaggaggtttgggggaaagatgaaaatattttgggggcaggggtccagggctcagaaacatttttggaatcacagtgagtttctgatttgcgggaagttgctctaaagcactggctgaggactttgcctgaggacctggctggtgaggaagacaaattctcacagcagctaaaggaagcatgcttgggataagtcaggggctgtttcagttagggaccagttcagcagtggaggaagagcagaaagaagagaaaaagaaatcccagaaaagagagtaaggaagctggagacagccgggaaggaagcaccttttgaatctacagaggggaaagtgtgtatccagatttgaagacagtgactttgcttggttgcaaagtccttttaggtaccctgggtctttggtcattagaaacagggagttggcaacaagttgtcattgttaataaaaatatctgatttagactttgagtttaggagttgcatgaagtgggcatgtgtctctcacactcctggtatacattcagactgtgcatattcttttttttttttttttcttgaaatggagtttcactcttgttgca

SEQ ID NO: 160354 - DNA, 1000 bp, Homo Sapiens
ttttttttttttttttgcagtgagaataatgtttattgagaatggctcattacaaacaaaatatatataaaatctctgcaatgcaaaagatccctttcatccccgtggctagaatgaacaaagcccaactgtcccacatggcttcaggtgctgtgctggtccccagcatgtgaacaggctgggcagctgtcggtgtcatgtgctgtgggcaaaagtccctgatgtccaggctctctggctccattttcatgacttgtgcaagaatgcaacacagtgtgtcttacatcctgcctctgtgaccctccctaggcagatgagtcttgagaatgggcagctttctcattcatctttcaggaaggtgacctttaacttgtggcatgccctgagaagccatcctctgggaccagagactgagtgtttctaaacattttggctggactgaggtgctgttaccaccctccatgaaggccactccctagtgacagccctaacagcatgtgcactgtctaaatcacatcccaccatcctgaaaacttcatttcctcccactggtttccttcatacagctattctaacaattttaccagaacaccacctgaagatgcccacaccccacagctgctgtgcatgggtactcctgggccacctggcattaaggcaatggagatgagaccagtctagagccaacaccggtctctgaaacccagaagggctgcccaactaacagcacctccctcttggccaaaggctttgtctagggttgagaagcaatttggctgggtggtctcactgccctcctaaacagagcccacctctgcccccagagtcatctgtgctccaaagcaatgggcgggggcacagctgccaccatgccatgccttgggcattggaagagcaggacccaggagtgcagggatggtatcactgttgcccctttgaaaatgacccatttcccactttgggaggccgaggcaggtggatcacctgagctcaggggttc

SEQ ID NO: 160355 - DNA, 1000 bp, Homo Sapiens
tttttttttttttttttttttttttagaaaaacatttattgtaatcgatcacattcaagtcgtagttctgaaagcaaagtgaaaacacacagtacagctatgcctcagtatccatgggggatgggttccaggactgcaacctcaaccctcagacaccgacatctgaggatgctcaagtccctgatgggcaatggcatagcgtttgcacgtaacctacgcacaccttcctgtataatttaaatcatctctagatttcttataataccaaatacaatataaatgctatgtaaatatgctacaccatattgtttagggaataatggcaagaaaaaaaggtctgtacgtgttcagtaccaatgcaatttcttttttcaaatatttcctatccaaggctggttggatctaaatgtggagaccacagttacggagagctgactgtactggggaaatctttagggtagaaacatttcttagagatggtttatatcacaccacttcagaaagagcaatacaggcatacctcattctactatgctttgtgaatactgtgttttttttttaaattgaaggtttgtagcagcctggcatcaggcaagtctatttggcaccattttccaacagcatgtgctcactttgcgtttctgtgtcagcattttgaacagtaaatatttttaaattaaggtttgtacatttgttagacataatgctattgcacatttagtggactgcaatatgcagtaaacatgacttagatgcactgggaaactaaaacaatgcgcttccttgctttattgtgatgttggctttaccgaggtggtctggaactgaacccacaatatctccgagatatacctgtactttttactaaaaatatttcatttgagaagtaaacctcaagaactaccaggacttttcagatgggaagagcgaggccctggcagggcgagtctaggtgtgcagcctagtgggggccggggtcaagtccactcggtatttgtgg

SEQ ID NO: 160356 - DNA, 1000 bp, Homo Sapiens
ttttttttttttttttttttttttttttttttttttttttttttttttttttttttttttttttttttttttttcttccttattttacagctttattactgatttccctctaaaaagagactcaagtgtggagctgactcatctatagattaaggaatcacaaagtaccatagtcacttaacaaatgcaaaaaaaaaaaaaagcaattgttttacctttcaactgctgatgttatgtacaatctatcacaaaaagcatagctgtgcattcatgagctgattatatcaacctctagaattttagaaacgagcacatctaagcatatggatactctcttaccttacaaagtaaaagcattttctattttaaaatttttatttctgtgtaaaacaaagaattcctagaggtcaaataatataccaaacttaaagcactattaagtcatgaaacaaagaagattctgaggtagaagtcaagcaatataatccacagtttcaggtattcccagcaaccatcgcatttcgcaagtaagatctattttttttaaagtctcaacttccaaaaaatcaataatccattctgtaaaatcagatgtaaaactatgaccaacagaagacacccaaacttttctcatggtaacagagtaaatgcttttactaaaagctgccaacatttctatcagtagtaaccgtaaggaggccgctggttgtaaccataatgtccatattgctggggatagtaaggttcttgtctgtgttgcgggtagttgttaccccaggatcgtccatgccactgattggatcgattgtcacttggccacccccatctgttgtccctgcctctgaactgtctgttgtcttgcaaccgattgcctctgtttctttggttcccaccagctctgctattccattcctcaacaattggaggagactcaggagggcgtttcaggtattcctgatactccttgtcattttctgtgaatctactagcaaacatctct

SEQ ID NO: 160357 - DNA, 1000 bp, Homo Sapiens
catggtccaagcatgtggtgatttttattaagaataactttggttctaagaattccaccctcaattctttaatactttccgttaaaaacaattatacaagagcaaatacaaaaaatattaaattatgaaaaccaatccattaaggctccctttatatatattatatacactcaaacaagtcaagatttttcagagtagaagaataaggtcgactgttatagcttagaaagcaacactactactatgagactataaaacattaaactattttaagaaaaccacgctgtggaaaaatggagccatttttgtcaaaaagtggctcaaagcacaaaactgctcagatgttcaagagtcctaggagtttgggctgcacagtattaaggggtgagaggagaccgacagcctgtttgaatcaggcttgtgagcccagctcatctgacaacttcaaagagcttctctgcctatacattccaccgtttagcataagacaccactttacgctatttacaagtctccttttggccagattttgtattactaattacaaataattctgcagatttgagtgagattaggaaagaaatgctttcttaagtaacttttttttttttcagtgaagaatgaattctagttaagctctaggaacagaaatggtccttctaaaggagcctaccagggcccctgtgaatacgatcaagtggcagaattgcttcgagaatacagatttcaagatctgacatctagttagataaaaagatatgagccagtcccgaatcttcattttacaaacagcatcgctagtccacagacacaaagaaagaattccagtcaacgtgcaatcagaaatgggcttttcaagatcatcagtcatcacacttccttctctcaaaagaacgatgggaaaaaatagttaccattccattcttcgaaaccaaattactgtagagcaacaatttttcttaagcatttctcattttattcaaataatacttgctgatga

SEQ ID NO: 160358 - DNA, 1000 bp, Homo Sapiens
tttttttttttttcgagggagttgctggtttatttaggagcctgggtccagcccccagggaccaggctgcactgctgagccggcctcagacagagacgggtcaggtcctgactggatgtctctgccatcatggaaagacgggtgtgcatgggccagggcagaatcccccagtgtatagggcagcctggcatcatcttggccactcagcagcacatgggggcctcgggagactccaggggtgtggagcgtgccgaggccgttacgaagatcatgtcacgcacagttctgctgcccagagcgggggcttactgctgtaggagcgctgcctgccgtccgccccgtcggcttccgtggcctcggcgtctgtggcggcccccgcctcgcagtggtaaggggtctccagtagtttcagcacccgccgcacctctgagaagtccccgcgctcggcagcctcgatggcattctgcgcgatgtagttcctcagcacgtacttcgggttgttggcgtgcatcacgcgcacgtgctcagcctgccaggcggcagcgtccccagcgccttccaggtccttgtccagccgggctctgtacgcctgtagccagtcagcccagtggccctggttcctgctctgcagctctgccgcactcagctgctccagccgagactgctgctccacacgctccagctccctggcgatgcctgcccgggtgcccataagcgcgaacagctgcgggtttgactgcgccagcatcagcatcatggatagctgccggggatccatctggggccggaaggccagcctcagctcctccagggaggcacactgctccatcagcctggccaggaattccgccaggcctggcgactctagctccactgggaaggagctcagcaagtagaaggtgtttgtgaagtcggcaccggtcagatgcatggtctccaggagcttggacaccagcgccccgtcttcctccagctccacctgcacgaggcccagcttcct

SEQ ID NO: 160359 - DNA, 1000 bp, Homo Sapiens
ttttttttttttttttttgtggttgaaatcgccgctcgtatttattggaaaagcagaacagtatgcacctgtaggggtgtagcttccatggttctccaagcacgggctgtacattacccttaggctgaccattcccttgcgggggcgcaaaactgctttgaggaaatgtccccaggaggaataaactagaagacgcacctgctatttcaccatactatggagaatacagctaatgaagtggtggcagaagcttggccgtgtgagtgccccagggtaaaagtctctcttctgtccagtccagagcagagacttctcccccgtggacagcagcctgccaccaagactcaagcaacgtaagagtcatctccccagactggctgtcagagcaagaagcacccagccttcctaaaggcagaagagtggaaatctgacagtgcctgccatttccggtacagaggacagcatcaccaggccctgcagtgtctgggggggtctctggggggcagatcctgatgagaggccaggagcctttactggtggaagagcagggaagggcccttgttgggttgaaaggccatgatcagaagataacccagaaaaggccacccagttgacttcttaatcacacagctgggacccactcaaatgtgcctgagcaataagtctagtgaatactctcatttttacttatagtagtgtcttaaaagttttatttccagaaaggtgaagtgctttggtggtgtaaggaactgacgtaaggacaagtgcactgacgtacacgtattcctatcggaacaaacaaggcttgttgtgggggaaaagtgtttgcataaagaagaagagattggaatggctggaatgagccctttgggagcctggctgggagtgaggtcaggtcacgtgatcccagtaggtaaggaggtgtctttgcagaagttcacagcgtcttggagcacctcactttgagttcagagacattagaaacaattactcagcaaac

SEQ ID NO: 160360 - DNA, 1000 bp, Homo Sapiens
ttttttttttttttttttgaatgctcagtatctatttattaaatgaatgcacaattgaaagagtgaagattgaatgtctagatatttgttcctctaacccacaagctcacatgcagcagagcacacgaatgtgtgtgtgccaaggccccagaggctggatgcccacatatgtgctgatgcatgtgccctagggagtccctcttggttaacatctgtttaaaatctctgtcttcttcttgatagagaaacagcatggtttcctagactgaattgaagaatgaaggtgagagtacaaacagtgggagagacgtttcctcagctgtcagaacaggaacgacctgggttatggaagcccagaaagggaggaggacttcttttggtcccagtgaaagatgcttccagaatctgtagccttacttatttgcttggatctcactggaataacttggtggtgaggtcaccggttctggggtgatcactgggtttgctgcatagatgtttggatagatgacactcacattgcttgattgacagcagaccaactggcagccaaagtgggaagatgcgcatgcgatgccaaactccaggaggcagaagaccagcagcacgccagaaatcgccattccagggttcacaccccaggcgtaaggataatagtcggggtaggcatatgggtggggaatacttagatctgtgatgaagagtatgactccaactgcagagcagattgcactgacgatgttcaagcccaaactgccagacagcaggcaataagaatatggctgattttctgctgccacggagagagatcctgaaatgataaaccacaagcctccccagaagggaaagcctccgtagaatgaaatagacaggtattcccctacgagaaccgtcgccatgatggagccgaggccgatgtgagccaggccaatgatgatctggatggcccccaaggttttgccttctttcagagctttctgcacaggctgcccattcacat

SEQ ID NO: 160361 - DNA, 1000 bp, Homo Sapiens
ccaaaggaaacaaacaactacttttattgttaaactttcaattcacagattaactttcaaaggttcatatttcccacgttctttttttttttttgagacagggtctcgctctgtctcaaggctggagtgcagtggcacgatcttggctcacttcaacctctgcatcctgggctcaaaaaattctcctgcctcagcctcccaagtagctgggactacaggcatgcaccaccctgcctggctaatttttgtattttttgtagagacaggatgtgttccccaggctggtctcgacctcctgggatcaagcgatccacctgccctggccttccaaactgctgggattacaggtgtgagccaccgcactcggcccctatttcccacattcttaatgagaccccatccacagtggtccaatcaactttcaaattagctctggggaaaaaaatacatttaatgaaagctagaaaacctagagaaggtcttgctcttcacctttcactgcagctatggacagctcggcaccacatttgcaccaatcagcatgtttgcccatgccctgccaaggagagaagtttacatcatcactgacaaggtgtgttcacctattctcatcacgtaacactgatggattccatacctaatttatcaatctaagacattactggaccacgtaaccttacatataactacctgaccatattttcacatgaagttgctgctgcttattatacatcaaagttcacgtcaatgtggcatgaagtcaagaggattccaagcaaactccatcaaaaccttggggctcacagcatctcccagtgtgtagattttcacatctaagttctgaagacatgatctaagcgtggaagagcttctgaagttgaccactgatcttctgagtgcaagtcacatctggaaatcctgtaggcaatgtcatgggcaaaattgtgttcataaaactgtgcttaggtctgcttatgatagattatcacgtcacgaaaaa

SEQ ID NO: 160362 - DNA, 1000 bp, Homo Sapiens
tttttttttttttttttttaggccagagcaggctttattggggccgtgtaaaccccagggagaggcaggacgtggaccacagagagtcatgtacaggctgcgctttcacttgtcttctctgtctcagtctcctgaagagcccgaggaagtcaagtctccccaccatgagtgaggggtctggtctgacagttgggccttcagagccaggcacgtggaccgtgtcagaagcgccacctggtggtgactgggatgctggcagggaggagctgagggcaaaactctagtggaaatttcccaggtcggtcccacgccccggtgacagggtgaaccctgagaggagcccccaaactggaggcaattgtctttgaggtaaccactcaccccagcttttcagagaccagaggcaagacatttctggctaagagccatggatagttgttccatgcgttttgtggtttcttatcccaaaagggcatgaagtcacagtaggcagtgacatggtaaacagccagggcctgagagggagtcctcatccctccctgcacaacagatggcatccctgcttctgggcctccccagctgcacgaacagcttctggtggaagaggcctactcgctgtgtgactgagaggactagccaggacagtctggtttgggtccactgagccagtggatcagtgtcctgagatgagtctccagagatgtccccaccagcttgctccattggatggtactgaaaaagggatgggacttgagtttgctgacaccaccttctcccatgcccaggcgccgggtaggctcgaactgcagcagctcagtcagcagagaggccgctgggcgactgagccactcgggcagctggagctgggtgtgggcctggattcctgaagggtggctctgggacagtgccattcccgtcagcagttcatacagtagagacccaaagctccaccagtcacaggcttccgtcagctcggaaatcccacccacctctggggcgc

SEQ ID NO: 160363 - DNA, 1000 bp, Homo Sapiens
tttttttttttttttttttttttttttttgagtttaattccatttattattctttaaggatacatacatggagataaagtgatgaaagacaagaaggctatggtcaacacaaagttcagtacaggggttccctctatcagacagggatagagataggttcaggaaaccgcacacggtacctcaaaggaaaggcaataaggtgggtggtaggcacacaggggtttgtttattgtcattattattactctttatactttagcatatatattatatgtgtatatacatatctatattccattgcatgtatgaaattttttaaaaattcaaatggcttataacaaaaacaaattatgtataatgtctcaaatggtgaatcacagcctggaggctcttaatttacctccactctatcattgaaccctggctaaaactgctgctttgtttctattcccctcatacttgagagtagagatattgccctgctctgacaacacttaccacattttaggggcttgatccatgctgacagaaaggatgaacaaacaaacctgacatgtatttctagaagaactaggaaaactctgaagatttgaatcacaagtaggcagtgatcattttggtttcacacatttctgcaaacctacagctcgttccctctgatcacttcctccaccctccttctgttctggtgcgtagggcttgaaatcgttcagtgctgagatcaacctcaaacaatgccttcagaaatactgttttcttctgctttctgatgtggctgctacaaaggtaataggggccgcagccactctgcccttgtcttctgcacccaattcagagaacatggccaccagcctgtggcttcagtgtactcaggagatcagtcatccatttgaaccaccccaccccacccaggggctgagtgatttaactccatcctcagtcctgatcactgtctgagatgaatctgtggtgtcctcccaacaccctcgtgcaggacctc

SEQ ID NO: 160364 - DNA, 1000 bp, Homo Sapiens
tttttttttttttttttttttttttttttttttttttttttttttttttttttgtctccactccattgttttattatgtacaaacgctacagaacgagggggacagacacgcgtggggtaagaagggcctggtgggaggagttcacagagcagacggtgcactgggaccaggagagcagaacacaggccataactatagggcaggtggggcaggaacgggttaaaaacgagatccaagccagccagatcgcaggaggtgcgggggcgtcgtcccccttctgttctccccccaaggtcacagtgcatgcaataaaatatatatacaggagctagatccgtcctctgcaggggctctgagggtccagagctcccttcgggtggcgggaagccagtggcgctccctggcggccaggccgggctggagccacatgcgtcgggggagcgggggtcagtcccagccgttgtctttgatcatgtggttgagttcaatgatgtacttcccctctttgtacttctggctgctctcaaaggcctgttcatatttccagcccaaagtggtcttgcagttctcgcagtggatgtcggcgacagcatggaggccggtcagcagcacccgctcctcggctggcccgcagcccacgttcaccactgagttgaagaggtaggcacgcccctgactgccctggaaggacttggagatgaggtcgtcgtggttggccaggtgagcgcggcagtgggcacagctatacctccggtgacaatcatccaagtaggcctgaaacgtcttgggctttgaaatccgcaccatggcgggggccgggggcagtggccccacgcggggagcggcccacggggagcagagggagcccagtgcctgccggggagggagtaggtgggctgtcaggacctgggccacacacatgcgaggcactcccagagccgtggggactcgctctgtcacactgggctgctctctcctttcccagagccagcagcctct

SEQ ID NO: 160365 - DNA, 1000 bp, Homo Sapiens
ttttttttttttttttttttgaattgtaaaaaactttatgaactgagaggtcctaactccaaaaagaacattaaagacgaagtgtaagagcattacaaatgatcgccaatacacacaaaggcagagttgcagtgaaaatcaacagccagctgaactgtgggtgaaattccctttatataaacatggccttataatcagatgacctcagatgggtctctggtgtgtacaaagaaagcaaaaccaattttcccatgagtgcctctggacactcatgtaagagttacagatgttgactacatttaaacatttatcatgcttccaaaaacatatttgtaagagaaaaaaatataaaaataaaaatgtacaaagttctttattaaaataatagcttaaataaatcctctgtcaacaccagacagagtcagtgactggatctagactctagagcttagagctttttacatagttacatgaaaacatttgaatccgtcttcacagacagtgccacgatgacaatctggttaaaaccaataagccatcttccagatgcagcttaagagttcaggcgagaaaaggaactgaggaaaatgactgtacataatatggttctcattctatttgccttttttcgtcttggctgtcttctcctttctttttttcacatgtttaggaattttgttttttcttttctctctctgggcttccttgaccatcttttttctttcttttttatcaatgtcagggtccgtggtgtgtttcttggggcgggcatggtctccctgctcttcagagtctgtgtcagagcactcagagcttccaatatcttctgaatcagaacaagtcctttcctccacttgattttctaggagtgcagggaccttctgaactcctgacaaatctttcttcaatcctgtaacagtctggtatagaatattatcttgttgggcattcatggccatgtcctcttccttcaatttcataattatgtccatatccctct

SEQ ID NO: 160366 - DNA, 1000 bp, Homo Sapiens
agccattcacctttatttcagagtgttccttggttacagggaggggtgtgcaagagcctgggctctgggggaggggctgggctgcccagtcagagccggcctcagccccctcagccatccagggattcgaaagggtgcttggtctcaaactaggtgctgactctgagggctttcacggtcccttgaacttctgatcctccttttcctcaaaatcagtgctaggactcataagttatggagtccaagattaacaatgctaaatcctcaagctgactgaagaatgccgagtttgactgtgaaatagaaatgttaaaatacagaaacaacccttctattgtgactacctgttaaggtcctgcaattaatacaacgaaagtaccatttttgttgaaaagtaggtggttaggggcttccaaaagcccctggtagctgtgcccacaaaggaaaacgagtgtagacacgaaggggaagaaggctgtgctcaacttgttagaatatagggctgtttctcccgagattgaggtagcactacaacgcagaggaccaggcaggccagagtggccccacctgcccttgccccctctaggctaagtgaaacagctagagagagggcggcaagcgcagggacttgacctccagctctgtctagtcaaaacactttaagatgcgctctccaatcccaataaaatagaccccttgagcaatcccaaagagaggtgctatgaccagtgcccggcagccagcgcctttcatgaaggcagatggtccctcctgaatccagagtttcctggcacagtcggtgatcccactgtacatgtcctcgcccaggcctttcttgagggtttggattcgagttttcagaacatctagaggcgtcactgcgaccgcagctatggaacctgccacacagcctgacacgaaggaatgtgcaaaggacgccttaccggcgagctcgttgaaccccaggttgttaaggttggcaaacagtgggaagtagatg

SEQ ID NO: 160367 - DNA, 1000 bp, Homo Sapiens
gaaggaccaaaaaagtttaattataaacagtcttacatcttgtaggaaaacgcaagtgaggcaaccactgaaggaactttataaaagcatttgactccctgtaatatttgtagcattacctgagtattaaaagtaacagatcaagaaaacaaaggtactcttaatacagtaatatacaatccagtgctgccaattccatttttagttaatgaaagcaaattatacaaacaaagtaaataactaaaagaaaaacaaaaaaaggaggggggctggagataccaacaatactaaatagaagtcgttaactctaaaggagtttagaaaggtaagttacatccacaacaggaaaggatataaaaatagaggaaaaatttaattccgtgagtcaaccccggtaacatttcggattattaaccagataagtaaaaagtggtagagtgggcttgactgaaatagttcatttaggatgagaactttgtgtatagttgagtcaagtttcactaaaatttctgatcattggtatgtcaatctcttgatgaaaaatcagtacctgaatatgtctttttgtttttttaagagacagggtcttgctatgttgcccaggcaggatttgaactcctgggatcctcccacctcagcctcccgagtacaatacctgaattttaaatagagttattgtaagtcttatgaaatgagattttgctgcactctgacataagataataaaagacagagcaggaattcattattatgagctgcttgatcagttttaaaccactccatttgatgaaacaagtgaggtccttccctcctgaccaggctgtggaatgctgtcttccccaacccccaccccctgcaaaagagcagaacaataaggcaattgctcattttactttgtttttatttcaatgtaacatgcagtaaaaaaaaaaaaaaaaaaaaaaaaaaattaacaggatttattagcatttacaatgcttacaaagaaaaagacttctaa

SEQ ID NO: 160368 - DNA, 1000 bp, Homo Sapiens
tcgagtttttttttttttttttttttaagagcaaacaaccaaactttatccagaaaagcatatttgtaatcaccactaaacaatgaggcacatcggtcccctctccccaaccaccctcactcttcccaaacccactctctcttttggcttttatagaacactgtagaaatcctttcctgagtctgcaaatggccccagactgggatgggagctgcccagagtagtcttgggctggactgagtcctggtgcccagagagggagacctatgcaactgcctccagtatccaaaagttctgggggcaggtcgggtggccacccctatggcacagggccttgagggagggtgagtgtggtggcggtcttacgtgttcttctcatacctggcagacagagtgagcacaagccgctggaagccaagcgggaaggcacatctagaagggcagtgagctctggaatgctacaggcacgtgtggatggatgaggctccatggcggccaaggagatatctgctcctgagtaaggtcacctgaccacagacagcaccaggggctggggggctaagaaggagatcttgagaaggatggacctgagctaaagatgtaacttagatggtgatctgaaaaaaggaaaaaagaataaacgctggaactcaaatccactgtttagggtacaggagtacacagctaagttccaggtatccagaatcttgtgtccaaatcatagcacaaggagaacaggaattctcttgagttaaggcaaaatcaatcttcacccatctgggctcttccattgcatggtttggaaaggaaggggctgggcagagatcattcctctccccatctccccctactgccagtgaagactctgaaagcttctgcaggccaaggccagaatggtgttgccagcccagggcagcgggccctgagagcggtcggtgtgaccagctctgggaatctccatggcctcagcaacatggaaaccttacaggcccagccagca

SEQ ID NO: 160369 - DNA, 1000 bp, Homo Sapiens
cataacttcacaaactcttgttgtcatcaggccatctggggtgatctaaatgactaggaacaggaccatagggtaggacatgatatggagggacaggacccacccaaccctggcccccagcccaaactactctggcgtggaaatgctttattcctaggatgagagtagagggaaaagacggaggggttcccaggtggtgtaagtgcttcctaaggactgccctctggggtcttggggtattgcaggcttctcacaccccaccacccatggggccaaccgctcggccagccacactgtcctcagagtgttcccagcaaggtcagcagagacccagcaggtggaggaaataatgggagaaaagagttgaaggtgggagtggggaatgggttcacaatgcatttgttcagggatctttactcattctgtgatgaagagaaggtgacagttcactggctccctgggggtctaggagacttgggcttggctgaagagggacagacactcagggcagggctccatgccatcagcttatcagacagccacctttctccttgaagggattcttgtcctcagggatgcctttgagaaaaggatcgtttcctgcttgggcctccacgtactccttgatttcctttcccgctttggaaatcggaattcttgtgtttttcacttctttcttcagctgctccacctccatcttcaacaggtccttctcgctgagatcctgggccatcctgccctagacagacctgatcctgccacagaagagcacactctccaagtcacttgtcctggactcaggtaagtagtgtttgagcctcctagttcttcatcagctgaaaatcttcagataaagcagatggccccgcttcgcctgctttctcctccttcccttcccacctctgagcatgctctgaggctgtccttcctcctgaggcaagtcctagaccggcccctaacctccttaaccaagatgctttgtgttgcccattggatcccc

SEQ ID NO: 160370 - DNA, 1000 bp, Homo Sapiens
ggaatttccaagaacatttatttcaccattcttaaggtggttatgtacaagtacatacataaccaggagagcaacccgggccctcctggccctcgattataaaactccgatggtcaagacaggtcccacccatcaacccaattacaccctgccgctccaccttctacccggaagccccgattaaaacgttttaaataatgaacggcctggctggcttgcagtttgaatcctggtttatttaagtagcattcaggagttatactgtaaataaacatcattatggctaatgactaattaaaatcaccattcattacaaataccaaccaggttagataatactattaactatcttttccccttcggtctggggttcatattcttccttttctggaagtcattttcatggataaaatatttagcattttttgttacctcttccttcaccaactgtactcaacacacttctgtaaacagagtgagaacctgggttcatggacaagctcttttccacttatcttcgggttaaaccaaaactttttcagcaactttgcccctgtccaagttttgcagaacaccagctgcctcttcctgttctaggcattctagggctagatacctgtgaacggacttcaagcattaaagaagtcatcagcatttcctatacctcacacacactcatttgcccaccctgaacttcactgacattaatttaggagcctgccttttgcctttcacatgttttctatttcccccactgtactgtaaaataagatctgccctgacattaagaaaaaaggcaactgttaaatttacttttccctttaaataacgggattttttccttttctataagattagcaaaatatttcacaatacctatattttttcccttaaataaaaatgtatgcaaaattactataatagacattgctcaataggtgctggtaggtttatcagcacactcttcctcctttcattgaaatgcggagattcccttgaa

SEQ ID NO: 160371 - DNA, 1000 bp, Homo Sapiens
ttttttttttttttttttaacatctttacattttaatgaaaaagtagataatctatttgaaaagtacaaactcaattgcaatttcaagaaaaaaatatgtatttatataccataaataagcaaaattggactctgaagccctaatacttcaaaagcattcatcctattccataaaaacctagtattattcagcaacagtactactactgatttaaaaatagaaagcaagtctatcttcacatgtagttctttgtctttaatttgtacaactcaccaaggttattttcattcttagcacccggggttcaccagggtgtgatccaaagcaaaccagcataggtttttaacagaaaatctttgccaggaacttcatgacctgtattttcctcacctaggaagaagctgtccccactcgcatgattttgaacagtgtgttgatgttattgcttcgaattgcatcccgacaagcagtgatcacctggttctttggttttccaacccgcagacgacctgctctttgaattgcttgatttactgctttgaggtttcccaacagctctgtgtgattgttacagcgaattttatatccatttagcaagtctctattaaggtcatagagttccatataacgactcttcattgttttcatgtccctcatcagacgagcatcctcagctccgaccagcaaacttcggatcaaattagaatgatcagccatatcagcactgagcttctgatgcactgaatgatattcatccaccttaactagcacctttcgtaattcctcaaaatagacaggaaaatccgcttctacttgaaggtcttcaatagcaaaaaatgatgccattgactggatgatatcaccagccaaatcaatatcatcagtatttatagtgatctctccactaagttttatttttatatgcaggtggccgccattccgtaaagatgtgaaacacacttgaaatggagcattctgaatgtgagtgtcttctggtaa

SEQ ID NO: 160372 - DNA, 1000 bp, Homo Sapiens
ttttttttttttttttttttttttttttttttttttttttttttccttgttttcatttgcattttacttttatttatttttgctttaataatgcatattctgttcacgcaaaaggtgcaaaggacagaaagcaggggtttaacttggctgatgaaaaatcaagcaggatgacatttctagtttcatgaacaacctaaaactaggagaaatagaaaagtcacagctggtaccacagagcacgcccaacttcacagctgtctcctcttaggacctttggctagggtgagagaagctttgaagacagtggcctctagtggacttggataagtggcagattttttttttttaatttttaatttttttgaatcatggtagctgcatcacaaaagctccaatcaagagggtggtaaaaagaaggcacagatcattgcaaataccagattttctctttctctttttgtaaatataccgtcatatataagctaaaatttctcttagggtggtggggtttgctggcagggaaagggacaggttgaacctacaattgcatatgtaatagaatcctaatggggggacaaagagcgaggcagctcttagcctgaagcaaaagaaaaggacactcgcttctgactacgtgtagtacaaacactagggaagtctgtgacaaaacacgattaaaaaatcataaaattataaagcttgtaaacgaataatctgaaattacattttattaatggaaaatatcatcaaaatagtaccactatggactaaactgcctgagttttcatttcgcattgagatctcagagtagaaaagcctttagcacaattttgctctgtgtaagtcacaacgagtgccagccccaggactaaaccctggggaagattctcctcttggatggaatttgtgttgtgctatcaagacttttgtgctaatctttcaaacagggacattttgaggcaaacctttaatcttttggcacaagattattttggctggg

SEQ ID NO: 160373 - DNA, 1000 bp, Homo Sapiens
ttttttttttttttttttttttttttttttttttgaggcacctgtgggactttattagataaacacacaccagctccagccacaggcttggaccggccagctgacagggcggcctcagacacccctgccgggttccgtggcccctggccatggctggaagcagggttcaggccgccccacttctgtctagtcctggcaggccccccctcacctggctctgctgtgggagccgagaacaaagaccccgcctgccccactccttctgccccaggggctcagccagcacccaccctcacagtggcctgggcaggggctggggtacaaagcctcaccctccccctgtgagccagacggaaaatgcatctcccaagagtgtctcgaggggcaggaaggaggcctgcccctccctagccagtgcctacaacagggggtgccctggggggcagaacggccgaccgccaccacaagacatcctgggggacagaggccctgggcacagcccagtccccatccaggagcatatcctaaatgtgcaggggccggcaaggcaggggtaggaggggtccgtggccaggctccatgaggtgagggtctcgccttggactccggatagggggtgctcgaccccgcgcccaggcccctccgccttcagccagcgcatcttctgtcggtactgctggacagcatcttgcacacaggcgtccatcatggcctcagtgaggaccccgtccttggaggcatatgccgtggcctgccaggacacggccagctgagcgatctcccggcccgacatgccctccgtcagccgagcgacctccgagcacttcctcccgtagtcaaactgggccagcttcaggcgccgttttccttctgtggccggcttaagaacacagttgtcaaaatgcagtctcaccaggcgctcccgctcctcctgctgcggcaggtcgaagtggaccatcacgtcaatgcggctgttgatggcacagtcgaactgctcagg

SEQ ID NO: 160374 - DNA, 1000 bp, Homo Sapiens
ttttttttttttttttttaaaatctcacatgtttgtatttgtcacaagttgacatgtaaaagaggcttcaatgtaccacatgatttgtgaagaatgtagacggctgcagagagtaaattagcttatggtgaaaaccaccttatccaatataattctttaaaatcaaaattaaatgggaaactctttctaaagatttttatagaatagatgctttatgtaaaatattaaacataaaaggacaaactgacaatttatttctgagtctgtgactgagatgtaaatgaggagcccattctataaattaaattggtgtgtggtattagccatagaagcattgcatatcccagatgctagggaacagaaaaggtgggtgtgccaacaaacacaatctaccctccagaaaacgccatcctgacctttttattgtcgaaattaaaaaataaaagatacttaaatacaacggtgaacatatagggcaaaacagaatcataaaatttaatgttgagttaagcagtgagctgaatgtctaggtctccaaattggctttgaacccaaaaccacttaaaaacaagtatgttcacagttaacggcaattggcttataggtgagagaatggtcgaagttgttccagttgaacttccagggaaattctctcctcaagaacatcctttaattgttgctgcaattcgctattcaatctggccaaaacggtgttggtttccttattacgtctaattgatgcctgaatagctttcttatctttcccaacagatctgggaatagaaggttgtgatgcaagaacagcagctaagacacccgtcttttgtgtatgttcatcaacttctggccttaattcatcttctgattttaatcttcttcgaacaggtttaggtggtggagcaagtggtgttgtgcctttgctcacattggcaggagcactagcagctgtcttttcttcagttttactatctgttttggcaactcgaagagaacttgcagg

SEQ ID NO: 160375 - DNA, 1000 bp, Homo Sapiens
tttttttttttttttttttttttttttttttttttttttctgggcctctctttattgagggcactgggcccaggtcttccttcagggcccacagcgcccataaaacccaagggagaatagaagagaccccctgatacacgcacactcgaggggcgcctcccatcccctcccacaacacacaggacagaagcccctctgggccggcaggggaaggcccagcctcaatccttcttgctcccgtgccgctgactgtgaaacttgtggtgcacaaccctcagggtggtgaagaaattgccgaggaaaaggaggaggaagggaaagccgcacataagcacctgccactccttgcactgagggtcctgggccaggttgaacaacgtcagcgcgttaaaaagctgccagaagtgtccaaagaaaagaaaaggcagcaggaaggtgaggccccgccacatccaggactggaagccctccacagtgaggtccatggtgtgccgctcgcccagcgcccgcaggcggtagaggcagccgctctggtagtagtactggagaaactgcacgaagctctggtacatggaaaaggagaggaattggttccggaatttctggtacatgagaccgtcgggccacgtcagcatgactcccgacaggaaggtggacacgtagtgatggaacacccaccagcctttgatccgggagccgttgttgatgaggatgctctcccggatggtcagggtgcagtagtaccagaccagcaggaagttgaaggcagcatctgtcaccctggagttgagcaggaagcggcaagtgaaggagatgaggatgaggatgatggtgaggtagagcttgaacttctcatactcgtccttgtaggcaaacttagcctgcttgctcaggagcgtgacgttgacgttccccagaaccaggctcaggtacaatccattcttcttaggcaaataggcctccatgtcaaagaagaggccttggcgctctttcatctggt

SEQ ID NO: 160376 - DNA, 1000 bp, Homo Sapiens
tttttttttttttttttttttttttttttttttctttgtttttctttttatttttattttagattctggggtacatgtgcaggcttgttacatgagtatattgtgtgctgctgaggtttggacttctaacgaacccatcacccaaatagggaacatagtattcaataggtagctttttaacccctgcccctcttcctccttgccccccttttggagtcctcagtgtttatttctccagtctttatgtccaagtgcacacttattttaaacctagtttccagaccttgtggttgtcccatcagatgggtatgaaggtaccatggaacccataaggcatctgcacaggtacctctgctcggcccagctcttcaaagttcttggcatccaaaactaggataaaattgctttcattctggttgggagtgatcaccacagaaagaataaccccaccatcttcttcattggttcctggtgctggaacaaaaacaggttctgagggataaaagccatcttctctccaaaccttcagtgtcttattcaccacatcaaccttgatcagagaatcccccactaaatgccgaaagccacagccataaaagaaatgatactttttgccactgaatcgatcatagtagatctgaggaaattcaatgcctccttccttttctaggtcctcctgatgtagattttcatgagagcaccagatcgttccatcagcctgtttcacagcactggctgaagtataggacaatggactcaggttgtctccctcaggggcattcaaactgacatttaaaggcaaaacaaaccttcgagggaaagatttggctgctgaattatggacctgatcaagcccttccccagccttcctgagattctgtaactggtaaacttctagggttcttccattatcttgacagcacaaatcaattataacacagccctggtcctcaaaggcattgatttgatgaaatgtaacaaaaggtttgctgtagtatct

SEQ ID NO: 160377 - DNA, 1000 bp, Homo Sapiens
ttttttttttttttttttttttttttttgccacgcacacagtctggtttattggctcatcatacacacacacatcaaatatgtacacaaacataaatattccaatgtacaaagtttacatgggactcacagatcacccctcgtctctttcatccagcacccccaacttggtgccgtcctcttcctgtttcaggatgaaggcgtgtgaggggctggcactaggaggcagggatctggaggagggagaggtcctgctcccctctcctcacaggcacctccgaagggtcctgtcccttttcaatggcaccttagggcagagggctaaatccctcatccctctctgctgcagctcaaatccccaactctccttgatccctttgactctcctccctaatttccttggcttcgtcctctcagcatgtccctgcttctccatctctgtgtctgttcccacagtgcctgcagggaggagggtctttgggccatggagtccttctggcccctctgccctcttcctgggccttataggaggctaggactacggtgcagctcagcagaggggttggtgccattggcaggctctctgttgggggtaggcgctaagccacagccctccccagggcagccatgctggatcaagatgtctgcacactcctggctgccggcccggcgagcatatgccagtggagtcaggccccgggcgtcccggctcctcacgtccaccccgtaccagatgagcagctgcgtgaagacaacgttggccatggcactggagagatgtagagccgtccgcccgtccccgtccccataggtctcattcacctcctctttggagccatgtgccaggagcatcaccaacagccgcaggtcatcttccaccacggcccggagcagctgctgccccagtggcacatctgagcttggcagtggggccaggaagagcttctgttcatacttggcccgtatccagcgttccttctcctctctgcaggcatcaggcc

SEQ ID NO: 160378 - DNA, 1000 bp, Homo Sapiens
ttttttttttttttttttttttttttcatttttatattttattgctttgaatgctcaaactatgggaaatctttggtaaaaataaagacaataaaatcttcacaataactttacacaaagcattgcataacaatgttcttcaatatacatgaaataatataagaatgttcacagtcctcagtgaggaaattaactgtacaatattcatagttcattttaaaacaaaatattttcataaatatttaaaatacttcctaggttctcacatattaacatttgtatttcaatcggtatgttgatctttaaagtattcatattaaattaaaatcaatagaagtttttttctgttgcctaccacagcataagtcccgtcctccctgattctactaatttcacataaaactagagggaggtaactaaaataaaaatcaatacggttctcagttaagccctctgtggaaaagaggaaaatgtttcatgtctattattacacagacatttttctggtggtttatttgtgtagtctcaaacttggccagctttaagttgatctaaatgaactctcagctcaggacacagttcaattagcagcagttccatcagcgcatataacagatgcttgttggctcttgtttcttgcagtgcattgaatatttttattataccgtggcgggcattttgctgtccaacaaggctctgaagcatatctggaatgttttcaagcagcttttgctgtgctctctgttttgtttcctgactttgctctttgcttctgattgtggtcggtggtgccaacttcccatttggccaaaaagcatcccggaaaatattgatgtagtaaaccaacatttgctcactgaaaatccagctgactgtgtcccggatttgtttgttgatggttcttccaaaagtgacctgaacgagggcaattaatgttcttctcacccatttaaacattcctcgaagttcaaaaatctccccaatcaacatgaaacatggt

SEQ ID NO: 160379 - DNA, 1000 bp, Homo Sapiens
ttttttttttttttttttcgtttgagcgatgtttactaacggcgcaagggcggggagcgaagcgcagcggggcgcaggggccggaacgggaccgagcgtgggttgcatgggcctcgatgggacgggccggggcgcgatgggtggggcgggggcgaggtgaggtgaggggtggagcgggggaagcacgggtgggagagggcggggcgcggggattgggagtgggcggggttccgtgccccagagtcgagggagccgtgggcttggggtccggatcgcggccgcggggcgctggcgtgcggtgtcatttctgcggtgtaaatgctcccaccttggccgatttcaagccaccaggtgaggatggcactgcaacatcttccactgaggctccagctgccctctcaggtacatcagggcctggacgtcctctggggaggccacagaggaagggcctaggctaggaggtgcctctccattcagcacccgggccaggatccctgctagctggggtgtggagttctcctccaggagggccaggactcggccccctgccagcccccgaagcattgcagccaggagtgcagcgtgggggccctgcaggccatggccaggccccagcgccaccagcaccaggtcaggctggaagccataggccaggggcagcaccaagcccaagatgcagctcaggaaaccaccggtcatcactggcagtggcgtggagacatggaacatggatagggcagccgcctccttgcccctgatgttcagccacagactcctcccgtcatgggcgaggtctggaggccggtccagctgtcccagggccacgcacagcagcctctgggctccgtgggacaggcctctccgaacagccacatccagggtggctgctgcagcagaggctggagtggctgctataccactgttcacctgcccatccagcatcccatctaagaggtacaggagcttcccaagtgcagtgagggcctcctcccgggccagg

SEQ ID NO: 160380 - DNA, 1000 bp, Homo Sapiens
ttttttttttttttttttaaatttaaaatgtctttattcatttacatggtatatatcaccctctacaaaaaaaaatgacacttgtctttcaatctgtcaagcttagctaaaaaattcacgtatctcttttctatatcacatattgacatgatataggatgcaagatataaatatcaatttaatagacattattaaataattttacacttagtagaatcttggataaatggttaaaattatagattgacattaagtgtgggcacaggaatattctgtgtataccaatgggtttaacagaagatgtgtttgcactgatttctggtcatcaacttgctttccgtgaatctttaaatacccaattccaaatcttccagctcctggagaagggctgtttctttctgaattttctccaactgatttttttctagctgttttccagttgctgcttgttctttcagttgttcgattgctttcagtttcttctttaggttcttgatttttttgtctatctcagggtccccagaaattgactgagagacagtgtttcgtggtgtgctctgtggggcaggagtaggtgccaaatctggactcttgtcacttcttgcttcctgctttgcagctttcttagcttcatgcttcctttgatttttaagagctgtttttgataatggcttatcgtttcctgattgtggtttcatattctgaggtggttcctcttcatgcaatttggaattggtgattggtttatttcttaaagctgggggtctataagctgttgcaactttaggttcctcattgggtacttcacttggaactgcttggtaagttattgtttttgctggaaatattccatccaaaaatggctgccaagaaacctgccataattctgcatttgatggcacatcatacttgtgcaagatagagccagtataatgccaaattttgtatccattattaacccgtaacctgggagcacatgtagctgttaaaatatgctcac

SEQ ID NO: 160381 - DNA, 1000 bp, Homo Sapiens
ttttttttttttttttttttttttttttttttttttgcagataatttctttattgaaactatcaggaagttttactatgaaattttacatacatgatggaaagtggaagacatataccaattatattccaggaaaaaatactttaatagtattgttatatagtgtattggctaattccagtggatcctcatctctcactgctgacattatctccaatatttgaattatatggcagggttcatttctgtcttttaagcagtgcccactttcccacttctttttggtaggaaatgcagttcttatatattttgatccagcatgtgtacttttgactccacaccaaggtgcatctgtctcaatcattaatttttcactaggaattgacttcaaaacttccaaattagcttcagttttcagtgagcaaccattaaatcctatataaagatccaagtcaatcaaagcagctgctgcttccttggtaccatcaaatgaatgcaccactccccctacacaccgatctctatttcttttcattatgtccaaaaattcagcatgtgagtttcgacaatgaagaaacattggtaattttgtttgttctgacagttcaaactgtttttcaaaatatttgagttgagtatctttgggacaaaactgcagtcggtcaaaatcaagtccgcattctcctattgccacaactttccctttattgttttcagcaagatttagcaactcctttaagtaaagatcagggttattcttttcaaattcaccacatcttgtaggatgacatccaactgtactgaaaaacataccatttgtttgtgccaaatgcagtgcatctttactgtcttgtagatttccacctgtaatcataaactttttaacaccaatctcgacagctctccctattacatcctgtaagtcatcttgatgcttttgaacccccctataaattcctctgaacatagggtcagtcaagttgataccaatatcgataaac

SEQ ID NO: 160382 - DNA, 1000 bp, Homo Sapiens
gtgaataagttatacttttatttttcagaaacaaaaatgacaagtggcaacttgcctttgtaaaagattaaagagtatcagagtaataagctatctctcatagagacagaagcccgagaaacactattatacagctttcaaaggaagtcctattaaataaatctcacaataatatactttaactcaacaaaacaaaaaccacaaaaaattatacagaactcataaaatggtatatgaatgaaaaagagaaatctttaaatccatacactagaagttctctattaaaatcaaggaggctcaaatctgtttcttttaaaaaatatttatggatataattgcgtttttctaaatgtttcattagtaatactcagtcttgtaagtctggttccatagtaatctataatgtaactacttccatctgaaggtccaacaatctgcattgaaataagaatgaaatcaattaggctcccaattccacaaaaccctacagtgcaaaactttaacaaacccaaagcagggtatccaaggtaaaatcgatctgctcccaaccatccaagaaaaagagacaatgcgactgccactttgtaggaatagccatttacatttcggcaagatatgggcttgaaaaaaccaacttcgttcccagtaaaatgtgtttcattgccactggaatccttacaagttatgttgggtgctggaaaacaggaaacatgagctgtgtagtttgtacagttaactggttcttgcgtagcgtcatttatttttggatctttacaaatatattgtcccactttgaggtcctcgcacttaagcgactcctcgcccccggcggaggtggcaacagccccccagggtcctgtagtgactgagacgaaccacaggacaccaacgagtctggccgtcacggcctccggagcagacggaccagacggccaggcggccgccatcttggagaccgacactttctcgccacttccgcttccgcctccgcccaggagcg

SEQ ID NO: 160383 - DNA, 469 bp, Homo Sapiens
tttgcatctgcatgtgacctttattcctcatgtttctctgacttgagtgggggttttggaggttcaccttggggtacattttctcttgcctcatcttctttagcctcgggttcagctgggagagaagaagaaggtgaattccccaagcaggcccccaacactgacccaacagaggccaggaggatgttggatgatgtggagagtccagctgcccccacggactgcagagtagccaccaggctccccgcagaaacaccacccccgttggcaatggctgctgcggacatcatcttggctgctatggaggacgcggcgattcctgccccagtgaagcccatggcactgagcaccacgggcacagcccccactgccagggctcctcccactgcagcagcagctgcccgtttcatcatggtgaggccgtccgggtcccaacttggcccaggaaatgacagcgttcttggggtgt

SEQ ID NO: 160384 - DNA, 1000 bp, Homo Sapiens
ttttttttttttctggcacaaattttattccgttacaaatagcaccgagcccttggggctgcccctgtggagagggatccccctcctggacccccacctcctcccctgagctacccatgtagtgtctgggagctggcacacggcccagggtccctctggaagctgggccaggccaaggggttaggcccaggcccttcgtggggtgggcccagggccagctgtggcagatgtgcaggtaggtgagcggcagcctctcagatgagcacactggccacgggcacgcgggtggagcggccccgctggggcaccacaatccggtcgtctgtggaccctgcttcgtgcagcaggccctgcacgtgcagctgtgcccgccggcggtcggcctcaatgaagatggcggtgcccaggaaggctgcgccgcccagtgccccaacaaacgcgcagagcatgagcgagaactgcagagcccggaactcggacaagaaggaggggggccagttccggcgcaggcggtcagagatcaggccaatgaggtaggggctcccagcatcacccagcaggtgggacagcacgatctggaaggcctcggcggtggagcgtcgggtagggatcaccacgtacagcagaatgtcggccacgatggcccagttcatggacaggagggtctctccaatgaagatgaaaatataagtggccacgatgctaccacgggcgcaggcaagggacaggaagaggaagggtgcagagcccaggaggccagtggcacagaccaggggatcagcccgggggttggagtggcggagccggcggctgatctccacacccaggcccacacccaggactccggtcaggcaggtgatgagtccaaagatgagactgtcagaggaagagcaggagtctccgggaaggcagggtggggtctccccaaggaccacgcgggaacgcagcaggaatgccggagcccacagagccagggagcccgtgacaaaggccacagcag

SEQ ID NO: 160385 - DNA, 1000 bp, Homo Sapiens
tttttttttttttttttttaggctcacgcctgaccaccggggtttttcaggcagtgcaaaaatgtttattctgctttcttccttggtgggtgggtcatcaggctgctttggctacgaagctcaggctctgtgacctgggcggcccgagcagtacagagcaccatggctgcccttgggcctcaggagcagcaaggcacagaggtgagtcctgcatcgggtggcacggcgtgggcgtgtgagcaccggaaggggagaggcaggcgcttgccatgcctggggcacggggcctcttcagggacagagcagctccagtgtctactgagagggcacagactgacccaaacacgcattccacagccagttccttgggatattcacagcacatgcagccagtagacagctgcaacaccactaaggacacctgtgagcggccacgggctcagctccagagcaggccccacccatcctgctgggggagacccttgctccaggcttcctcacaggacctggtcaaaggaaccaagtcacaccccccatgctagaggatccccctgtagctccgggaagggctgcgaagctggaagctgtctcaggttcccgttgaggcccagtaccctgagttccatgactccttgggggacagagcacaggagggaaaaggggaatggactctacaggatggggtgggggacggcctgtcccggggacaccctggttctttctacgcgatggccgctctggcctggggagaagctggcaaggagagggcaccgggtaaggatggggtgctgcatgacccagctctgcccaaggtggccagggagaccactatgaaggctgcctggtgtgagcgggaccctggtggggtgcagagtgaggccctgtgtggggactcagggaggatgctgggcgggagagaggcccagggtgtcccctcacccatgcaggtccctgggtgtgatcatggaggactggtaaggctgctgctgcccagtggcga

SEQ ID NO: 160386 - DNA, 1000 bp, Homo Sapiens
tttttttttccatcaaaagtttctaattttattctgagaaaagataacaccaagaaaacaattttaactacagaaacaatggttagcgtaaaaaattaataatcaaaaagataaaccatgttataagtacttaacaaacttataaactatttcttccataacattctccatattttaagttcatacatgttgatatgatcagatttacaatttttcagaaaagacgggggaaaaggtgtgattatcgtcagctagatgtgctcactgcatgctccattatttatctgcaaggcctgggtgactggaagtgcagttgacaggcattttaataaactggacagccatttgttcttcaggacaaggcgtgttttccccaggagcaatcagaagaaaacaggaagcagctcagcactctgcactgcaacaggccaccttaatagctaaccagcatcactcaactgctacgcagccgggcctggtgcacaaaaacacaaaagagattagacctgtgtttgctaaaaccccagtcctttcacatgaaaaatctttatacaaatttgggtcacactaccttttagacctggaggtaaataaaattatccatattaatttacaccaccttttgtaggtttttaaggaatgaaggcaatgttgaagcaatgtcttgacagcgttaggctgtgtgtaatggctgcacacgtttccttaaaagtcaggaggccacaaattaggttaccaatctgttcatttcaaaccaaaacagtcatcactatagaaataaaaataaatttttgcctcaaatatccaaacccaataacgtaatcttaggtcgttcacctcctaagttacaataaaatgtgaataacaacaaaacggcacatagaatgaattttgccacctgatgcaaagcttcaaactggcaaaaaggtagaaaagtgtgatacaaccttttcaataggcagcctcttcttccagggacgttgcttccatagactgagta

SEQ ID NO: 160387 - DNA, 791 bp, Homo Sapiens
tttttttttttttttttttcaactgcttcagtgtaatttattttcccacatcccagaaagctctggaaaaacacataaatgaatacatttattctctcacaggatactacactgttacccagtgtgaagggagcagccatgtggctcccaagctcccttagcaaaagggtggttctcagaactgctccattcacgagtcctgcaaccagaggcctgggctcaactcacacaaagttctgagcaatggccagcaccttggaatactcgccttcccgcttgcgcaggctggtggggatgggtgtcttaattcgtgtccccacagggttcccgttgtcctcaatgaggaccacgttgttggagtcgaatctgggggtcattcgggggccaggcatgcagtgccccacaatgagcgcctttttcttctgtcccttgatggccagtagtatctggtcgcccaccttgcccactccattcttcttatagacatggatgcagcgaggagcccgatggtatgggctgttccccagggcactgttgtccaccactcgtacccgcgtcatcttctgaatcgcactcagactcccagtggtgctgaaacagtgatggctcagcactctgcttacacaggtgaaggggccccagagcccagtaaagaaagccatgggatcccaagatagatccgctctcgccgcccgggaaaatcccgccgcgggccccaccagccaagcgccgccttcgccccacgcggcctcttcctagcgcctgcgcgccaggcccagcccggcggacgc

SEQ ID NO: 160388 - DNA, 1000 bp, Homo Sapiens
ttttttagattctattgctttattgattattactttcattaaacaatgttagccatataggatgattaaaaaaacaactaatatccttggaatatgaacatcctattaactgatacaaactgactccacctttcttatagcagtgaattttcaggtcacatacaatcagtaatttatactccaaatacaacaatcacgtttgtattaatcatccagtacaattcacaggttcctattacacaggtggatgtacttagagagttttagcacaaaagctgatacaaatatgaaagtgtgctcagtcgaatggttagtgaggtgctacaggtgagtgtcggcgatgggtatcctcctgagctccacgatctgggagtcagtcaaggtgcccccctcctggctgccttgaccagattcattatcactgacactgagaccagcaccagtttttaatgcaaatattaaatcatcaaactcctgggactcctcatcggctatcagtgacccctggccatatcctccagaggacgggaacgtggctccattttgtggacttggctttaaatcagggctggcctgactgccctgttggaaggatgctctctcccagtcaggtggcacctcctccatagcaccgatgagattctgggtggacttgctgatttcccctccagcaggaggcattccactcccgggcgtgaaaaaggctgtgctgggtccaggatgcccattcatttccacagtgtaactggccttcatagggcaacacatttggttgtgtaaaatgaaataaaccatgaaaacataaagtccctgcagactgttgaaaatgacaaagagaaccaacatccagaagtgtctgtaggccatgtgtagtcctccccaaagccatgtcacggaaatcagagcaaagagatataaaatcagtggaatttctgcagcatttgtccttcctctgaagacatcatcatatgctttccactgtggcttcacctggtaggca

SEQ ID NO: 160389 - DNA, 1000 bp, Homo Sapiens
ttttttttttttttttagattgtaaaagtttattgatatggtcaaaaagcaaacagccagacatttggttatctttgccactacaatgtgtcattctgaactgtatcttaaaaatgcataacaaatgatatttaaaccattaccagaaaagtaaatgaagagtctacttaaggcacttcatatgaaagctaattcaaaattttcacaaaagtcacactattttataagtgtagtaaattaccttctacacattttagccagaatgctgcctttctccttacagaagaatgtgctcttaaagggagaaaaagcaaatacaaaaaattgtcattctgtcaatgttcatgacaaattatctggaactatacagattacatggcagtagtattcccgtggtcaatctgtacaaatcagggcatcttcatacaagtctcataagaaccacagcatagatttggcctgagacaagtacaagaatagcaggtaaggaattcagaatctcacaatttacaagtgagtaattaacaaaaactggctgctccattaaaaagtaaaaggtcaaccatatcccctcatccatgaaatctagtaacgaaaaacaaaaaacccacataaaatatttcttctgaggctactatatccatctctttctgcaaaccacatggcagggttattagaaggtaaatggcaggtggcagtcatagtatctttttaatgtaatacttgtaagatttccttaaaattattttttcacaattacaattatcctatttccacaatagtggcatttcaggttactcttcataactatgggggaggttatagttagatataatgataaccatgaaaacattcttcacagaaatttggttagcacatatggttatttctactgacagaaaccaaaagacaaaataaaaaaaatcccttcaaattggtactttgtttctccacctaaaggaagagaataaagactaaaataacagcaaaacatagaaca

SEQ ID NO: 160390 - DNA, 1000 bp, Homo Sapiens
ttttttttttttttttttttttttttttttttttttttttttttttttttttttttttaaagcctggagagagatttattggggagaatccacattgaccatcagcctcgcaccttactgggccttcaggaagttcaggcttttgtggcaggaggactacacgtccagtgtcaacagccggggaatatctgggtgtcccctcagctggtcccggggaaggctggcaggggtctttttttctattgcgtaactggaggaggccacctcggtcttccagacagcctccatctgcttcccctgttggcgggccatctgcaggggcacacatgcccggtgcctagacagaaagggctgcttgtaggtggggccactggggcggatgtgccggggtgaggctgcaggcaacttgcatttctttggctttggcgaggtgacctcagggatgttcaggtgaacgttccactccagctggagcttggggaacatggtcaccatgctgctcaggcactctcggtgcttctcctccagccccttctgcttgtccgtccaggcctgcagcctgagactctgcaggcggtcaatgttttccaggaagatgtagaggttctgggccttgtaggaagcctccgtttctttcatgatttgtacatggttgatcgcttcttgccggaggctctggaggcgtctatagaagatgtacttatggcacaggtactgcagcctgagcgcgcccagctccatggtggtggtggtgagctccagtgctttgctgcgcaggtagtggggcagcctcaactcagactcctcactcaggagctgcaggttcttcctctgggcctccatgtccatgtggtacaccttcttcttaatatttgcaggggatatctgcaaagagggccaggtcagccttcggatggatgtcccagtgacaggaaaggaggcagatttcttgggctttgtgggaactcggcgggtccgtggtctgtaggtaaactccact

SEQ ID NO: 160391 - DNA, 1000 bp, Homo Sapiens
tttttttttttttttcatgattaaataagttttttattgtcacatttaactgctttgtcagatatacattgtagatttcagtatggcatcaaaataaaaatattttcctgaatgtcaaaatctgaacagaggagacggtaatggcacttaaaaaaaaataaattcacactggcgctgaagctgcgtagtaggtagctgataacaactggaacacatttgcagataaagtgtctgcagcgttttaaatcaaatggcagtggtgtaaggccaacataaccaggagagtagttaaaagacagacccccatagagtggcgatccaaagaacggcagttctagcatttcattttccgtctatatgatactgtctaatttagtattggaactggagctcagtgagtaaatgtgtatcctataaactgaaactactttttcagaacccagattttaagccttcaacaacttccttattcttacagattttaactagttcaaagggaaggcagttaaactccaagtattaacctcatggctgtccttgtcataaatggtgggtcttgctgtttccaaaccagaagctcaacatgctcctgaatgtcttagtggtttcagacgttgtgggcaaaactagaaaacaagtagtcattaaataaaaatataagtgcatcccaagagagtctctacacatactgcaattattccccaaatggcaacttaaaataaaataagtatggttattcagcttgaaaatgaatctttattcaccaagattcccaaacagtttattattaaatgtctttcctccacagataaaactaacactaggatttgtcagaagatctaaatgagttatatctcctctgtatgaactcagctaaacctaccgtgtctggaatctgttcattataaaactcactccttctgttctccactgctgtgtgtcctccaagattccagaacagagaccataaatgtgccagtgcaacacagtagtcactgta

SEQ ID NO: 160392 - DNA, 1000 bp, Homo Sapiens
ccccttcccctccaaagtccagggccaccagaactgactttattaaaaaaatgacaaaacaggtctatacatatttacaggctgggagccaggaggctcaggtccggcagcaggggccaggctgctcacttcttggagagcttgacttgcttgtgcttggggggtgcccacttgaggcagacggagtccactgtgatgggtggtttcttatactgggcacttttgaggtgctcctccaccagcttgggtgtgacacagatcacgtgctggcccttccagtacttgaccatattgagggattgcagggtactgatgatgtcattttgggtgatactggtcatctggctgaggtccttgatggacagtgtgccccggaagtcccgcaggttctccagcagcacccaggaccagtagctgcggtagctgagcttgcccaggtcagacagcggcttctccggggagccgactgtgctctccagcttggagagctcataactgaaagcgatgaggaacttcccgtagccgcggcgttggtaggggggcaaggtcaggatgcaggccacattgtttccatccggggactccttctccttggagaagtagccaacaatgtgggccccctgccggtccacctcagtcaggatgtaaaagacgaacggctccacgtcaaagtacagtgtcttatggtccaggaaaagcttggccagcagacacaggttctgacagtaaatcttatggtctttgccatcaacttcgtgcacggagatgttgctcttgcggtagatctctttcccggggggctgccgccactggcactgacccaagtggaagcggtagctcttctcatatttcatgtacttgaggcagtactcgcagagccagagcttgggctgtttcccatagtcttcggggaatggtgagaaataccaggcatcaatttcgtagttcccgatgtggatcttgtccacatacttcaccttggtgatcgcctcatgctcct

SEQ ID NO: 160393 - DNA, 1000 bp, Homo Sapiens
tttataaagaaactgaagcagacttttattctttattgcaagcagattcaggtctcctgcttagataatctagagaaaagtccaatataatattatccagtcagtttatctacagaaataaaagttaaaaacagaagcatacaaaataaactttactgaaatgttagattggtttaattaacaatttaatttttcaaagctgattaatgaattatcagttaaatgttactgtgtggagactgatttatgttaatgcacctactatgtttaataatttaaaaataaactccagtatttatgatgatgacaactatggataccattcatgttaaatacatttttgaagaccttcttttattacattacataatgaacagacattttaaatggtgacgcagacattataattttaagtcagacacaatatatgcatattaaaattctgtatactttgataaagtaaaaaataaagctatataaattgatctttagatttttctgcaaaagtagaatcacactttcatgacacttctaacatatcccatcaaggctgcttatagacacaacatcagaaagattttcattccagttcacccacctttagcttaaaaaaaaaaaagattgcatttgccaactgatatttttcctgtttttaaagttacaaatgggtaacttcctaaagaaatgtaggatgcaaggacctgcatatcaagctgttagacactgagttgtcaaataaataatactaacattaaataagagtggttgtattattcagtactagtcagtgcaaaacacatgagctgagtggtttgaagaacaaggctggaggtttcccgcgacagcaccggacccctggccaaggctcaactcaggggagtccccacagcctgtctaaacatttgtttaaacgctcagcaagccgagcggatggtcaccctgttggagacgctggccgcatctggcctcctccctcgagacggtgtggcctgcttgttcg

SEQ ID NO: 160394 - DNA, 1000 bp, Homo Sapiens
ttttttttttttttttttttacataaaattatctcactccattttatttaagatttttttatccagttagtaaaaggaagatgtgtctctctttatacatatgtacaagttcagttataaaaatagcacattcaaagagaaaaggcttggcatttttctgattccctctaaatagcatctgtacacaggaatctgggtttgagcaggggaatcttaatgatttaaattaaatgattcccctataccccctactccaaaaaagttttaaaaatcaatctatcgaaactcaattccgcgattttcaggtgtgcaaatcagaggcttgcccgcccggaggtacctgctccaccagggacatcaggcagggacaggcagaaacacctcccatgcaaacactgctgattgaggtggctcctggtctctttactggcttctgggagtcccctgggtggaaggtgctacggttgctggtaggatctgaaggttctcttggtgtgaaccatgcaggatgggaggaattgctgggaacacaactgcctgtggatagacttcctctagcctctaccatgcttagcggcctccaccatctctcgcagtcactgctctctccaatgatgacactctggggttcagagacctggggagctgcctgaagactgtggacaacaggtatacaatctcccttactagccctatgagaaatcacactcttaagagaaatctctaccatggaaggctcttcacagcacctgcggagactttgcaagggacgtgtcagagccgaagagtggaatcgggatggaaacagtatgcctgagcatctaaagggggtctgtgtcaggcttgccccgtgagaggtttaagacttggctatacagttcacttgagatgcagtggggctgatccatgccctgtggccttcctcctacaggcaccccagatgctcctgatgagacacagatgataaaagtgctcacaccatccacctgcctgtccttcc

SEQ ID NO: 160395 - DNA, 1000 bp, Homo Sapiens
gaaacagatagtaacattttttattaaatattacagtggatcaaaaagtacaaaatatctcttgcctgctatgtgattgggaaactattggcacgtaatacagtatcaaaagcagtaataagtacaatttggaaaacatacaaaattgagtgtttatagttggctcagcattcttctggtagtgtttaaactaatgcaaaggttactcaataacctctccattgggaaactatataatatcactgggccatgttgctatatacaaataatcaccttacagagcatagaggttacatagctggaatcaccaaaagtatacaatatttacaacacaggaaagtttaaaaaagtataaacagccaagagattatgctgctattcttcagacatatttcaaccatgaggagacaggcagaatatcaaatacactaacagccaacactggactttaagtgctcaagataatcattgcaatggtatgggtctcaccagggcaaactcattcccatttctctttaaaattgggacaagagtaaaactagaccagatgcgacttggctgaccaccaccaaatgtgactttgtgggacgataagtgaagagaaataaatggttctctttgaaggcacactacataaaatatttttgtgggaccacctcgaaatttccatcagacacaccaacacagtgaaatacagtacttgagaattcatgcaccaggtcagaaagttgtaaagttaacatcgagttttaacaaacccttctgtatatgccctgataaacaagtgaacttaagagcttctagctagtaaataaataagtcagtcctgtggcaaatattacaagtttgaatcacttactagaagaatacttaattccgaaactcggttgggctgtttttatttttttatcatgtggagttgccaaacattaaaccagaagttgcatggaagttttttaaaaatattatttagaatctccaaatctccaataaatcacag

SEQ ID NO: 160396 - DNA, 1000 bp, Homo Sapiens
tttttttttttttttttttttgaaagggtcaaaaattttattagcaggactttttgtgtttttgaatatacaggtttcctgctgtccagggtaaaggggaagtggtgtcttgtggcccgaggtttggggcgcttgccttgggactccatccccatctctttcccgctagcgcagctgggggaaggtgcctgcttgccggccccacggattcttcggctgtggcataaggcactgtgtgttctgcaggaaggcgctcatggctggctggtagatgagaggcggccttctcaggggctgcaaagctgaggctgttgaggggttgagttgaacttggggcccctagtgaggaggccccaggcgatgggagcacggcctggtgagtctggtgccgctgcctccccactggccctgcaccaggtctcaggatgggatcatgcctttgctcctcttgcggtcggccatggttctccggttgtggttggctcttgtcgccttgttggcttccttcttcctgcgttcctgggttgtctcgcggctctgcccatggcctcgggggctgccggccactgctgttgagctgtcatgccggtaccctttcttggcgagaaaggccatgcgcctggcttctgccttctctctcagcactgcagggtcctgaacaaaatggtcgggcttgggagcctcctcgtcagcatcgtcttcctcatcgtcgtcatcctcctcctgcccttctctaggcactttggttctcagcacctgagggatggtgaatggcctgcggctgatgagctcgtcatcagagtctgcatcattggcgcccacctggttgccatcgtatgtgtcatcgtactcatcctcgtagtagacactgtggtagggcaggctctcgcctggctgcagtggcacctcctccaccaccacgctgtactgctcgtagcgctgccgctgtgccgccactgcacgcttgtcgttcagcaaactccgcgtgttttcctccttc

SEQ ID NO: 160397 - DNA, 1000 bp, Homo Sapiens
ttttttttttttttcttcttcttctgttttggtctgtagtgatctttgtctctcttctctcttctttccttatctttttcttttctcttacctaaaagataaaagtgaatactttagcaatcacgactgatcctgagttgttcctttgtggttaacctaaaagcagcatttatgttttaatcagctattccagtcacctgcccagagtggatgggttcaattaaactgttcatgtcatgactctggaagtcctgataagcttattggactataagaggggatcttcattagcagtgctgagaaatcccaactcctgataccaaatgctgttgagcttttgtcttccaatttcacttttttttctgttttcgatattcctgctgctgctggagctcctcttccatcagctattgctttggaagaaggatttggaagcatctgtgtatcctctttttctgccctgggacattcattacggtaagaggaatctgaggctaccggtgctgtaacttctgaaccacgacttaagtcaagagggagacagggtcccagcttctcaagtggcaaatgtgcaacatcaggcacctctggtactgaagattcttgctgattttgagaactgatggagaatactttcccatcagtggctggagagggagaagaaaccttttctacagaatcatcaggcatgggtaaggtggctaaacgctgagatcttcttctccgctcactatgcttgaaaggtctagggggattcacaggctgtggaggactagttttatttatcactgaagaagaaagctgagatacaagcgtcaaatcctcgacttgtattaattctggggaaagtggtgatttagggggttttatacacccagaagaatctccagattcatgtttgcatttcttgctgcgagccttccctgaagacaaagttgaggataacagtgcaggtttctgagtgttggcagaactgctaatgtcagcttcattttttttc

SEQ ID NO: 160398 - DNA, 1000 bp, Homo Sapiens
tcaagtaccccaaggggcctggggctggttgtcaaagaaggcaaagtccagcctgggctcctggctcttcaggtgctgggccatgtcgcagggaatggggttattccagaggcggatgacttggatgctagacccctgggccagtccttcagccaggagccaggcccccaaagctgtgatctgattcttctccaggtccactctcttcagccggcccatcttcggcagcacctgggccagctcggcagctgcctcatccccgaggagattccaggacagcaagattacttccagggcagggcagctcgtgaagctggaggtgaggagcttggcagtctggttgtcaatcttacaggaaaccaggtctatctgtctgagcagcgggagctccatacagaaacgcaggacccctccagccaggttgttttccgccaagctgatctcttccaaatggggggatccatccagggcctgggccaggctcagggccccacctgggcccagatggctgaatggtaggtgtaggaccctcaggtgctggggcagctcctgagccagccccagggctgtgggatcccccagggcattgcagccaagcatcaactcctccaggcgcctgcaaagaacgagagactctgccaactgcactcccccggctgagctgatgctattccctgagaggtctatcttcctgagctctggcagcccaggcaggatggtagctaagtgctggacaccagcgtctccaatctggttgtggctcaagtccagctcctctaggctggtggcagccctgagagcctcagaaaggtggcagcaaccgacatcaccgatactgttcctgttcagtctgaggctctgcaggcaggtcatctggcttagtctgtgagtaagcaaggccaaggtggagctgttcagcagaaggtgactgaggtccagcctctttagcatccatttcccctcaagggccctcatcagcgccttggtgccctcctcatca

SEQ ID NO: 160399 - DNA, 1000 bp, Homo Sapiens
ggtctttgtagcagtccataatgagcaacttttattggcattagggtgtcagtcctgtaaggatcatcacttaagtgtgtctcagtggagaaaagatcaagaatcatgtcaagaagaccatggggttttattccacttgagcaagagcaaatcagagccccatcaagcaggaatggtggcctttcccaggttccatccttaactaaactgactgttcccccttctgatttctccacggtcttctgtctcttgctctgccaaacttgttttcttatctctgtagagatgagtggcttgtttgatgttctttccatggcaaaaatttattcaatgcaaagttcacttcagacacttggttgagacttgaagtttagaccaatcctgagatgcgtggtgatcctgagagagagcagactgcctgccaggtaaatggtccatattatttccttggcagaggccctgacaggggctggggtccgtgttacctcagcagtctttctgcttggcctactcttgctgctctgtaggaaggccctatctggccatttctgtgaaacttgccccttctcaagcactccgtaactgttggtgttggcccatcaggcaataaggggatgcccgaggtctgtgcttccaaggataatagaaacacccatgtgtgtggtaagataaaggtaaggacactaaagaacagagtgtgagaggtgagttctaaataacaacagatgaagaaaggattggatccaccagcttctctgccagttgtgattttgatacaagttgtgttgctttgagctcctagcagagagctaacactacctgctgtgtattttggtcctctgtcctatactcctccaagacatttgcaaagcaccacttagatgggggactgggccatagtccatccctaagaaactgagagctcctgaatcccggatctctgtggcaagattcagggatgactgggtttccttacagaagaggagctcagctgagcaaa

SEQ ID NO: 160400 - DNA, 1000 bp, Homo Sapiens
ttttttttttttttttttttactctcagatattttatttttcttagtctgacattaggttatgagaagtacaaaagatccacaagtacaaaaaaatctgtatagctttgcggtagttgaaaaaaatgcaagagaacaaaaaaattttttgagtaatattcatctctgcagatctgagtgacagtccgcttgaaacaccgctgtaaaagtggtaaaaaatgatttcattgtgattatgttaaaatttttgatgtctcttttacttgtttaggaaatctgtcttctgacatttatactggatagttcttttcctgtattttgctgaagctcaattccctgcctcttcagggcttcaatgatgacacttttgtttttatagtcagctagtgatgttttgtccaaaggaagattctgacaacagcttcagcagaaagaaaatctggatataggtttatagttattgtcctttccaaagtaaaaaaaaaaaaaaaaaaagttgaaaaatattgatgactttttcttagtgttaatttctcttcctgcaaggatttaatttgaggataaattacctttgatgcagttttttttccaaagtatttttaaaacactttcttgaaaagatgaattcttctacctatccctaggattctgagtaaagatgacatattggaataggagaagtccaggtttatctttgtactttcttacctaatatcctgttggacacagagaattgagatctccatggatattcagtaactctaggaatggctgaaattaaaaaaacaaaaccaaaaactcactttatttaatcatagataataaacacagtgccagaaggttatagacacaaaggccaaatgaacaatgaaaagccacatcagaggctgcctgacggcttaagactttttttttctctgcttaataagaaataagttatcattgtcatcatcttcccagcacctctcctttttcttctgcttgcccctcttgccttcctt

SEQ ID NO: 160401 - DNA, 1000 bp, Homo Sapiens
tttttttttttttttttaatgttactcaaatttttctttaataaagacaaaggatttaacaatttttgcgcaactatacttaactgacaaagatgatttgtttaggatcttaaggatagcaaagatatatgctaagagggtaccaccaggaaaaaagacaaatacattctatcactagaaaatgcttcaagacaaaaatattaattcaataagaaaatatttcatttttttttttatcacagagacaattaactcatttctgtaatccagttacgtggcatacattcctttttctagtttctcatgcaaaagtttggaaagtttttctcaaaacagagcaagttagcgctaatggtttcaagtcagggctgggagtcagcctagaagagcatgctcagaaggccatttacacttacctgaccccagcctgatgctctcccccatccaaaaggggtcagttaattcctattactaatgaattatctcttatacttactctatagacatataaattaccacaaatgtgcctataaattaacaagatatcattcaatgtggaggagagcagctggaacccaatgacaccctggaggtatcttggttactctttttagaaaacagaaaaaaacctgcctcattccaggtaatacataaaaataacactttaacacaaagtgtcatcctgcctgtattctttccctaaaatgctgtgtaaggaactcagaattaaataaaattaggacataagaattaacaagtacacctaaaacagacaagaagtgtaagtaaggactgcttcctgtaatcctaagcatattgttccatgggtaattttcagaacataaaaatacaataaatactataatggaaatatagggattcatttattactttttggtttacaaacaaaggcacccaataatgcttttatttcttataaaagattctcaatttacatttaaaacaaacaaaaacccacaaaacaatcccaagttaattc

SEQ ID NO: 160402 - DNA, 1000 bp, Homo Sapiens
tttttttttttttttttttttttttttttttttttttttttttttttttttttttttttttttttttttttttttttttttttttttttttttttttttttttttttttttgttgttagccattattttattatttaaaatacataacagtcatttaaaaatttttgtataacaggacatatatgtttagaaaagcaatctcagcaacaggtctcatagagaaatacatctaataatttgcttcaatggaaatcactgctgcttcttcagggcaataacagcataacatctgggagatttcacgggatcaaacaacttcacaagagcagaccatgcaatatcttcctgctctttcaggtaacaaagtcgatccagaagaatcaaagtctctatacagggagccagtacaactttcaacatattaaaagcttccagctcattcattcgaggcttatacttctcgtagtagttcattataattttttctggcagcttggactcatctaatccaagcttctttagagaccgtctgacataatccagaaaagaagaacatttggaataaattttaccaacatgccgatcacatttggtgatgccataacaatctttaataatatcctgaagaacagcacgatagaagagtgattcagtaggcagcccttggccagctgcaacccgctccaatgccaaacatgctgacattctggcattacgaccacagcaccatctctcttcctttaaatagtggcacattggaaatccccacttttcctgagtacgttctttatgctggttttcaaattcttcagataagaggtggtagcaacaacccacactgcaaactcccttgatttcagagttggaggtaaatattcgcaaagtatttggagccagatcaccacaagtgtggagacccaccatcaaacaatcctccaaatctttaataatgtcatggagttctgaatcagcagtgataaaagaggttaaaggtgaatat

SEQ ID NO: 160403 - DNA, 1000 bp, Homo Sapiens
ttttttttttttttttttataagaatcatctgcttatttattttacagagtaatgatttaaattgagtacatttgggcacagtagatatttgacacgaaaaatagttgtatcagaatgagcatcagaaaaatagcaactcatcttacacataataactagaaaatattattctgtctgatcatttaagtgttacaaatcctgagaatgttatacattgaacaaattaggtactaccttataattaaatctcgcttggaaagaatcctttaaaaaatactctgaggtacaaatcacctatgtattaaacatgagtctctgacattatacaaagagtttaaacaaatatatcaaacaattacaggccagtggctcttaaaacagctatcagtcaggttcaaggacacactgttccacaatttcccgtaagttggggttttccattgcagctgccactcgctctttgtcatttatctgcttattgatgtcttcttctgttgagtgggttccttcagaaatgtagatttccaacttatgtttaaatggtaaacatcgctgaagttttactcttaagcacagcccaataagagtcgccaaagagcaatgaggtactgttggcgtgaacctgataataaccagatattcttcttcatttatctcctgaacttccacacaactttccgagaccacttccagttcttctaaagtattgggcttttctgggtcccggatagttctaatcaaatcataaacttctagcgctttctcttccatgatccggggctgccgggcagctcccggctcagagaggccggagagccacaggactctgctcagcgtccaggagagcagcccggacacccgctgcatcttcacgctcagccatccctggcgactgtcccaatcgcgccaccgtctctcagcagcctcgggattgatcaacttcctggtcttcaaatgggccgagacaagcctaaaggttcaggagagcagagaaaaggc

SEQ ID NO: 160404 - DNA, 1000 bp, Homo Sapiens
ttttttttttttgattttattcttataattttattagtatgcataaatggttaatggacaggcattaccaacttgactgacctatcttacctaccctgcagagaaagtatatgctattttatctaacttacccaatgccttgtgaacccaatgttcataagctagctaaaactatcatcttggacccaagttgatatcataaataaatctaacttatataatcacccattatatcttaacaaaaaataaattaaaaaccactagctaaaataatgtcacttttcttcagcttttaaaatgcctgtccaagttgcttactgggattagaagcagaaggctgacaaagaaacatatgataaaaatagtgtgagactgtccatcatcgatgctttgttgatgggacgtcctctcatactgatgtatcaaaaatacattttgaagagtaaaggaagaaataacctcatccagttcttaaattccttaccccttaagtgaccacattaataagtcttatgtccaagtgaaacatcatgacaatatctgagttttacaatgtacactacactgaaaggcaaatcgaatagcaaagtacttaagaatctgggaaatgctactcaatcccctctttttctgctttattcatctggacacaagtacataaccctggaaacagaaaacataatcttgcggtatttccagaataataataattaactttcccaccatgaataaaagcagcccatgcagcccaggccaattacacagaaataggcagctcctataaaaagagtagcagtcctctggtctgtctctcattatcgcaaaggtggttatctccactgcagtgttggcccaacttcctccaccaagaggtgggaatagacattcttgaacagaagacagtctgatcgctttcatttttgcagcaggatttgttccagtatttataaaggcatttcagtgagtcacctattccactgcatattccgatcaaatgaca

SEQ ID NO: 160405 - DNA, 1000 bp, Homo Sapiens
cggccgcccgggcaagcccagcagatgccccgtcaggagtactcgcagaggtggccgcagcctgcgggacagtgggagctgccttccagccacttcatgatgtgctgcaggtggccgccgtggctgcagccctggcaccacacgaagagacccttgactacgtggtggcagacggcacacatgctggcgcagcggtggcacctgtcgcagacccagccccggctgctcatgggccgcttgcagtggctgcagttgacgtgcagggtggtggaggcctggttgaggcagctgacggcgcggctggtgctcagcttgaccacctcgttggacacgttccagaggcggaagcgctgcagcaggtcgatgtaggaagtgtaccagtgctcctgggtctgctcgtcgatgtccttgcgcacccgttcacccaggacgatgagcacagacacagccatctgcacgtcgccctgctcagcgtagaagtgcagcatgtcgcgcaccagcacgccgaagaagtcgggcggcaggcggctgtcgtagagcgcgtgtgagacagacaggagcgagaaggaggagtccacgggggccagggaggccacatccgcctcgctgccgctcacgtgcggggagtcggccttgtcctgcaggtgctcgggtccgggaggcgtgtccacgatctcgtggcgcagcggaaaggcctcctgcggcagcacgcactcagggtcctcggggtgcgcgtgttccggatccagcaggtacagctcgtcctcctcaccttccacgtcacccagcaggtagtcggcaggtacgtcgctgccctcggtttcctcgttatcctcattggtgatgagtgtggccgaggagtcgagcagaactgtgtcgctccgtgcatctcctttgctgcggtccagccgcgtctcactgcccaaccctggggccatatccttcaggttgaaactgttcatgagcgggaggccacaggagccacccttgcccacactgt

SEQ ID NO: 160406 - DNA, 1000 bp, Homo Sapiens
ttttttttttttttttttttttttttttttttttttttttttttttttttaaaaggcaggcaggaaccaacatttattaaaactttgctgtgtatatattatgctggacagctaataacatcatattgtaattcctactgaatacttttgctcataagagttttttcactacagacaaattgggtaaaatcaaaatctgacattacaggaattactcaagtttcaatgcgtcactgtagctaagccagtgaactcctttgttctgctgagaaagagcaagaagaatgaatcttcacaggactactagaaacttcttcccagcaaggtatgaggaagccctaagtcaatggtgtaatcctaaatcagggtttgaaaacccacctaacaggcagagtgaaattaacaggcaaagtgaaatcaggcttccctgggaaagtctcaataggaaacaacctgtagatgagtcatctttgaggtaccaggtgtttcttaactctccaagtccttcccacctccagaataccagcagaaaacacaaaagagaacttggtcacttcttcttgcctctcctcttatccttgcctttacctttgccttttgaatccttgctatcaactttgtctttaggcatcttgaaaccaccaatttctctccgtatcatagtgcctcgccaccaggcctggagctttataacgctctttaattccaagagatcctgttttaccttcttcttgctcctctccttttctatacgatcttcaatgatgacctgttcatactctcttatcatctttgccaggtcttgaaggtgtgctaagtcactggcctttgtggctttgagagcatttagttcattctgtttcatttctgtgtccttatcgtatttctccatccagaactccagcctctcctcaagtttctgctgctcctttctaaggaacatttcaatctctgtatgagtccgggcctcttcttcggttttcatcctgagtttctcaat

SEQ ID NO: 160407 - DNA, 1000 bp, Homo Sapiens
ttttttttttttttttttgataggcaaaagtttttaattgtatagattaaaataactttggacaaaaattaaaactcaggcagagaatgtttttttttcaacaacacacactagcaaaaacaaaggcacagtaaacattgaggcagcaaatttccagcgtagagatatgaatataataatagacacaggcagggatgattaataaatgataaaacgtttagaggatgatcactggaatacaggacatttctactttgaaaaaccactctcccaaatacttcatcataagtaaggtgtctctaaaagggacagatctcctagacccctccttaaccaagtaaccagtcctgatatcatgataatgctgatggacaaactagaccttctctgcccacagatgggctgaggttggaaactcacagtatcgactctgtagtgttcttgatgaaacgtttaggctgaatttaatcatgaagacattttcagacaacttcagaatgtagaccattgagccagacagctgacctgtcctctacaaacaagtccatgtcaccaaaatcaatgacaacaacaaaaagatgaggaaatatttggggttcaaaataactaaagaaatgtagctacattatcatttacttcttctgaacccaaaatatctctcctcctttttgttgtgtgattcgtggtgacgtggactgtgtgaaggagacaggtcagttgtcctgctcagtgttctacattctgcagttgtctggtgattacctcctatgaaactcaggctaagcattttctgcaagaacatggcattgttcatattctgcactggcagagtcccaggtgacatgctgtctcttgccagcggctcctgactcctgttctttacaggatggaattgaaaggagcaggactaaggcctcccaatgctgtttgtccgtctagctgtggtcttcctaagtattgatatcaattggaggctgaaggactatggcttctctactca

SEQ ID NO: 160408 - DNA, 1000 bp, Homo Sapiens
ttttttttttttttttttttttttttttttttttttttttttttttttttttttttttttttttttttttttttttcaaacaagtaattttatttaccttttcatgttttaccaacctgtcctccccctaggccttgagtgttttcacgttttcctttcagtgtttgggagctggggactactagggtatcagcattcatttccgccggcgggccccccgcccaggtttcttttctcctcggcgccttcgggtgggggcaggaggagcagagggagttggggatgggggtgggggcccgggcgccgggcgggccccgctcccttgagcaggcttgtaaaccaggtggaagatgaaggcattgcagtaccaggacatgcagttgtcggccgctctgaggcgaaagggggagcggaaggggttgggctggggagggctggtgccccctccagtggccaccgccatggtctggccgtccatcacacagctgtactcgctgctctcggtgaagaaggctggcactcggagggactgtaaccggggcagagacctcagccacgtatccttgagagcaaacccggagttaaatccaataaccaggtcaggcttgggcccctggaacaggtggtagggccttgctgacaccttgatctgcaggtccctgcggccccctttctccttagtgccagagctgggccgtgctgatatgccggaaccaggccggacagacacctccaggctgtccctctgcagggtaaaatgctgctcgtcgctttcggggggcaggccatcacctacaaactgcagctccagggccacatgggggagcaggaccaaaagctcccaaaacaccatgacaaggtcaaactccttcccggcctccaccacgtggatcttcagtgactgtttgttttggatgttgagctcagggacaaaaacaccccggggtggatgtgggggcacaggaggcatcagggcagtcccgtctccctggagaagctg

SEQ ID NO: 160409 - DNA, 1000 bp, Homo Sapiens
ttttctaagtcacagaaacttttattggaaagaaacgagctgcagcaaagtgacactcagtgcacgcggccaaatgggcgaggtgggggtacaggtgggcaccggggccggcccaagaccagagccggtgactgctggggcctgctcgtggggcctccggccacagaccctttgggctggagtgtgcaggcccagtagaaatacaaaaataaactctgcggtccagctgtccctgctgtggcagttcatttgggcagggcagtcgctcctcccaccaggccccctgctgacaagtccggccacagcatgggcagcaggagtctgaggggtgagtgggcatccacaggatggagccaaagggctaggcaggtatggccttgggcagtgccaggactgtggcagcgccagggtctggccagcagctggggaggccccaggggcctctcaggtggacaggtccaggcattggttgaagctggatgaagctggggcctcggctcctcctcatcaaatacagatcactgggaccctgtcctcctccatggtgctggtctcctcggccccactgcccctgcttctgctttcttcctccacctcctcctcccccagctccatgtccagctcgttgcctgcctctgagggtgtgtaggtggagccactgatggaacggcagctaaagaagacgattcgcttgagccgcttgttgtagaagaagtagttgaaggaccagaggctaccatcctccccgaagggatctgagtccaagtctgggttatagctgtagatgtcacattcagccaggcagatctcctcgtccaccgcgttccacagctgtggtttcagatccttgaagtcctcccgcacagctgagaacagactgcagttgactgcattcaccacccagctaaggctgggctcccggctgaactcatggctgcgggctgtgctgaagtcatagtcaggcctgaaggactcattgagcgtggcaatcaggtagaag

SEQ ID NO: 160410 - DNA, 1000 bp, Homo Sapiens
ttttttttttttttttttttttttttttttttcaaaactaaaacaaaaaccaaatccctgtttattctcatctaggattcaaaaaaatcttgtttccaatgggattgttacatggatattaacgaacaatggatatttcaatcgagaatcaagtattcagaaaaattatacacaaaaatatttctattgcttaatagaaaacatatttttattccgtactttaaaaatatagactttctagcaacttataaatttctattataataataaattgatactttgagccaagaaaacaatataaccaaaaattcatttgttccctttgtttaggggtgttttacatttatgcataattttgcttttataaaagatgattgttacaatcaggtatacaactacttggttatgtctaagttctgtctcttaaaatatgttcttttagagaattcatttaatcatcttattcttttcttcaattttctccaaacagtggtagaagtactatttgatagacagaataaagaaaattgtttttggccacacccagatcatactgatatctacagcatagtcctggctacaggggagctcaactctaactcgtgaagcgggcctggtttagaaagtaacaatgaggtagtaactcatgatagtgctagctgttatcaaaaattaacaactttaggtatttttgttttgggtttttgcggtttaggtacatccaaaatttcttcatagtctgcactcattccctttgcccagcgaccaactgtgaccattcgctctgaattctgactttcagggcaatctttctttaaatgttccacagagccacaaagtttgcaaccgccaccatcagcatagagtcctttgggattatcaggacaagatctagacaggtgccccatttctccacaaacaaaacattttgcaaaaggaaattcgccaagagccgggtctactttagccttacacttggttatttcgtgctctgtggacc

SEQ ID NO: 160411 - DNA, 1000 bp, Homo Sapiens
ttttttttttttttttctttttttttttcttataaactgaagttttattacaagcaggaacaaagaatactggcttaaataaaaggtaggtgggagccccctcctctagccagcttcttcctcacctcccagggccactgcagtgatggcccagggccctgaggctggggtgaagctgtttctcccagaggggaccctctgtggctgccattcccagctgtctgtgaccactagcctctggagtgagaagggcaagatctggggacttcctatgtcactttccaagggcttcagcccacttgaagggccaaggagggggatggtggaacaatatctattttgataagaaactacagctcccagcagaggagaaacatcctctgagtttccggcccagactcaggccaaccttcacttgcctcttggcccaccctgcaccttcttccttttctctggatggaggtccccgtttggcagaaacaccttgtcttccagctcctggcactgggtcccatattcagagctcagaggagggggtgtggcttgtaggatggcagccgctccccagagccatcaccccacccaccacgcccaggctcagcctgtctgggcaggtcccagctggaagcctcacctgggggctggtgggtagggctgggggtagagtggcagagtccccagacactggctgtctgaagtccatagaagaaggaaagataggaggctgggctgagccccagtgggagcccagggttttctcgtgaccagtgcacgtgccccctgtccccttggctcagagtgcttctgatactcaaaggggatggggcagggggcagcccaggggatatgggagccagccacattcatacagggcacacatgaacacacacacacatgcacacacactctcactcattccagccagaaggtctcttggaataaacttattaaaaccaaccagccttctgataacccttcacctggcactacacagacagta

SEQ ID NO: 160412 - DNA, 1000 bp, Homo Sapiens
tttttttttttttttttgacaatgataagctaacgtttattgagagcttatgtgttttagaaaacttacaacgttttatgatctttacacataaaaactcagactaggttagggtgtggcactcacctctggtacagaatttaagaaggttcaaaaactttggtaatagtaaacaatattttcaagacttaaaaaatattttaatatccaaaataatcaaattgttaaactacatcctgcagaccggcagcataattttgtaaataaagttttagtggaaccagggtgttgaggtcagtaagctcaaggcacaagtgcggggttctagcctcttcaaaattttatttaggccgggcacggtggctcacgcctgtaatcccagcacttccggaggccgcggggcgcggatcacccgaggtcaggagttggagaccagccacgactaacatggtgtctccaataaaaatacaaaaattagccaggcatagtgccaggctcctgcaatcccagctactcgggaggctgaggcaggagagtcgcctgaacccagaaggcggaggttgcagtgagctgagacggcaccactgcactccagcctgggcgacagagcgagaccccgtctcaaacaaatacttgttttgttcatcatggatttttttttttttttaaagagatggggtctcactctgttgcccagggtgaagcgcagtagtgcaatcaaagcacactgcatccttgaactcctgggctcaagccatcctcccaccccagcctgagtagctggggctagaggtgtgagttccatgcccagctcattgtttttaaatttttgtttgtagagacaagctcttcctatgttacccaaactggtctcaaacacctgggctcaagggatcctcccaaagtgctggaattacaggcatgagccaccaagcctggcctcatcatggatttttgcattaattttgatttttaaaaaatactgctgtaaggtcaggca

SEQ ID NO: 160413 - DNA, 1000 bp, Homo Sapiens
ttttttttttttttttttttaatgtgtaaacgagtttaatataataagtaaaatttcatcctttccatctcatttcacctcaactccacaatcatgtcccataatgcattcacaaatcaaatacaaatgattttaggactatccatagtgcagcaagcaagcaggtggcatatcaataagtgatacatattactgagtccacgaaatacttgagaatattctccagctctcacctggagttctgggacagaaagcacagattcctcagaagctgatgacatttcatcttcctcatcttgggtgaggtcatcaaagtcctcttcttcctcttcttctggcccattcttctctcctccagtttctggcccaactggagtccccactgactgaccatcaacactggatgaatcttctggcttccctggggggctactaagcctcacttcaggatccattgaggacaaagcattctttgatgatcctttgttcacatctgtccctgaggttccttcatcagggggctcttgagaagatgaaggggttttagttggctgactcctcccctcttccttctgtaagactgtctgtttcgttacttctccagcactgctcaactcctcgcttggggcaccagtgtccaattccacagcatgttccactttgatgtcatcacaaatatcacgctcaggggatccactgatttcctctctagcttcttcaggttccatcttgacaatttcctctaaatccccaggggtagggttgtttagagactcctggatgccctgagggagcggctccagagcttgcctcccctcctctgttttcacaacggtccagcgacaggcactattctctgacaatccttcttggcactctgcatctgctagtggaggccctgggctatgttccactttcgggaaaacagtagcagagagaggagatagttcctggggctctaatttgggttctaggccctgaaaggcattttccccatcag

SEQ ID NO: 160414 - DNA, 1000 bp, Homo Sapiens
ttttttttttttttttttacgtttctgatgccttggggatttattttaaatttcatgagatgttgttggcactgtcatgtcaaagggcacggacacacaccatgtggtgcaaatgtcatacagcagggtttgtgggcgaagcaccagcagaggcagggctggaagcaggagctgccccgctgagctgctgccgggctgcacgctccgcggccagcgttcacccgcacgctttaactctgtgacagtgactgggcaggcgacatctggtggccctggaactttgcaaggggaaggctctgaagctcacttagtggctgtcaggcccttgtcatggctgagtggccaccagggtgcgggttggtggccatgaagccacccaaggcaacagcatcatctaaattcacgtccattggagaatctcagcccagcaacgcgagctgccgtctgtcttctaaggtcaaagcaggcgtgaggcagaggaagagtgggccagtcccggtcaatgacgcaaatatccaaaagggaagagaagccgatattcttcctctgattcgcctcatacccgcttaggggtgcccagagcagggcatggcatcatgtgaccatggcgggaagatgctggccgtggaggccccatcacagaggcaaggagcccacaggtggagggcgcaggcttggcaggtagcagaggctgcagtgactcaggctgctgtgacccgggcgtttctctcgtatcttgggcatgtggagagcttccccttctgcagggggcctgatcagaggtccagctggtggcggcatgaactggaccatctttcagcaagtaccttcctcgggcatggctgcctcctgtgggcgtacacatttggaccacacagtgggagtcgggattggagtactgggtctgtagccttggccatgagtccagctgggggcagttaggtcagcctcggggcaggatgcttcagggccgagaacagtgcccaaagcgcagccactg

SEQ ID NO: 160415 - DNA, 1000 bp, Homo Sapiens
tttttttttttttttttttttttttttttcacaaatctgaatctttattgttctgaaataaatgttataaacataactcaaaacaaaaacttcaatattcagtctaagaagaggtgtggctcaatgcccatcacatgtaacaagaaaaacctcctttaaaaaaaggaaaaaaaagtactatgagaagtctttcatatgaatgaaaatgcacccgttggatttttttccccctcatcacattagcttgtatacacgtgggaattgaaaggtttgcattttcttcacatagttcttgctatgatgtctgacggactttttgccactcaacaaattcatcaagaagaacaggccaagcaccatcttcatcatagttactaagatcagcatggactgttctgctgaattctaatacattgtaccattgatctttgttcataacacgatactttgattgctccaggtactggtaaaatactgaaaacagtggccatgtcctcccaagcagaagagctaacatagatttagcagtatcaatatcaaggcttctctgatctttatcccttgcaaaatcaaaggcatatctgtagatattcttaaatgacgaaatatcattcaactgtgagcgcaaaaagtcaaatttgttttgtaacttttctgtgcagtcacactgtaatgaagtcattccctttaaccattcttccttggtaaaaaatcccatgctttcagcctccaatttccacgctaaaactaacataataatattttcaggttcaacaccaatgtcttcacaaaatttttccattccttctggccctacaacttcatcaggacctgcatattcataaaaccaagccaggcacttcttgcttgaaaaatgttcctctccacttattagtctagcagggggttgggatctgcaatagctggagattttacactttttgaggcctccgtcttccgctactgctgctgccaccccaggggattttctcttcttctt

SEQ ID NO: 160416 - DNA, 1000 bp, Homo Sapiens
ttttttttttttttttttttttttttgacagataaaaacactttatttaaaagtataaaaccaggcttactccttcaaactgctcccacccctaattatctccacaaagagctatataaattgggcaggggtatgtgtacagtcatctcagctctaacaaccccagttcttctttcaattctcctttctcccttcatacaattgagatgtttgtcctttgcactttccccaagatagcaaaggtgatacaaatgtggaaggaggggaagtgtagaaaataaactgtcatcatcctctattcccatctccagggaacagacagattatatgaactctgaccaaatgatttgcttgtctgaagaaacaaataataggtacagttactctctgtatcctaaagaaagacacgagggtccagagtccttcttcagtatatagcctcgtccatattgtcatcactgtcaccaccaaagtcctctccattgtcaaaatatgacatgatgtaatcagtttcctcttcatgttcttcttcatcatactcttcttcttcctcctcttccttctcttcttcttcttctttctcctcatcctcctctgaagttacttcttcttccttcttctccagggtctctagtttctgtattgtttcctccttatcttctgtggtcttagggggcctcttggggagcagaattgtaatccgttccttctgtagcttccgcactcggatctttagctcccggggtagacgccgccaatcagggttccaatcgatggcattgtcaatcggacctgacatctgatatttgtctgaataacgctccacatctctcttggggacagctggccggatgaagtaggggagctgcctcatggctcctcgtagctcttgcttcagtgccaggacatattccccttcctcgcctgagggcaaaggtactgggcggaactccaagggagggaagagtggagaaggctgcagggtgggtgggggcaaagc

SEQ ID NO: 160417 - DNA, 698 bp, Homo Sapiens
tttttttttttttttttttttttttcccagtatacagagtctttatttattggaagtcctgatatccaggaaagccgggcccatgtccagggctcaggactccatctggccactctgcaggggaggggcgggggggcagtcattcatgtccagttttcctgccgtcagaggagtcctcaggaggcaggaagtggctgtgcctccacagttgcaggtgagcgtggcggctgcacctgctcagcgcactgcaggaagcggcgcatatgctctgcacagttgcccacagctgcctcgttctgtcgaagacactcctcgaaggcctcaaaaggctgagcacaggcctggcggatctggcggatgattgggtgggaggatgtgcactgggcaatgctcatcttaaggtagtgacagtcccgctgccaggattccggcttggccgccacacactggccatactgctccagctcccggccacagtagcgagcggtgacctctagggccgcctgcatctcgagacctttgccggcgtagggctgtccggggggaacgacccgccttttccggtatcggttgtcatggcggcgcccagcccagcctggttttttccggtagccaattgaactaacaaccccgttccctttaggactaatctgtcacggcggcgccctacctcttcttccggaccggctcgtcatggc

SEQ ID NO: 160418 - DNA, 1000 bp, Homo Sapiens
ttttttttttttttttttcacaactgggaagtattttattttttctacttcatataacattgttcaacaccacaagattttaaaggtctctttccccaacttttatgatttagaagtaccacttaaaaatatttactgatgctgtaaatattactgtttttgtacatagtaaagattttaatgaatgccatatccattatacctcttgctcctttggtcagaaagataaacagaaactttaaatcagatgtttggacattcaaaaatggttttgaaaagtatacccaaacaaaccaaatatatatcagcaactattaaaaatcagttttagtagttattaagaattcttaacaaggaagtatcgaagcatgtgtgagattttaaaaactatatacaattttaaaaacaaatttaaatttttaaataaaaaagattaatggccaaattaaagtttgtgcatcagatttaatatcttaatgtttatcagaaatatattttgtgagtaagaattatttcataaatatatatgtataaatataaatatatatctgcaggatctgtgatgctggagaaaacattttgaagaaaaaaattgcacttttgattatcaagatattgtcaaatttaccctttaagtgaaatataattaccaatccaggtgcttttggcacaagtttttaggtgaatatcgacacaatcttaaaaacacaatgcttttgtattttattcactggaatatggagaatcaaacagaatttaaaattctgacccaaaaatcccagataactgcaattgcttaattaaatacaaaaaaaaattgttttaaaaagcgcttagacttccctttccatctggaacatgtaaaattttgcagcaacaggttttctccaattccttcagcaagaattcccagcctacacacaaatttaacaccatctttttctattcatgtataacttggatcacacaccagtatataacgacaaaaaataaatgtata

SEQ ID NO: 160419 - DNA, 1000 bp, Homo Sapiens
tttttttttttttttttttattttttttcttttttttcttttttttttttttttttttttttttttttttttttttttttttttttttttttttttttttttttttttttttttttttttttttttttttttttttttaaaaggtaaactcgtttactggttcagcacacaattctcatgatcattaatactctgacttgggcctagacttcgtcctaggctgaaaggttgattcaggtacaattaaattttctggttaaaaattgtcattgggttcaaatgatctatcatccctctagaaggcagcaccagcagagaagctataaatacactcacttcaaaactgagctttaggggtggttgtaccttaaccacacaccctacagccaagagaaattagcagttgagcaaagatacagaccaaatgcctctgggagatggactgaagcagctccaaagaaagctgtaaaaaagtgacaagaatttgttcttccactttgagactgttcgattcaaacatgagtccaaggcacgtatccttaagaggagatgctctgctgctgtctcatttgccagattatccttcagttccaggctttcaacaggatatgactggttcatgctccatgataggaaaggaattaaagtttgaagccagaatgaatggccacaatgcctgatgttagactttcgtaagtcaccttgtgaaagcctgcatcttctatcatgtccttgaactcttcctgagacggaaaccttcggatactctctacaaggtactgataggacttccagtctccagcgatgacctctcccaggacagggatgacctggaagctatatagatcataaagcctggatatgaggggattgttcacttggctaaattccagacagagaaaccgtcctcctggtttcagcacccgatgagcttcctggagtgcctgatcaatgtgtgtgacattccggatcccaaaggcaatggtgtaaatatcaaact

SEQ ID NO: 160420 - DNA, 1000 bp, Homo Sapiens
ccttttcaggctagattggcacaatgatggaatggttttcaagaggccaagtaggaccagctgtgggtttatcccattttacctaaggattttacacaatacattgagtgcaggaatggcacgcaatgattgcactcagtaatataccaaaccactcctggctttgtttagaccctagacttgggccctcatccttctcgtagacctcttgcgaggattttccccttttacagattcacactcagtcccgaacagaaacacttgagcacctacaatctcacagccaactccctgccaacgtccagtgactcacagttaagagagcttcagcagcagctctgaccaaagtgatgaccaactacttaacatgaattagaaacagagcagaaaaaacacgcctttagcctgctctgcgtaaagaaccaagtctccaccatgaacaccaagccaccaactccccgtccctcagtagtcctgtgtactcccaaagccccaaaatttaccccagcctcaagcagccttgtttaaaaaattaaggaagggcctgtgataagcactgcaagttaaacagaaacaggggacttaagtgcagagtttgtcactctatttctgggaggggatgggctgcacagtgtgcaatggggctggctggtaaagggaggaccaggtgacagccagccacactgtctcaaggatgaacctggccctgctagcattatgctgtaatccctgtggattagaactatggataatagggccgggagcagtggctcatgcctgcaatcccagcactttgggaggctggacgggcagacagcctgaggtcggcagttcgagacctcagtctggccagcatggtgaaaccccgtatctactaaaaatacaaaacactagccaggtgtggtgggagcctgtaatcccagttacacaggaggctgaggcaggagaatcgcttgaacccgggaggtggaggttgcagtgagctaagatcgcaccactg

SEQ ID NO: 160421 - DNA, 1000 bp, Homo Sapiens
ttttttttttttttttttttttttgcaaccctgatgagaagctttattgctaaaaagtcagtgagggtttattgagtccccaaacaccagctctttaaaccactccaacaactgctgtgaaggtcactgtgcagagaccctgggtaggggaggctggagccaggtgagtgtgacaggtcacagatggctctcaggccacctgccttcagctccttttgtttcgggttctagccagaagccctggggcctgtctcttgcctcttcttgtagcatgagacacccttgggggccctggggaagggaaggccagtggtgtggcttccctttcagcctagcaacgcccaaacccttttcctctacctggctccacttgtccccagatgctatctccaaattccaagtagcaaaattcctgggtttccccttcccagctcagagtcacttatggctggaatgtgggacaaactcttctaccagaaggtccagggcggttgcagcagctcaaaggtggggatgctggtgacattgactgggatggaaatgatggcccatggcagcccatgctgttccagagagcggcggatcatgtagccgtctcggccgagcaggaagagggcggggatgtcagctgtgcgctgggtactgtcctggatcatctccacgtagaagctgtcattgtcaactgcgttgtcagagatgatcaccgcccgcccgccgtgctcctggaccacccgagtcttggagaggaaggagcagccccccctctccaccagagcaatctggtcctggatgaagaaaccgttgctgagttccccgcaggcctctggaggttcagcggggacaaggtgaatctgctcataccttgtgtgaaagataccaccaaagtccttggcaggtgtggctgtgaagatgtatcgaatgtccccaggactcagcacttgaaagtacaaataatcatggatacggaagccgtgggccgcgacgcacgcggggagccaga

SEQ ID NO: 160422 - DNA, 926 bp, Homo Sapiens
ttttttttttttttttttttttttaaataaacaagaaatctttaagcatagataagccacaatggatagttaatcttgtacagacaatccagcattaaggctaatttgatcttttaaacattttatgggaaacagctgttgagttttctctagaaaagcccacaaggttccataaccccataggcatacagcctcgacaggcagggctccatcaggctcctcttgaactgggcactccttcacggaaggcaggaatgcacgtgtcttcacttcctgctgctctgcacgcacgtcacgatatctggcagaaggtggtttctgttttccttggtgacattaaacaccttcacatcctttctgtttctgatttcttctacaagagccagtggctttcctttaggaactgggattgtgccaaggattatagtccctggggtagacagcgtctgacgaacagcttgaatgaaaagctgactgaagagctccatcttcccaatctcatcgatgacgcacactctttgccctgggccactgctgcagtcggcattcctcaagacgggtagtgccaactgctcaaaagaagtcaggtcgaccacatactgcccaactcggcattcacgttttccaggtggaggctctaacccaactctcgataaaggcccccgggtgccggacaacgtgacgacatcgaatcctattcttctccctccctgtctgacttcttcggtataaaatccatcaacaggcacaccagaggattttaaaacctcactggctttatggatcaatgttgtttttccaactcctgggggccccgttaggaacacgtgccgggccatactggtgggcgggggtaggggttgcggtcaggggagcagtccaggttggggtcgcaattcaggtcaggtccggaccagggtcgcgac

SEQ ID NO: 160423 - DNA, 1000 bp, Homo Sapiens
atctttaacccatctcgtttattttttgtatatacatctacatacattttatacattatattcatatatacatatatacaaatgtatatatgtttaaagccacgctataagaggaagtaaatgagaaacagacaaatgaagtggtagctggaggacgtgggaatcagtacaggttttcacgcctgtttcagagatgggagattctacagcacgctcgacactaacacatcacatccataacatatcacatccaatagacaggacagccaaaaacacaaaacaaaaaaagaatcaaatacccacacccagacacaatactcaacaacacaaatacccgaccaaagtctttaagaaagcaaaagaggctgggcacagtggctcacacctgtaatcccagcactctaggaggccaaggtgggtggaccacttgaggtcaggagttcgagaccagcctggccaacatggcaaaacctcgtctctactgaaaatataaaaattagccaggcatggtggcacacgcctgtaatcccagcagtttgggaggctgaggcaggaggctcatttaaggtcaggagttcgagaccagcccgggcaacatggcaaaaccccgtctctactaaaaatacaaaaagttagccaggtgtggtggtgcacgcctgtagtccaagctactcgggaggctgaggcaggagagttacttgaacccagtaggtgaaggttacagtgagccgagatcacaccactgcactccagcctgagcaacacagggagacactctctcaaaaaaaaaaaaaaaaaaaaaaagatagtctccaaaacacaagaggtaaggtttaagtcccattggcttacgacaggaagatatgtgcacatctgcagagctggtaacagggaggcaggcattccctctgatggttgctgtttcttaatgaggcatgtgttgtggtaactaccacaagggggaattgatagataagacagaagttttgaaacagacatc

SEQ ID NO: 160424 - DNA, 1000 bp, Homo Sapiens
tttttttttttttttttttttttttttttttttttttttgaggactgaaataagagcatgatatttcacaatgaaaataaaaccaggccacgcaagaaccactgcggcctgcccgtgacttggcttcccctgcccagcatcctgtcctccctggtccatctctggtgaggacggctgggagtgggctctgtggctgctagcagggggcagggaggagctgggactgtgggtcgtcctggcccgtgggggctggcggggggtgttcgggccgggcgaggccccgcaggacccgcagggtggccagggccaggcccacgagcaggcgcagcaacaggaaggcgcagggcacggcgatctgcatgaggtggaagatgcccacactgaacctgctcagcaggcaggtggaggcgaaggccagcaggctggcacaggggtacagcgccagcttggcgaacatgagcacatgctcccggccgccaaaccacaccgagggctgcagcgtctccgcctggtgcagcagcgccgtggtccacatggccagctggaagatgctggccaggaagatgatggtgcagctgacacgcacgcgctccagctcatcgcggggctgccgggcgaaggccgaggtctgctggtaggctagtgggaggccacccacgaaggccagcgagagcgtgttcagcagccccatggcccgcgtggccttgcgcacatgcaggaagagtgagtggtgggcgaaccacagcagtcccactgtggcgaaggagccgaagtacgccaggaagcgcggcccggtcgcactcagggcggccacgaggctgccgctgaacctctccttcacatccttggggtccgggacgttgtcttcgcagatgtccaggatgagaagcgtggccacgatggcgtagactccgtcgctgaaggcttccacgcgctccttgctgagtggctcgtggaggtcaaacgagaagacttccactgggtgagccgagggctccct

SEQ ID NO: 160425 - DNA, 1000 bp, Homo Sapiens
ttttttttttttttttttttttttttttttcgattagtaatatttattttgataaatcaccttccacactcagattgatgaagcatttgttattgtttaaaaaagaagccttcattacactgctactcgttttcgagtggttcgttctgcaccctcttaagatctttacatgccaaaccttgggtaattaagtcattttcattttgtcagcttaattaattcgaaggtgacctgagttttattgtagaaaataaacaacaatccattctaatgttaaaatgttttaagaatagtttttaaataaatagtaatttatcattctgtaaggctagacatactaaatttggtttaaagtgttacgatcatctttaaaaacaaagtgtcttaaaatagttatgtcacaaggtataaaatatcacatataggaatcctaagataagatgtgaaattaacaagaacaagcaatttctaaaattgttctttcaatcagaaattatctttagaacatttaattttcatctatcaccatcattgttatatagtccttgtaattaattgaatttgattctggatcaattgcagcagacaacatttcttccatttcctcttgagaaaaaggctcaccttcttcagtcatatacttgatcagctcgtccttagtaagaaacccacgtttagctgaatctaaaacctcaaaagctcgaagaaggacatcttctggaattggtctgtattttctttctagtagtatttctgtcatcaccggaagaaatttttcgaatcgaatgtatccagtaggttcttcttcctctacctctgcaatcagatcatgcagctctccttccgtaggacagcatcctaatgacctgataattgttccaatctctctcacatccactgtattattcgactcatggtcaaagacttcaaatgcctctttgatttttttgtgaaattctgctactattatctcttccctgtccttctcgtccgccatctt

SEQ ID NO: 160426 - DNA, 1000 bp, Homo Sapiens
tttttttttttttttttttttttttttttttttttttgtttgttccaaaaaatactttatttattaaacaatatatccataatctataacatgatccaaaaatactgatatacatctttacattatctaataaaaagatttacaacattatctttcctttacaaagggaacatagataataattccttgaaaataaaaatgtaacattcatgttaaagctgcatcatcgttttggatgaaacgtggttaaaggtggacaccacaaaatacatacagaggaagaaagaaactccaacacaatctctcctgaatgggaacattttcttacacttcccctggcttaaaattcctctcagcacaagtattgaaggccaatcactgctcactaaaaatttaagaaaaccttaagtcttcaatgcccataattaacatccctcacggttttactctaaaccatgaagacctaacctaggacagggcagaccctcggctctggggtcatgtgggaagctgctctgggccagcgtcattgctcaaagcagccccagccagggctcccaacgacaggacaggaggccaagtccggcagggctgctggacaccagacaagctggccggtgtccccatcagtcccagcaaaccctcccaccgccaccagtctgcacagctgcttctcgctgctccaggcagactggaaaacacccacgccacaaagccctggccaacagtgagacgggcggtcagctgctgctcaggcagccacgtaggcctccgcacggcgtccctggccaacagtggtctcatgtccacccgcccaggggtcccgtccagcatgagacgggcggtcagctgctgctcaggaggccacgcaggcctccgcttggcatccatgtccccagcagcagcacctagggcacattcgcagatgcagagggctcggtttcaccagctcctgttttcactgcagcctgccttcccctacaggatttcctcagatcac

SEQ ID NO: 160427 - DNA, 536 bp, Homo Sapiens
tttttttttttttttttttttttttttttgcaaggggaaactggggcagttttattgacgatggcaatgtacaagactccacacctaggtatgtgcacgaggtaaggcctgagctcaggccttatgatcctcctcaggacccttgggggcaaacttctcctgcagtttcttccacatgcctttatctatttccttaagctcttccaaggtgtctgtggacaggatcagcttgtactcttccaacgacaggccactgaagctggtgtctctggggcgagggtacttgtgtttgtagtagtttgaatggagtcgcgctaagctctcgtacatctgatcacaggcctcaggctctgcaacctgggtattctctccctcccgaaaggcctgtgctacccgctgtcgcaggtaagcgcccaagtcccggccccgtttggtctcgtccactggccattcctcacagagcttaagaaaacgccggtaccggctggccgccatcttgggccccgcgtgttcccgccttagcgggaggagtcggc

SEQ ID NO: 160428 - DNA, 1000 bp, Homo Sapiens
ttttttttttttttttttttttccaagatgccgggcactgcacggcttttatcagtttttattacatcaggtcaaggaaacaaatggaatctatccacatggtcctgcctcgttgggcatatattctaaacatacatccattttcatacccaatgagaaagaactcaattccaaaggatctcacctttcacaaaattctacccttaagatcctaaaacagtcatatcactgtgcacaaaatttttggcagtcacaagctctaacacaaagcagagcttaaaaacaaatggagaatataatcagtgttcaaatgcaccctcactgggtgggtcagactgcatgaggcagtgtggctgtgtggagggagaggtccggacctgtggcaaactgctgctcctgccaggaggctaccaaagccaaggctcttaacatattgaggttcctcagctgccccagtgcctatatctctaacaacagtaaacagtgaaatacctgcaggcaaccatgtctaaataaagagataaatatttgaatcttcaagaagtggccaacttcagaaaggcatctcttggcaccctagaggagactgggatgaaagttgtaccggagactggagaagagcccgatgtgtttcacgaggttcggctccactacataggccctctctcccttggccctcaacagcgagtacagtgccatgtccttgccaaagcccttgtggcagtacacttgggacaggtaggtgagggtccggcgggccgcaggtgccgggaagagcatggctggggtgcaacactgagaggcaggaaccacactgtacagggaaggactcagccgccgcagttccaggaaatagtgccgacccaccagctccaccagacccatgctatacagggagaagaagagcattacaggccagctaaaccctgggcggctggcaaacctcatgtatatccaggttagtaagggccccagcaacatgcctacaccaacccattcc

SEQ ID NO: 160429 - DNA, 1000 bp, Homo Sapiens
ttttttttttttttttttaaaaatcagatggggactttattgtgatggtggcaggtccaccagcagatgcaaatgtggggtgctgagagtggcaacacaggccaccccaaaccaacttcactccctcccctgtcctcagccagtacagaagccaaatgtagccccagccctagactccagcccaggcagagtccaagggaggggtgtcagggtcagaagtcacagggagcccagtgactatcaaggtggctgagagcaaggctagggtagggatggggcagagaaagggcagggggtgcagccccaggtggcccaaagcaacacagaggagcaagggctggcattcaagtcagcaggtccctggggagaacagatggtgcctggagtcccacatggtggtacaggtgggggagctcttggtggcaggcagcaccccaggaggagtgggactcctgccgaggctgaccccaacttcaaggctgccaagttctgatgggagtgtcctcctccaggaacatctcccagccccggacgagcagagccctggaggagtgggactcctgccctgaggctgaccccagttttggggctgccaggttctgatgggagtgtcctccaggaatgtcttcaggcccccagcgggcagagcccagaagggtctgagggcatgatgggcatcagtgggattttggttgtgccaggggtgggcagggccacccgtgagcaaaggccgcaggggtgggggctatgctgccaccaagcccctgggggaggggtgtggaggcggcctctgcatacgcccaggccaaattccaggaaagcgggaccagccgctggaaggggggtgagccccggagcatcaggagatgccccgaggagcacagacaggagaggtgcagctgctggcccagccaggagcccagggcctccctatttgcagttctccttccggaaccctttgtctaggtcgatgtacttggcaggcagggggctgtgggcc

SEQ ID NO: 160430 - DNA, 1000 bp, Homo Sapiens
ttttttttttttttttttaagggataaattatttctttggatttatatttttccataaaatgcaaatgctgattcatcagtgagtcagtatatgaaaaagggcctcttaaatgtcttataaacactaattattcttccccagtcttcatttccttaaagtcacatcgctcacaagtaggctcatcttccacttctgccatctgaaggctggtccatgcccagcctgaaccaggggaaatgtgcagaactcaccaaaatttttccaacaccctgacaacatttcatttcaaactctgatccctgccctgtgattacaaagaggatgctgctggttgtctctcacagtccctgctgtgggaaaaactgatatccaatgttctctgaaacatactgtctttcatctagactcagaagctagacataaaatttaaaaaagaagagtgtccatggccatgttatacctgccacctgctagggcccagtcatcagtcatggttgctgatgatgagactgctgaaaagacctgagcaggatgggagagaacaaaggtagttctttttatagcatgaggggaatgggagacttcaaagcttccagcagcctcatcacccaggcttcaccctagaagtcatttttgtcatcaggctagctgaggcttctgggcctctccttgtgcctcttcatattcttcttctggtttcagctgagggccagggatcatcaccgtcttaaggatgggctgcttagggggtgcccatgggggaacgatcttggtatgcattctccagcttccataggggtttgtcaactgcttttcgaatacaacatactccaggacatccttgggtacatcttcctgtccatacatcaaccggccaaaccggtcatagatggccagagtctgccgggtgtgcatgcgtacggtgatctggccgtacacgttgccctggttcatcatacttgaacagcgaacttgaacaacatgagagggctctaaaga

SEQ ID NO: 160431 - DNA, 1000 bp, Homo Sapiens
ttttttttttttttttttttttgggagttgagattttaatatcataaatcggtgtggggccacacctctcactgccaggcccgtgggcctcctatcttcatattgcctggaaggctgcctgcagccagggcttcccccatcccctaggaaggatccagcaccagcctgagaagggaggcaacagcagctaaaggggtgggaggaggaggagacagaagcatgtgctgcaggcgcatgtgtgtatgtacttacatgtgtgaacacatataaagtgtcaggtttacagaccctggctcaaggacagtctaggatgggaaaggaggtagggcgagaagaagcacatattttctccctggtgcttcagcctcaccctatccaagggacagacatatggggtgtgagaaacccatccccaggtcccagccttcaggactggagtccttttgagtctggtggagtcacagatccagtctttgggggacactgggtctgtctccttttgaaagccctggaaaggtgggaggtaagaagtaaagggagacaggtccctgctagaagaacttgacgcctcggccatcgctgacagtgatgatctcggccttgtgctcctgctgtagggcctgcagagcccgcagtagagtggcttcatccagcccgtggaactcctcatcctctgtgtcttccccattagtcagttcatacagggtaaagacggagttgttctggccactcctggaaacccactgatagatgagtttcccccattcttctggcctccgccacatgatcaggaagctggacttgctcttatccaaccactcgaggttccctttcttcctcagttcctctaatacaatctggatcgactccacaggaagctttcgctgtagcttgacgttgttgaagagcgggctctcctgagcttccatcaccgtcatgctggactgtttgtgcaggcggcagaaggacaggaccagcgagcaccaggcggccagctgct

SEQ ID NO: 160432 - DNA, 1000 bp, Homo Sapiens
ttttttttttttttttttccccaaagcactttaatgcattcaccaacccacagtccctgcccgctggctgggcaagagaggccagcccccatctggaggctcctatggcttcccacacctagtgtgtccaggaaggctgagcccgcacacattcccatcaataggtgaggggcgtgagaatgaagaggcggtcttcctctttgcggatccagcgcatcagcttatggatggcactgacggctgacgccttggtccccagggggctgtaacacatgtagagctcaaaggcgcctgtcacccaggccaggaggttctcgttggggcccgtgtagtaaatggtcttgagtgggcgagaggcattgtgggcacgactgtgcaagtactggtagaggcccagcagccgctcctgctcctcttcactggtgtatggggcctcaatctcagggctggtgaagagtcccgagctctttgacttatagaggaagtgacgcaggtcagggatgcccacttgggcaacgctgtagtagggtgtgcgcagtgcctctcgcagggccaggtgggctccgcgcttgcgaaggcgctcctggaagcggcggcggcagtcagagactgcaaagaagtcctcacggtcagtggagacaagcagcaggcagaggtcagtgtcaggctctaggtaagagatgtgtgcgtggaagaagccggctgcgttgaatttgggcaggcacacgggcgtccaggcctcgccctcgcgaaaggacgaggaggaactaatgaggttgaagagcaggtgcaggtcgatggggtgcagaaattggtcctttcggcgcacgagtgccacgagctggttgcgggccagcaggatggagaagaccaggctgcgcgcacgcgcctgctgcaggctggcgctcacagtgtcgcgcacggccgccgccaggggcaggcaccgtgccgcccccatcaggaagctggggtctcgtgccatgagctgcagcaggttgtc

SEQ ID NO: 160433 - DNA, 1000 bp, Homo Sapiens
ttttttttttttttttttggggtaaaaagctttctcatttccacgcaccctccaccttgggctgctgggtgtataggcacatggtgtgataagtctttggtatggaatgaagctctatcctttcaaagtcaccaggttcgggttcccagccctaagtggccatggcactgggtggtctgggttcacggggctcctggagctctcgggtgtcccgtgtgccaccccaattccttgcgtgcatgcccacgaaaggccgcccaggcacccccggtgaccccatggaagtgagttttggttctgctctggcttcgaagtgcttctcaagctgaagccttagggtgtggaagatcctacagttagctggagcttccgagtgagtagcggctgcgggcctggcttcggttacggcttcggtcccagcggggtctgaaggcattggcattggacggagaagcgctgtcctggggtggggaagtggccacacccctacaggaggacctttgtgatgacgcagccgtccctgtcaccctcggggtcgtccttgagcggcggcggcgcagcgggggcccagcccagggcgccctcacggcggctcacatcccgcagccgcgcctgcagcgcctcccgctcggcctgcagttcccggcgcgcctgggccgcggcgcgctcttcctcctgcagcgccctccgcctccgctccagggcgcgctcgccctgctccacggccagctcgcgccgctccagctcccgctcccgccggctgccgcgcacggccagcgcgcccatctgttccagcaggcgcgcccagtcgccctcgggggccgcagcggggccgggcggcggcgggcagggcgcggcaggtggggagctcccggcgccgctgctctccagctcccgccggtgcgcgctcctcaggtgcctccacaacgccgaggtccccgcgtggaagcccgggccgcggcccacctgctccccgcacagacggcaggtggcccagtgg

SEQ ID NO: 160434 - DNA, 1000 bp, Homo Sapiens
tttttttttttttttttttttttttttttttttttttttttttttttttttttttttttttttttttttttttttttttagtgtgcagtccactttttattgggacactgaattttcaaaaacactgacttgcacaaatagtgttaattattttttttaaatggtacagaaataaaattcaaaagatactaaactgggagtcaggacacctgagtcttaccctcagctctctgatgcgactttaagcaaagtcgcttgctctttctggacctcagtttccttgtttgtaaaaacagaaatgatttctaagatcactcagaattgtaaaattctatgaacacttatgaagtctattgagcttgcgtcactgttcactccaatgagtggggataagttgtaagcagaaaaatatcattacttcacatcttttcgttcactatcaacacttaaaaacaaacagccttaataaaaatcaagtccactttgttttctctcttaaacagacaaatcataacgaacagagtccagtgagtccctctgtcgcaacaagttcaggatcactcaagcaggtaaccgcacacaacgcacaatgatgaagagcataaacacaagccataagtatatttttatgtcgctttttcttaggttattgatgcatttccagaatctcttcatttctttgcaataactgaaaaccccagaagaaagacaccatttacattaagaatgtgatcaatgttacaagcttctgcaccatgtcatttttttgttttttcaacctcaaaacttgccagagcaagaattttgtctccagagccaaggtctgtagagactttctcaaactggctgagtatagcacctgcatttgctgacaagaaggcctcatcatctgcagtcagcttctctccaagtttcctaagagctgttagtatctccactttctgttgagtgtacaggtctctttccagctttcctaccatcagatctctatccatctctg

SEQ ID NO: 160435 - DNA, 1000 bp, Homo Sapiens
ttttttttttttttttttttatctcagaggtaaaactctttaatctcagagcgcccctcccaactgccgatcccccaacccctcactctctcccccacaccagggccggagagtgagggcccctgccccccaccttgggtggacgagggccctttaaggcacctgtggaggtggggggcgaggggcgggagctggtaccatcctggatgcagggacgggcttcgattggcaggctgttgtggggatggatggaaccaatgaaagggggtgccagaggcagggacagtttggggccatccctgagggggtcagggaacaagttgtcgggacgtgggcaaagacgaccccagtccccgtagtgtaaagaacgtaaattgaaggccccgggccaattctgggaagaggagggcttggccacgcccccaggaagctggagccaattgggagggagaactcaggaaaagcggacggtgactatgtagagactggtcaagccctttacaggatttgagccaatcaaaaaaagagctgtccagcgactaggggatggagccaatgccgtgcgagcaaatcccttgtcgctaggcggaaaacaaaggagttgacccatttagagcttagaactcagcgagccaatcccttaatagaaggaatctgtcgctaggcggagagagacgacagacccaatcgggaaacgggacagatgccgctcctcggcgcggcaggtcgtgggctggaaggacggcggggattggcagaggcgggacaatcttgggaatgggagacgcaaggaggccggtcccggatcggcctcagattagcaggccccgggagtggggcgggggcgtagtgtgggacggggcggacgcggcccggggcgctccctccctggacttcaatatttccgcttcagcttctggaagtcgctggtgttaagccgcggccgtggcaggtccccgaagacctgggtgtcctcggcctctcgcagcaccagcgcgcg

SEQ ID NO: 160436 - DNA, 1000 bp, Homo Sapiens
gccagtcacatgcttacctgcatttttaaagacagctttcaggtatttggggactacattattaccaaaccttggctttgggagattatacaggtccgaggaactcgtgtctactgcagacgaatgcaattaccccaccttcctccatacagaattgttaggaaatgtccactcctttgggggtgatttttctcctcaagttgtagccaacattttgtccgtaactgatttcagggcaaacatttctgacatcttcctccagctcagtctgccatgccttggcaatccagtttcctgtcatatgcgagccatccaagttgatgccaagtaagatttgcccagctcaaagtgaaagtgtttgcgtcttggtatccggaatcctcagccccagtagcaaagctttagtcattcaccttcatccaatagacgtttgtgaacgtcctgctgtccattttgtcaataaacaggcagccctgcaggtggtccatctcgtgctggatgatgcgggctgcccacccgctcgcctgccacaccacctgttctccattggggtccagcccgcgttctggaggcaggggacgccggctagggccccacgctgggcggttcggcctgcgtctccgctcgccctccctccgggcaggctgggcccgcgggctccaggcgtggctcctcggcgggaggctctggtgctggagctgtgagctcgggccccagcgcctggtcatccagggtgaaaagcgtctctctctttggcaggataaaggcgaggggctcctgaatggcgccgatgttcacatgccctaggttaccgtacttggagagctgagtgggaggaatgcctaaagtctgtgctatctgagctggtggaaaaaggacttggagacagcgatttaaatacggaacaaggtcttccaggaagacagtgcagaactggacaaagagctcttgctccccgctgctgaaggcagcctcttcagcgcgatggaaggccaggatt

SEQ ID NO: 160437 - DNA, 1000 bp, Homo Sapiens
gatacatgactgacacttgtacactaggtaataaaactgattcatacagtctaatgatatcaccgctgttagggttttataaaactgcatttaaaaaaagatctatgaccagatattctcctgggtgctcctcaaaggaacactattaaggttcattgaaatgttttcaatcattgccttcccattgatccttctaacatgctgttgacatcacacctaatattcagagggaatgggcaaggtatgagggaaggaaataaaaaataaaataaataaaatagaatgacacaaatttgagttttgtgaacccctgaacagatggtcttaaggacgttatctggaactggagaaaagcagagttgagagacaattctatagattaaatcctggtaaggacaaacattgccattagaagaaaagcttcaaaatagacctgtggcagatgtcacatgagtagaatttctgcccagccttaactgcattcagaggataatatcaatgaactaaacttgaactaaaaattttttaaacaaaaagttataaatgaagacacatggttgtgaatacaatgatgtatttctttattttcacatacactctagctaaaagagcaagagtacacatcaacaaaaatggaaacaaggctttggctgaaaaaaacatgcatttgacaaatcatgttaatagctagacaagaagaaagttagctttgtaaacttctacttcatttgattcagagaaacagagcatgagttttcttaaaagtaacaagaaaaggaacaaaaaaaatgaggtttgaaatcttttaccatggcaaaacattaacatctttctcaaaaacatagagaaatctggaaaaatcaagaagataaaattctggaccagttagtgacattctttcaagcatacttgtaaaatgtttccttaaagtgttcttgggatgaaaatgattgtcatgtctccaacaacagtgaactgatgttgttccttggaataaaag

SEQ ID NO: 160438 - DNA, 1000 bp, Homo Sapiens
tttttttttttttttttttttttttttttttttttttttttttcactcagaccaacagggagccaggccctgcaggggctttattttgacaccactttgtttcaatacaaacagtccagaaagaaagtcaagtccctctgggggaggggcaaggggaagagtggtctgtgttgcttgggagcccaacctacaacccaaaggtgggggctgggctgagactgccggtgcggcaggggaagatggcaccaagaatgacagtgcttggctcagctgccagagggtgaggcccacagctctcactggcgggtgctgtccaggccaagcccagaatgatgcagaggaaggagctcagccccaggagcctgcctctgcctctcacatcctctgcttccctggccagcatcaagctcacagcatccagagtcgaatcacagcagacaagaccctccatggccaccaacccggggaagaagggataaagaatgtcacagagggtcctgcattccacagcagatggtacagagggaccctgagacaccctgaaacaatcttccaagtgcttactgtagaaaggggtggtgagacgggagaacccaagggtctccggtctgatcccaaatgaaacctttaggtaccaggtaaagtttccagcccttggtaacgcccagacaaaggtccttcccctctcctggcacccagaagaggccactggcagcagcagcagcagcaagtccgcagcctctttccccatgggacgggtctacagtgaactccttccaggcctccccctggttccagaggatggggacccaaggcctcgaactagaagaaccctagagccagcaaaaaaagccttctaccttccgctttccctacctggggaaagtctggacccagaataagccatcgtgggggaaccccctttcccagtatggcaggataagtgagcagcagctgtgggggcaggacagaaggacaagagtctaacacacggagggtg

SEQ ID NO: 160439 - DNA, 1000 bp, Homo Sapiens
ttttttttttttttttttttttttttttttttttttttttttcagttgaagacaacctttactgcatgttgacgctgatttaggcatagcttcctaaaaatcatgtataaagttagttagttagacatgaaatctcttccccaatgttgatacctgcccacaaaatattctcaccttcagagtataagaatcattcttaaagccaaatattcagttcaaggcacatacgtcatctgcagttgtaaatttgcatttaatatttcacaattcctgtaagagaggctagtcaggagggaaaccctcaagtttaaatccccacacttacttacttactgctcatccgtcactttcgctaagtgagattaataattcagtagctggtccagaacgcacagcttgggaacgcagaggcccaggcctcatgtaatttcccactcccgtaactgaacgtgctgacccatgttgatgtctgccttcatccaggtggcaaatcagacatgctacgctgcccccttcaaacgagttcctcgtgttaggggcaaaggtcacagccaaactctgccactgacagccagtgccttggcctggatcctctctgtggatgcaggcctacccctcctcagtccagcctcatctactagaccagcttggccattcacttttcagatgtctgtgagcacaggactgcagactgaactctcactcaagttcttccatttgccaagcccgaggccttttccggctaaccagccctctctgcgctgtcttgtctcctgactcccaccctcaccattcacagaccatcacgacacagaggatgccaagttcttttagtaattcaccagctccatgcagggacatcacagggctgccctccatgagcagaggaggagggctgcctggcagagcgtttcacactccaggttagccagaaagagcatcttcatttttgtttccacacaacacttctctgtgagcctgttggccaacaaagtggcgg

SEQ ID NO: 160440 - DNA, 860 bp, Homo Sapiens
cttttttttttttttttttttttttttttttttttttttttggagctttggacaaatttattgaaacatacaggcggctgttagcagagaaatcattccatgattgatgtgttacatttggccactaccttgaatgtataatttaaaaattatatttttcacaactaagcctttggccaaaaaagtcatttagcacatctttaaagatcaataagaaatggattttggacattaaaaagatcaagtcactgaattaaacagtagcaacccccattaatctagaatcccatagtgctgaaggtagaggtgtctgtgcaaagctagtcatttgttaacagcaatcagaagagatgggggcaggcacacctgtcagaggtggcagcagagctggcaggacaggacggctgggctggtctggtcaggtgagcatgtcccagagacagcagcaacagagagccgtccagcaggctgtgaggcaggtggatggtcctagctcatctcttctttggtcttctaccacatacactgtggttttaggaggctcctgaggtccaccctgccagccgtactgtgggtatccttggtaggggtacccttgaggaggtgggtagggtccccccataggtcctggacccattggttgtggtggataaggtgggtatggggccgttggaccagggcctggatatggtggagggttctcttggttcatcggggacctgtaaagtgcacctctcctctccacgaaccgactggataacggtcgggtctgaacctgaggagcccggaccagcccgcagtagacttgccgcacctgtctcagagcaagtgaggagcagccgggcgcctgacgtcacggc

SEQ ID NO: 160441 - DNA, 929 bp, Homo Sapiens
ttttttttttttttacacagaaatctgtactggatgttatttaaaagatgaaatttcatggttcaaatgtatttttctcccataaaaatattttctcttccatttaaatatatacctaatctttgagaaatcttgcacaaatggcattttattaaagaaaatctaatttacaaagctttgtaaattttaagaaaaacattcatagatcataaacaaaaatttcaatatgcaatattcaaatttacaagaaaataagcacaaacttttagacagtgcagttattgctgcactcctttaattccttatccagagcccaaaaaatgtagacaaaccctaaaaatgtagcagaagcatttccgcacactggtgtccagaatctagtttgtgcagaaatgtttccactagatttatagagtactcttcagaagaaagaggcgagggctcgtcatttggtcaccctttggacattttgcaactcttcaatgggtttccattgttggttgattgttataagcttttgaggtacagtagggtccacagtttcccaaggttctggatttttttttcgatcaaggatcacatcggttttccaaagagaatacacagcgaaagatgaggctccacccgccgccacagtcatgaacaccaccaagggaatgagttccttccttttcatcaggagttggaaaaagctcatgatgacttcagcgaagaattgccaaatctagaaattaaaaatccaaagtattgatcgcctggtgggcgccaaaccgtccaccgcgctccgcaggccaactgcgggccggcgcgtccgcgtctctgcagatgggagactcacctggacgccgggcggtgcgcacggacgatggtaacgcccggaaccgaacgggccggcggcctccccaccttatatatagcgaccacaaccg

SEQ ID NO: 160442 - DNA, 1000 bp, Homo Sapiens
ttcagttggtgcttttattctaaagccagcaggttggtgtgtagttgcctccctggtctgaatcagtgcccctttcagcccctgccctgctccctgtcccttgctcccaccccaatctggacagaggactgccctcctcaaagtcaccaacctgctctcagggctgatccttggaaaggagttgtttaaggaaacaccctaattgccttctaatatgtcaatatcagattagattgaaccaccaccatttgcattttaatggaaaagctgtgggaattgggggcttcagtggttaactggtaaagtgtggtaagagggggcctcagaggcatgacaattctggcagaaggtcacaggtcacaggccacaagccacaggctgactgggaccagagtcttcagggggctgattggcctccctgggctccctacacctgccttggggtgactgtctgctgccctctgggaagagccaatcttgagtctgtggtctgaaactaaggagttaaccaatcgagggaagatgaactacccacaaattggtcctcacagacctcacgtgaagggcctgagggtcaggccaggacctgggactctgagcaatgcacccaagagcctgtgcccaggaatgtctaattcagaccgagggatacatgtggggagaggggcagggcccaggaaagagagcaggtcacctggggaggggagggggaatgtcctttctgccatttaccacctctctggcagcctgagcagggaagagaaccaggctggccacctttcacaccacagcctcaagctgtgacatcctcaggccagcctggggaccatgtcatgatgggaggtatgtctgcctgtgtgcatatgtgcgtactagacaagagagatcagggtagtcagtgtagggactgggagagtcatgggagctgggtttcatggcagaaataaaaatccaggctgtgctcaggaaaaggatggtgggtatcctgagaccaggcaag

SEQ ID NO: 160443 - DNA, 1000 bp, Homo Sapiens
ttttttttttttttttttaaacaaaaaaattttttttaattttttctttgggtttgtacaagaaatttacagtgtgaaaaatatacaagtgaaaacgaggccataaacctgggtgaagggagaggctgcttggtcacaaacacaaataaacaagacatttctgagttcttcctttggtctgacttcagccccctcactccaggagagaggctgcagagctcaaacctgggaaccgagcccaggcccggccctgtcccccaatgtgggcaggcacatccggagcagctggtgccatctggctttctctggctttggggtcggggggaatgtgaagaggagggagccccttcttcttccctgctcccctggctggagtgggctggaagcgcctgtgaacagggttggcagtggcactggcagcggtggggaatgaagtgggtagtaacaagagcctctgggtaacagtgaacacggggacctttgagcggtctgatcttgctcctccaagtcatagggccaccctgagttcttggcagaagcccagaggcctggatcctaggagacaagtggctttggggccctcagcctttggggccatccgtggaccctggggcctaagtggatctgcagctgctgcccctctggcagagctccctacagagctggttgctgagggccctagatctcagtagcagtgatctcctccaggcagatgcagggggcctgctcggccaggcccaggtcagcgagctcccgggcctccagctccaggctgagctgctgcagctcctgctctagctgccggttgcgccggtacatctggatgtagttgtgctgcagctgcttctggtagcggatcacctgctccttctctgcctgccaggccagccgctccccctcaaagctgtcccgctgctcctcaccccgccgccgctcccgctgcagctccacccgcaatcgctccacctgggcccgcaagctgcccccaaccccggctgct

SEQ ID NO: 160444 - DNA, 1000 bp, Homo Sapiens
ttggaaatgtaaaaaatgtcagtatctatatttaatttcattgcttcaaaacatatatatgtatgtatatacataaatttaaaaactgacagaatgacaaagatttttcagcaatacataatcatggtgggagagtttaacatacctctctcaataaatgctagatcacagatcaacatttataaatgtgtagatggtttttaaacacatttgcttgatctagcagacatttgtagaatacaatacattgatttcaaccatccatgaagcatttataaaaactgacatatactaagtgcatcagttaggaattatattcaggtgaaataaacctcccaccaaaaacaaaaacaaacaaaagaaaactgtaccagtaagaagtgcatatttttcatgtatgggacatccagaaataaatagtccagggctgctgcaatcacataaatatgccaattctattaaatctatcctaaatattttttagattacagaagcaagatggttatgacttccggccaccctcttcttagcttgcggcttttacccttatggtcacaggagggctcctctaggtctagaaatcatgtctacttgtccaaaaggcaagaagtggagagatgtggctacatgaaaccatccctgaacacaatatcttccccagagtcacatccagtgacttctcatattcatactagccaggaccggaggaaatggcctgcccttgcttgcaagaagggctgggagatggaagcttttttttattattattatttttgagacagagtttcactctgttgcccaggctggagtgcagtggcgcaatctcggctcactgcaacctctgcctcctgggttcaaagaattctcctgcctcagcctcccaagtagctgggattacaggtgcatgccaccaaacttggctaatttttatatttttagtagagaggggatttcaccatgttggccaggctgatctcgaactcctgacctcaggtgatcc

SEQ ID NO: 160445 - DNA, 1000 bp, Homo Sapiens
tttttttttttttttttttttttttttttttttttctttctgagagtcatttatttcttttgtcattgccaaacattccccaggtcttactcaccagaaattaacatagcttcttcatttctcctccctgacaaccctcatctactgaaagggctttaagggcacactgccaatgaaaatgcagagtgcatataccatgtccttaacttgtttcaaaactacctattctggcagtatccaattcaggtttcagtgctcccttgtttgaaagtggtcttcacaaaagcccacattttaaagctatttggaggagcacaaagagttaaagtggtaatagcctttcagaatttgaaaaggtagtacttgtctatatcaggttcattttttatgtggcatatgccacaaaataggcaagaatatataagaccaatatttacgcaaaatggggaagagaatccagaaacacgacaacaaagctgctctaaccaatgttccagagaaagccaccctcaaagagaaataacccattaaacattaccagataggcatgaggtacagaaaaagaatttttctttccagctccagataaatatctacatctggtgtcaaagtctcaggatataaagaggagagaactccatatataaaagaggataggacaatattctcagaaaattcaaaaagacagaggttggctaaggggatgggtggaaacagtggggcgtagactaacaagtaaggtaaagtccagggagaaggaatgcgcaccttggttttcccttagtggcactaccaggagcactaggagactgtcaaaacatcaggggcaatgtgatatttctcaattcttaaaaccaaagaagcaaaaataagcttcagagggcaagtgatcatagctatggatgaggcctcgggctccaggaaagttggggcagtatttattgctgcttctactttctctttcctgtcattttaatgtttgggtcactttactcctaag

SEQ ID NO: 160446 - DNA, 1000 bp, Homo Sapiens
ttttttttttttttttctgtaattaagattttatttcattcatgtcagatataacaagtacaacttgaatgtacaaattctgaacaaaacataaaaaagaaaaaacagcaacaaaaaacttatttaagcagattcatgcaaataaatgactgggacactgcagatgtcactgaccctgttttaccttgaattggcaaatgcaaaggactgctaatggacttccaacagggatatcaaaggaagtcctacatcataaaaaacgaaagcaactaaagaagaggtggaacttaccccagaattcagacagcatgctacaaacttactttctatttttaaaatagtccttgaataaatatccaatcctggaatcagaaagtacatcaaaagacggacaaaataatttaccttttgccttagaaatgcattcttgcaaaagaaacactaccagctatcaatttataatcaagggttttcatttaaagtgcatctgtatgcttatatatcgaggcaaagtattctacagaaaaaggaatccttccaaaacggaggttcttgggcaattactttgggaaatcacctccctgatctgtgagcatttcaaattttgtgtcaactgaagttgctccttcacaccttgtcttttcagcaaaatcacaatactcgctctctagccaaccctgaaaaaaacctttgggtttggaggacaatgcatgacctgagacagcgctctgtacagattagtgtttctgttgacagaatgagctcttagtctctgtaaaccaccacaatttcatcaatgaaaattagaagctcaagatcatctcataaatagttcaagaccctcacaaacattccccccaaccataactgcatacaactgcgtactcctctgacaccatctggctcttgtaaacaccggggcaccaagatgagtgagactgatgccactcaaaatacactacctaatttatttatgtttatatattttatttttcaattt

SEQ ID NO: 160447 - DNA, 1000 bp, Homo Sapiens
tttttttttttttttttcttaagtttttcttttttgagaggctcatgaaattcaaaagggaccactagctaatttcaaccatgcttcacaaaacaataatggctattttatattgcagttaccaatgtaatgcaattagtgctttaaaataatctacactcaaaaaaagagagagaaagagagagacctttggaggaaatatgcttattcaaaagcttcttggaaaagaaaatttacctgaatatcaagtcatgactgatctcaagtgtaatgtttaaaagcttcacagacatgaatattacaatcttcaggtctcaggacttttaatctgagaaagtttagagtttggtttgttttttaaattcactttctaaccaaaacaaataatagaagtactcaaattttcactatttacaactctcagcctacaatctgaaatgacacaatacaagttctcttaaactgcagcattaaagggtaggcacaccattcttctgctgctcgattgtcatccactgaaacacacatagaaaatatttatgttagtaaaatgatcactccatgtacactacaatgacaaaatttacataactcaactcatacatcacttatatagactaccacataggattaaacctctctgaacaataaactctacaaaagttgaacttttagggccagatttttaatgggcctttagtgatgtctttctgagaggggataaaagcaagcacaaattaattttctcaaaggacctttttgtagcaatcctgggctactgaatatcccaaacgttacgcaaaaaggtactatggctgcaattaattgtgtgctgacaaattcttgagtgtgtaacaaaggaggcattccttcataagcttagccctttgctttcagcaaactttctatgatttccttcaatcacagatgaaaaccatatatttcataaggaatttttattgcaacttccagctaggtgacaaaatattgtagaatcata

SEQ ID NO: 160448 - DNA, 1000 bp, Homo Sapiens
tcacaggcagaggtactttatttggcaattttaacatgacacgtagagaaaagaaccctgccctccttcaccagcctccccagaaatcccaccttcctatttcaagacagagtaataacagcaccattttacacgaaagggaacagccacagccttggcaccatttctggttccactttccatggaagggcagagaagcattgctcaaaccccaccactgggtcagaaaccaggcaaacagcagcagtcacatctgaccttttgcacacacgagagcccgacactcatcctggctcccaagccttcccaaggtgaccctgtctcagccaccatcatgcagctcttctagtcccctcccggcccactctgaggagctgagcaatgatgagcagaatcttcatgtctctggcaggcggaggagggttcctgaagtggtagagatgcagtccactagctgggccccaatgaggtcgtgcacatggtaggtgaggccaagccgcaccacgacaggcgcccgccggcccaggagctctgataggagcagttcccggtactttgccttccggaccatgctaaggacagcctggcgccctttaacaaagtacttgatgaatctcccagctccaggcacagctagccaccagctcccagcatctcggacggtgaggactccagcattcaccagatgcgtgatttctgagtccctgaagccaaaggtctgtgtcatttggtcctgctggaaactaaggtccccacaggctggaagtactgaagctagaaatttctgcactgccccagcatacggtcggccatcacaggccttgaggacacagtcacatactctggtcctgtagtcctcagtgaagataattccatgggcatccaagtcgaagcccagctggacgattctgatctccccctgctcttgaagctccttcagctgccggtcggccacggtcctgtcaggcacaaggctgtacacctggctcctcagcacgat

SEQ ID NO: 160449 - DNA, 1000 bp, Homo Sapiens
ttttttttttttttttactttttaaaaaatgataaatactttatctaaaactatcgacagtacaaactggaccagtcccagcctcctgcggcgcgtgccgccgattcacagtggagctcccgtccgtccttgcctctgccgtccaggggtgggagcccggcaggccggcgggcaccatgccgcgggcgcgagttggtccacaccgtccttgcataggtctcgcggttgaggtagaaatcctagttacctccaactgtgccgcctgccaccccggaaaagctgcccatggcgtgcgagttggtcagtctggtggcagcggacgacacgtgcaccaggcctgcggcggccggcacagagctgaacagcgactgcagcacggaggagccggccacggagccgaggttggcctgcagggacatggggccgagcgcgaactgcggtcccggcgggaaggggcccaggaaggaccggtgcgtctgggcggaggacgccgcgccgcctgcggaggacgccgccggggccaggccggggccgctgaggaggcttccgggaggcacggccgccgcagagatgaagaggttgtggccattcttgaggtcgacctcgcggtcccgggccttggcggccttgccgctcagcagtggggtcttgtccgtgggcccgcacagcggtaggccgccctcccctgcctccttgccgcggctgccctcgcccttcagcccagccaggccgtccagctgcctcttgctcaggaaagggttggcgtccgagccctccttgccgcgctgcgaggggaagctcagcggggagctcaggccggccgcctcggggcccttgtggggaagagaagcaccatcactgaagctgtgtaaactcaggtccgcggccaggcccccgccgaaggtgcagccgttggcagggttggtgcccgggctgagtccgtcagcccccgacagggagccgggaaagcctttcctggggtgagcggccagcttggcat

SEQ ID NO: 160450 - DNA, 1000 bp, Homo Sapiens
ctgggtgcaagaggtttatttgggagccatcccaggaagcccaaggcgggggagtggggaagagagggaagggagagcccccgcaggaagtacatgaatgagtgggttactgctgcgggcaactgggactccatcctgctgggcatcctctgagagtttatgtagaatacacttcagaattgtcctgctcaaggacaatgaagctgaggtcctgctccttattgactcagggttgctgctcctggggacattaaccccccaacacttctagcttgcccagtgcactgactgagcacacagctgtggccaccagagaacctctttgggctgtgatacaggaaaccatcggtgtgcatggtaactctctagcagtgtccttcatgccgggacatggggacacgggcaggcactgctggcatctgctaaccccggaggcccatacttcagaaccggtcagctgggccaaggcctctctaaggcccagcggctctcatgggcaaatgtcaggtgacacagagtcagagaccctggccaaggactccccatccggagaggtcccagagggaggggcgaggtggcctctggggggagctgggcggtggggcaggacttgactcaggacaccaccctctcctgcagacactgggccaggtgcctgtgccgaaggacccggggcatcgcaggggggaagggggaggaggggcaggcagcgagggctgcccggagtgctcggaaggctccctgccccaccaggtggactctggcagggcccacgctgccccagaaccgcagggacttgtagcggggagaggcttcctgaaggcagtggtccagcttgtctcgattttcctctgacagattcctcagccccctcagcgccacaaacacctcgtagtggggagcagagcccgcagaggaatccagaatgctgctctccacacagccatggtccagcagcttggcccccgcccactgccccactgcccggcccagggcctca

SEQ ID NO: 160451 - DNA, 1000 bp, Homo Sapiens
ttttttttttttttttttttttttttttttttttttttttttttttttttttttaccatctccaaatggttctttattgaacacccactttggctaggcaatatcctccccctgccctctaatccaggctcaggtacccccagtggagtatcctcagaaggcaactcccaagaccaggagtaatgagagattgggcagagggtaagggacagcagggagacggaggaaaatgaagacaccagggaaagaggagaggcctgaactggacagctgatgctttgtcctgcccagcacccattcgtcccttcttcaggtaatatcatctgccaccacaaccaccagcaccaactctcagtctctgtgggtacatgccaggcctgtccatttggtgtattccatcttcctggccacaatgatgacttgaggctggataccttcctcgtctggaccaatgagaaccaaatccagcagttctgtcagcaaaggggagctctttttatcaataactggtgctgtggggccacactgtgaagcccaagaataaagccaactcaaatgaaagcagagctgagagccaaagagacagatccctgtttggagtcctgggatgcagcctgaagcccaatctagcccatccttttcagctacgtgagccattaaattccctctgccccaagtgaactggaaagagtcccaaccaaggtccttcccatctggttgttcttctggaagtattttgaggacaaggagattttcatctccagggttataaaagtaattgtgtggtgacaggctgttcctaggtccctggggtgagagccaccatggagacagagtccagctcgcctttcctaggatacacactcacgactgtcaacacatcttcgaatacatcagcacataattataaactcctattgtttgtagtagctattgtttttgtcttcccatcaccttgttttggatgaagaaaaggtcatgacccagactggattaatca

SEQ ID NO: 160452 - DNA, 1000 bp, Homo Sapiens
aggtgtgaaagggcctttagtttaatcacagatctcttccttcctgtttttaatgtacttgctccacatcattagatattatgttcactgtttcacatgaataacaagtttctactgaattgtaaatccctataaaccgaggtactttaaaattcttttggatgccattatacagtagtagactcataactgatacccagttaacactgaaagataaatgtgaatatccaactaaaagaagagcccataacctaagctagataaatgagaatggactatttcatagatggagagattaaatgtctggcccatagttcttaccaatcagctgtaggttacaactatgacttaggttccccatacccagtctacttctctatggccactgctaggtttctcaaggagcttctacccatcatctcctagtgtctaaggccacacctttcaagcaacacacctttcacactctatcaagccccaaacacaaggcacagtgtgggcagggccatctttattgaggtttttaattaaaatgctttgcagaggagaccacagcctgccaagggagcagctgcccaaatgtttcctgacccgtgacctagagatgaagtaatttgatttattccctatttcctttagtctcaatggctaaggggtaatggatggaaatggggagaatgaccgagtagaggcaaggacgaagctcattcttaaagaaaaaacctcaaagttcaacttcaaacagctgaaatttgtttcatagctgttggtcacccagttctggccaaccaggaataaattatagttttgccacctcagcagatggcaaaaggagctttccagaactttggcctggtctgcaccaggtaccaacattacagctgctaaaatcaccagaagggattttggaaccgctgtactagtgtcctttcattcgatgggatgtccaggcttcaccccaaagaggcttcatttatgcttcttctcctgtgtgctggtg

SEQ ID NO: 160453 - DNA, 1000 bp, Homo Sapiens
tttttttttttttttttttttttttaaaaataccatgccactttatgtattattatgttggggaggaatgataacagggaacaagaagagaagcaggggttaatccactcactttcctctttagagaagctccctcacccatcccaacacctcaagtcacactcatgaagatagagacagtcatttgggagatttaaagggatatcctcaaaacagaacaccagcctctcaccaccagagatgaccggaaatatgttttctcttcttccttccctgcatcaggggaagaggctggtgaagttggtgagcatcagctggaccagctgccctgggtagagagcatgggctgctgggtcagatgtctcctgctctggccgaaacagggttggtccaaacacaattcccaggttgtggggtgtcatgcgattcttatctgagtgtgctatcaccctgcataaatgctccaggaggtaccgtagagtgtcatggttgggctttggcattgagcctattaattcttgtatctgagagaggcactgctctgattcggagagtgcaagggcagcacggaaatggggcagcagcagtggtggcaccagaggctggggcagctcccggagaaaaagcttcagggctccggtgaccacatgaatgtcatcccactcagtactgtccaaatctaaccgaccttcttgtcctggctgttctgggaacacatacctcccatcggaggtgaccgcacgctctctgtccaccagaaagcgaagcttctggaccactgccaagttcccgctcacccgataaatgccatccacatctagacctcttttatccacagcagcaatgcagagccgcaaaaagctgggcaccgtgtctccttcccgctggcagagtgattccaactggcagccgaacacctggtctcggagcagaccccgctcctgcaggctttgtaagggcggtctcttcgcgatgagccgctttagtttgttgcgcacgc

SEQ ID NO: 160454 - DNA, 1000 bp, Homo Sapiens
tttttttttttttttccataaatatgatttattgtacatttcacattgtattttcacattgtaagttaaattattttccacctttcattaaagtttttttagggttttttgtttattgtggtaaaaatacatataaattttccattttaaagtgtacagttcagtggcattaagtacagtcacaatattgtgcagtcactagcattgtccatttctggagctttaccaaggcgatgaaaacttttagaaaggttaatagttacaagtaagtaggctggacttcactgatgatgagctaggatctgaaattaaatgacagaaaattcaacttgacacagtcccagaagccaagctcatttccctcactctaacttccaggcctaagatggcattaaagttaaaggattcagggctctctccaagcatagttcagttaatagagttgaaaaataaaagtataggcccttggttggggagatcctggtttccccttctcagcccatgaaggagctgttgcttacagtagaaccaagcttctggaaggaagagagcagtgtggcagagggtgtgtctgtgtgtataggcagtatgctaacaggagacttgagggtaagaaatctagaggctgtctttggttctgtttttaggtctttttcatttaactttgacctaagttccttaatttaggaaatgatagctttccacttgacagtctttgaagtctcttccaattttaatatccagatttagagtatgaacatagcttttcttcctgattccagagtttcctgcagacttgtggtcttactgaaggccctcttgaaactgatttgtgatgtagcaagggatccaaaccttacacctgagtctgttaagagcgccctgctacaggaggccacagactgcctgattctcctggaccgctgttctcaaggacgggtaaaggtaaggcagactgaaacttggtttcagttgggcctcattatccttatgtaattcc

SEQ ID NO: 160455 - DNA, 1000 bp, Homo Sapiens
ctgaaatagctttttattaaacggcaaagcagaactgcaacacaatttaaatgtctgtaaattaggtcacaaaagggatgcaaaatgtttgcagtttgactattatatattcacacagctaaagtcattcatcaactcttacaccaatacataagattattccatgattaaaagcccaaatctaataaccttaagctacattagtggatctcttttcatattataagattttagcaatacttccaatattgatttccttaccaaatggaatctagaagctaaatttttaaaaattgttaaaggatgactaaaactcttcaaacccagtagcagggtttacagaaaattctagaacaagtgagataaaatactgagcaagataataagtatacatgtataactttcccattttattcactattctaatactaatacaccattacggaattttgcagaagttgacccactgggtacaaatcaacttagagaccaaactctttgtaactgttctcatccagatgtggctaacataagggtagtcaaacttaatccactttcatatatatttcccaaaagatctactctgtgccagagaaaacacaaatctggagtgaaaatatttggttactactgtttaccgagtacttttccaccctatttccatttttcctcaaaattttctattttaacatacacatgaccagaaattatatattttcagataatacaaaatgagttattttgggcaaaaagaagtttttaacaacaaatattcccaagttaattcagtttcaaagaaaaaccttcatttttagcctccatctatttccaattaattaaagagacactagcattcctatcttaacactaaatacacaaatgacaagccctagctgagacagtatcttattttggttaagtttcaacaattaaaatacaggttactctcagagatgattaactattaaaattacttttacaaatgtgacaccaatttttt

SEQ ID NO: 160456 - DNA, 1000 bp, Homo Sapiens
ttttttttttttttttttttttttttttttttttttttttcccacggtgccttcaagctttattgccacacacactcccccagcccttcctgaatggccctgtgcatgggaacaccagcttagagaagcaattcagggctaggcaagggccagaggactggatttgggactggggtgggtaggggggatctggagaaggaaagtgctaagaccaaagcccacccccaccccaggtttccctgagtggtgtccacccccagggtcttgggggctggcttgtgcattggggggagggggctcatcccaaatggatcctcccctggggtctccaggctcatggagggaagagaagccccactgagcccctcgcaccccccatgaagccctcaatgtgcagggagcaggaagaagagctgcacacaaacgcatacacatgcttgtctccaagagagctcctggcccctggggctgcccagccaggggctcaacagtccagaccgatggacacgagcaggtcctcgagtgcccgcagacgctgctgcgcctcctctatggcgctgtaggtctgcaccgtgctggccacgtggaagcggatgtcgtccaccagcgggatagagtccgtctcctgccgggctgccacagccgctgcctcctccttcaccgcctccacgaagtcctcccgctccaccagcttctcaatgaccttggccatgtactcagtgcactggtcctcaagccgcgccaggcggaagagcttggccacgcgccacacacccaccacagtgtcctcgtctagcatctgagccaggctgcggccgcacagcctcttcaggcctggcagcaggtacatgtcggcgacgctcagcacatcataggctgcctcgggggacagctcagtgtggtcgctgtacatgtagtagagcacgtgagtgaagacgtcgggtgagatgccatgcagggtgacggctggggggccccctgaggtcgctggctcctcgct

SEQ ID NO: 160457 - DNA, 1000 bp, Homo Sapiens
ttttttttttttttttttttacaaatcattgttttattttaacatcactgtttactgttcttcctaactggcagttactcctttgtagatagtacaaatcacaatgtaattcccatcattatgtgtataatatgtgttccttcttgttctaccttaacagcaagtgacaaatacatcatttttattgaatattaattttcaatttatttcagcagcaagcaccaaaatcaaaacccaacaatcaatataataagtatatgtaacaaataatctgaaattcagccccattaagacatgtgggtgcaatatttttatattcccaaaggtctgcatattttgggggcattaaacaacagggaactaaaatttaacacaaaatcaggtgccatttaatactgtttaacatttgaaaattatttatttaataatacagatcgttttaatgtgctgtaaatatttctcgcacagcatcatattgtcagaagtttttcccttttggaggcttcttttttccattcctttccagtaactggcctcccaatgccagcaactcaggtagattcatgcagtcattcctcttctctctgtactggtaagcgctctggaggaagaacagattccaatttctgccagcgctctgggggccacaggatatgtgtggcatgggcatgcagaagtcctagggaaaccggcccaaaagaattactgtcaaaactgtgtccatgatgatcaccttcaacccagatgtgaccacgggggactttgacataccggtttttgtgtcctatggttctgacaatatctccttcaagagcaatcactctcttaatgatcttctgttctgggtttttaggagacaccaatgatacaatgtcaccacggtgtacttcaaaattcctcactttccagtggttcaaaagcaccacatcagatgactggctccccccaggattcaaagaaggctgcatcgatgctccttctactcttgccacacaggcga

SEQ ID NO: 160458 - DNA, 1000 bp, Homo Sapiens
cctatcaggaggatgtatgactaatgctggtaagaattcttgcctttactcttccccaggtaactgaggggcgggggaattcaggcatgataacagaggaacaacttaagcgctctaaaccccaaaggaaatgctttcttgcctccatttctttatatgtaaaacgtgttaatataagaagtcataatattgagcacttactgccaggcgctatgcttaatgctttacatgcacttaatcattcattcaacaaacatttactgagcacctgctatgtgcaggtcctcttctaggcattgggtatataacagtgaacaaagttctgatgcctcaggaatgtacattcatttaaactgcccaatgacacactgaggttgtattacagtatccctgtttgacagacgaggaaaatgaagctacaaatgattaaataaaatctgccaggctgggcggggtgcggtggcttacacctgtaatccaagcactttgggaggccgaggcaggcggatcacaagtcaggagatcaagaccatcccggctaacacaatgaaaccccgtctgtactaaaaatacaaaaaattagccgggcgtggtggtggggcgcccgcagtcccagctactctggaggctgagactataggcatgcgccaccacaccaggctaattttgaattttcagtagagacgaggtttctccatgtcggtcaggctggtctagaactcctgacctcaggtgatccgcctcagtctcccaaagtgctgggatcacaagcgcgagccaccatgcccaacccccagaagttggcaaggttcttaagtgggtagagtatcctgggcatttgagagagtataaattaaggagttgagaaccatgttcaccactttgtagcttgagaaaggagctagagttggcctggaatgtttccccctaattcagggcaggggcagcctgtcatttcgtagagtcctctgtttcgaggggtccaggtacacatttggga

SEQ ID NO: 160459 - DNA, 1000 bp, Homo Sapiens
aaccactgtaaatttattatgcattaggaagcttaacctaaaaaccaatagcatagtaaaaagatatgttatctctgttcatagcagaacaggtttcaaaatatattttcttttaaatgtattcagtcagtacacaatcctttataaaagttgtatatatttttttctgtcaataccttcattacatttataaatacaagatttacacagcaccccatcaaaaaaaaaattaaaaccctttacaaatatctacatatatttcatacctataaaactttcaaaggggtgctctgttaaaggtgggccctagttaatggtccatttactggtgcagcaaaatacatataaatctgtaaagttttctttgtccataaaacatctcaaaaaatagcaagacacttatcgtgaaactcagcttcataaaaccttattttagaaaggaacttaatgtgcgtattcccatgcgattcaaaagttaaacagattgaaataaagatgaattgaaaacaaatgcatactcagagcagttaaggcaggagtgtgatggatgagaaaaactttgagaagcaggacatggaagacatgggaagaagcaaatcataataatgcctttgagtctgaacttggatataaacttcactcgtatccagttactaactctcatcctacttaggaatttccaaattgttaataactttcttagaagcagcctacaatctctatgttgccaccagaatgcttgagttgtttttttcttctgtaaaatcaccttggacccaaccaggacaccaggtccaggaatctgagttgttgagttttacatgatttaagtttgtaatgaaaatttctttcatctagtaaaggtaattactattcaatattattatgtccagaagtgtatatatgctgagtttcattctagctaagaatagaaagtagaataaaaggagactaggtttttatttgacctttgaacaaagacagtagatccctgatactg

SEQ ID NO: 160460 - DNA, 1000 bp, Homo Sapiens
ttttttttttttttttttggattctcactttcatttattttcaaggcatatacaaaagtctgacatggtgcaatgatctcatcaagagataacagaacacacaggagagggttgggtttcctccccggcccaaccccctcaggaaggcacagaaaagtgaggcttgggttcgggggccacctgctttggaactaatctgctgctcagaaggccaggccccttctgaagagggatctcttcctcacatccagaatctaggatctggggaaggtaaactgaggccaccagtaagcatgtgctccaggccaaggctgagtctgtgctgcatccatgtcatcagccacccaagaaaaaccagttactccacctagctcatggtggcggcatcctccctgcaatggtgcatggggggcagtcctttcccctgcagggtgtcattgccacccccatcctcatcctggaggccagtccaggctccgatatgagtgactaggggtgaggtaggggtggcagaagggagatcaaactggagcattccagatgcctactactgccctcacacaacggggcaactgtgctctccaactcctccccttggcagagaaactggtcctgcagtttcaggactagacgagcgtggggtagtggcaataaaggggcttgtatgagaagtggctttcgcctctcatccctaggggcaaaaagtgaatcatctaactggtccaagtcactaatggcaatccttcttccccaagaagactgagtttcctttgtcacttcaggaagggaagaagagaggttagctgagccacccagattaggcccagatttagccaccacctagaacagggcaagctggaagtgaaagaacttgaaatactgactttttccttcttaaaaaagacctaacattgtaatggtttagcaaaattgttataatttcttttaaataacccacagacacccatgacacttccaaatttacagagcaaaaaagtga

SEQ ID NO: 160461 - DNA, 1000 bp, Homo Sapiens
ttttttttttttttttttttgtgttaccaagaagtgttttatttttcttgcagtagctttgttaattgcacaaaatcatgttttgtttttgccatttaaacattatcacacaatcctattctgaaagacaaatgttcattaaaaacaaagcaaaaataaaaattcacaaccttaattacctagatttgtcatttaaaggtttaaagaaaaaaagggaggggctttcttacaagctttttcacaagtgtcacattttctccttaaaagggaaggatttcaaaagaaaggtgaaatagcttaaacagaaatattcataaaaaggaactttacagaattgtcaacaatattaagacaaaattgactaaccggtttcattaccgcatcttcccccgcccccacccccagtgtgttccgccaggactagaacaggcttgtgttcagacagaaatgcttcaaaatcccagtgaaatgaactgtgctaaaaacccgacaggcatcttccctgccctccccccactcgtcttctgcaatcctctaacccagtttctaatctctgaaaggggccaaagctgtgtaggggggaaggaccccgccctagtgtggccaccctatatataattacatattgcatcgtaaatgctggccttccttctgcaaattatgattttggaaaatccaacccatgcagagggataaaaaactgacatcccttgggtaactttttttttgcaacattccaagccccccccggtcccctatccaaggacaaatgtagggcctctaggatgtcccagacccacctcggagggccagtcagttcaggtaggtcaggcccagttctcttccctcccgacagaccccgggcccgggaagcaccgaagaccatgatgctggctggagtgaagacactcgtttccgtatcaagagctgagcctaagaaatgctcatcgttggtcaggctgggtctgggccaaagggacagacagaaagaaatactgtc

SEQ ID NO: 160462 - DNA, 652 bp, Homo Sapiens
ttaagggagaacagttttattagcatcacagggtccatttttccctttccatccaagcatccagagtctggtgtcctttaatcagttggcaggttcaacctggaggccactggagctgccggcccccaagtacatgaatgtgcagatgatacacagattgtgcacccagcttcccatcgttgatcacaagtcggtatccatctcccaggccctcagcctttgctgtctgcttggccacaaggagtaggtgtcctagaagctgctggtcttcttcttcagcctggctaatccgaggaatgggcttcttaggaatgaccaggaagtgcacaggagcctgaggggccacatcacggaacacaagacactgctggtcctcatagagaatgtcagctgggaggctcttgtccaggatccgggagaagatggttggggctgctcccccaggagttgcctgctgggccttggccacttcattcccatcagtcacacctgcagctcctcggacctgccccccgcgcacccccgtggccgccacggctctgcgcgccgcgcgcaacccagcagccagcaccacggctgccgccatcttccctgagccgcgggaacctctcacccgggtcagcactcggctccgcggccggccgtgggtggg

SEQ ID NO: 160463 - DNA, 1000 bp, Homo Sapiens
cacagtatcatgttttaatctcaccacagccataaggcggtaatagcatgcatagatatcattccaatttttcctgttgcaagtaacagaaaaccagaccccatctggctgaagccagtaagagaaaagactaacaggagggccagcctcaggactcaaatacgtcaccaggacatgggttgcgtcccagtctcagctctgccagttcctgtagaaccctccttccaaggttcacagggtggctaccatagcttcaggccctcacctcatgataagacagcaatacaactgccatttcatgtctgttgctggttctacattcagttagaattaaataaattttccagtagcacccacaaaaatactgagtccacctggttggcctacctagatatatcgccagccctgatcaagtcactggtcacgggcctggattttctggttcgcttaggctaatcatacgtcccatcccaggactgaagaagtaccagggctgttgctggagagtggctaatgtcccctttacaaataaggagctcatggtttaggaagatgagcttgccaaaaatcacacacttgtaaaataagtcaaaatttgaacttaagtctacttatctgagcccaaagtcttacaaccatttatggctgttatcctaacacctacgtcgcggaacggaagagtcctaagactgcaaagacccttccttttcttctagatccagtctaagttggttggtaatttctttagaccctgctttcagggaagtttaaaaaaaattacttgcatttgtatattttccttgtattttcggccaaatttcttctaattaaagtacaacataagttgaaccaacacaataattgtcatattaagaaaagataaaacaaactttactcatttctgcttctgggcatggagtgtgagggaccagacttaagttctcaaacaactacaaaatcagaccaaaaaatacaatggtttccaggcaccggacgacag

SEQ ID NO: 160464 - DNA, 1000 bp, Homo Sapiens
ttttttttttttttttttttttttttttttttgtgctgttttttttttattgtgttttcaatggagaaatacatcatctgtttacaaaatagctcttgaaaaatacaaggagtacagatactataaaacaaagcaaactccagtcatgagacactacatacatcatgcgaaagcaacagtctgatctccaggttatgaaaactataattaaaaagtcactacacagaaaaggtccaagtttccagcttggcaaaacttgggtgcagttacatgaaacgtttaataaactgaattgttttccccaatgtgtaaacaaaatgacaagactaaatctgtgcctggtaatttcaatctaactctgaagctacacaaaacacacagacaccttgtacatttcacctgttagtatgaccatcttttttcttcggtggtggaaggaagggcaaggtgactgtgtaaagcaaagatgtgggaagtagaaatattgtttactagacattataaagtcatggtgaaaagaaagcttcgattaatgcatagcctaagggggaaaagactacactccaacttcagaaaattaatttagaaggataggggaagagattaagtaattgcagtttaacatgaaaaatgcacatgtgatagaatggagcacaatggaggattcataaaacatgctcatcagaaaaatctgttaagtcgactttgtccagattcagaaagagtaagtttatcaacatctggcatccctcatactttgtgaagatagatcttctactgcttaattatgagaaattattttattcaaagaaaggagctcttaatcttttgataaaacaaaataaaggagtagagagctgactagatgtcaagtgcttgctagaaatgatttttaaaatgcttctacacgtaaaatgtactgacaaattttggtaaaccatttaaaaataagaattagttttaaaatcttggagaaaatgcctttttgcccacatttaaa

SEQ ID NO: 160465 - DNA, 869 bp, Homo Sapiens
ttttttttttttttttttaactttccaaatactgtttacttcactaaaacctggagcgaggcagggaaaaggtacatcaatgtctgagacaccaagcctaggagtgcacattgacaacggcgacatacagggccaaagtgctgagggccagcagccccgttaccactgctcgggccagtagagctgcccaactgcccagcgagcagaggtggacgaaggtctccataacaaaggccttgtagacactgaggaacatcagcaggaggacagctggccggaaggtgtggtacagatcatagcgtgttatcatccagacctgagcagacgcgacgatgtaatggaccagactgatgttggagtctatgctcatctggatgtacttccagtcaaactcaatgccccgggctccgacccataggggaatgcagcgggacataataagctcagcagtggcccagcccagggcagcaaccatgatcttgtactctcccttgccggcattccgggacatgacaaggtttagacctatcaggtctgccacatccacgctggccttcatgaactccccaatgaagtcatagatgccgccttcccaggtgggaaagaaagtggccaagaacagcatcttgcagagttggacaaagaggtaggtgactccagcctggacgcatttccagaaggcgttgtactcggacaggccgctgcacttgtaggtgatgaagtaggggaagtaggcaagagcgaagcagttcccgaagtgaaacagggtcatgatgccggccgcccggtcccgcccgcgcggggatcgcgaggcggcgtctccgggagcgggtctccggctccgccggctctttcgccacggccagggc

SEQ ID NO: 160466 - DNA, 1000 bp, Homo Sapiens
tttgttcatgaaagtaagtagcttgtgaaatgctttattttcctgtgactaaaattccaccttgtaattcccaataaggattgcttcaagctatttaatacaaattaaacctgtttcaccatgctcataggaaaatgtcaaagtatcttcattcaccaactgagggctggctcttctttgaaggtagctctgagatttgttttgtaatggagacaaagacttatttaactgttggggagggggaaggaggacttaggccaggcaggcggggatgtgggggacgaaccatgaggggcaatttggctgcctctgaaaaggtccagagctaccttaaaagacaggctttctataacaagtggtcctttcttttcctttctttttttttttgagacagagtctcactctgttgcccaagctggagtgcagtggtgcgatctcagctcactgcaacctccagctcccaggttcaagcaattctcctgcctcagcctcccaagtagctgggattacaggcaaccgctaccatgcccagctaattttttgtatttttaatagagatggggtttcaccatgttggccagggtggtctcaaactcctgacctcaagtgatccacccacctcagcctcccaaagtgctgggattacagacatgagccaccgcgcccagacacagctggctttgtcgcccaggctggaagtgcagtggcacgatctcggctcactgcaagctctgcctcctgggttcacgccattctcctgcctcagcttcccaagtagctgagactacaggcgcccgccaccacgcccggctaattttttgtatttttagtggagatggtgtttcaccatgttagccaggatggtcttgatctcctgacctcgtgatccgcctgtcttggcctcccaaagtgctgggatgacaggcgtgagccaccacgcctggcttacaagtggccctttctaagccccaagatgtcactgtcttttcactgaaggcgg

SEQ ID NO: 160467 - DNA, 904 bp, Homo Sapiens
ttttttttttttttttttttttttttttttttttgctttttaaaagtttttatttcaaaaaataaagctgcagttcatttcacataaatatctggggagggaaggggagtgggatggggtgggggcttggcccctacctcctcttctctttcacactgtattgtaaaagcaaaggggatggcttgccgaaccagcgggagagccatatctgcttcattgtcatgtgatcagggagaacttcattgtcaaaaaggagctgcacatgctgagggtttagcatcaagcggtgacacaggaccctccggagatggcgtacctcagctctaacagaacatcggacatacttgttctgcaggacgcttttattcttgtctttgccagaactcagccgctccaggcacaggttcaactgctcatcatagcgatagtagtgggctttagagtggtcaaagctgctgaaggggaggccgaggttgctcagtgctggctcttccccagtgggctgggtgacccggtccaaacctcgggactggtagaattcccgaatccgtttctcttcactgtcttgcaagccaggcaccagcttatacacgatgtcctgcatgacccggtccagtttgaggttgagcagtggctgtgtctcgtggatcttaatgttgcacatggggcagtacttgctagtttggaggtacttcacaatacaactcttgcagaaagtatgaagacactctgtgatggtggtggcatccacgaagtagccggcgcataggcagcaaacaatgtgttcattcaagtctttgatcttcactcgaacctcctcctcgttccgtagcgggtccatcttgtacactgactggagctggttccgaagcctcatcgcgatcgcaatctggcccccctgagg

SEQ ID NO: 160468 - DNA, 1000 bp, Homo Sapiens
tttttttttttttttttttttttttttttttttttttttttttttttttttttttttttttttttttcctgcaaaattcctaagatttattggagactaggcctcttctctggatccacaaccgtgtccagcccagaatcaggacccccaaacgtgtctgggaccctgtccctttcattctggtctagacaagtccccacacgtggccaaaggacagcacccagactctgcccctgaccagtcaatgtgcagcaaacccacttcagtaggcagaagagtctacccctagggagaaggcgccaggagcaggcaggtgggagggaaagtgttcggcagggcagaaaccctgcctggctgtatccaactgtcactcccactggaggcgctgtgtatgcagggcccggcagtaagcccagctgcctacagccaaggcccagcgacagacatcctccttcggtagcagcagcagcctgtcctcctccagccggctcaggaggcctgccacacccagcatcgcccccccccacatcccataagtgttggccgtgaagacagctacaatgaggatggtcactgcgaccaccaacagcattgcctgaccagccacagagcggccctcagggccgaggtggccgccagccactgccagcaccatgcctcctcccaggagcaggttggcagaggagcggtccccattcacccagtggaaatcgaaggccagaaggggaaggccgatgacggtggccacccaggctccagcaaggcagtcttcatgtgtgctcagccctggggccagcgtggtggtggcagccaagacctggagcaggaagccagcagcagcccctcgacttgcctcggctgtgctcacggctgcgtgcagagacaccactcccagcaccagatgggacagggctgtgctccactcggcccccggcttgggggccatggcacctcaggcggcagtatgtatgaggacacagataggagatactcaactttg

SEQ ID NO: 160469 - DNA, 1000 bp, Homo Sapiens
ttttttttttttttttttttttttttttgaaatggaaacatcaattttattaacaatttacggcaatagacatttacagaacaaaaataagacagttccaagacaaaggagtgtaaaagtacagcacacaggttaatactcttcaccctcatcctctccgtcagcactatctgctccaacctcctcataatccttctcaagggcagccatgtcctcacgggcctctgaaaactcgccttcctccatcccctcacccacgtaccagtgaacaaaggcacgcttggcatacatcaggtcaaacttgtggtccaggcgagcccaggcctcggcaacagctgtggtattgctcagcatgcacacagctctctgtaccttggccaggtctccgccaggcaccacagtgggaggctggtaattaatgccaaccttgaagccagtggggcaccaatccacaaactggatggtacgcttggttttgatggtggcaatggcagcattgacatctttgggaaccacgtcaccacggtataacaggcagcaagccatgtatttaccatggcgagggtcacatttcaccatctggttggctggctcaaagcaagcattggtgatctctgctacagtaagctgttcatggtaggctttctcagcagagatgacaggggcatatgtggccagagggaagtggatgcgggggtagggcaccaggttggtctggaattctgtcaggtcaacattcagggctccatcaaatctcagggaagcagtgatggaggacacaatctggctaataaggcggttaaggttagtgtaggttgggcgctcgatatcgaggtttctacgacagatgtcatagatggcctcattgtctaccatgaaggcacaatcagagtgctccagggtggtgtgggtggtgaggatggagttgtagggctcaactacagctgtggaaacctggggcgccgggtaaatggagaactccagcttggacttcttgcca

SEQ ID NO: 160470 - DNA, 1000 bp, Homo Sapiens
ttttttctctttaaaaggtttattgatcatatacaaaataaagaaaaccttatatatcacaaacatacactatgtacagcaataaatacccggggggccaggcccagtgctgcccctcctggacaataatttagcaataaatactgcgcagggcaggggtagggcaccaaggccactgccctgcaagaggtcaggcccctgcccgccctacacgaagtgtgagcgctcgggcctcaccccgcatccaaaccccagcccctcctcacttagatctttaataacctccatcccaccccagcagatcccggggtcttctcccacacacacaacctcccctggctagacctaggcagggcaggcagggactgatcaactctgcttggacccacctctcagcgccaggagagcaacagggctggacacgcgggcagcccttgtcctgttgccaggagaaggctttctgtgcccactcccgtttggttaaaggcttcagggactagcagattgagggggtgggaagaagggcagggctgggacacaaggttgctggaggggccaaagcccaactggggtcaccaagaacagggaggtctcacagtttatcggggacacactctagctcagactcaagggacacccatggtatcaaagctgctgctccaggggcagggtggaaatgtgtgggactggcccagcaggtatggtacacacccaggacacaggccagaggcaggacaggcattagtctctcagacacgccctgcctctgtgtggcactgattatgtactctactctcccgacctgctccaaggccagacagccaacaggaaggcaaaaatacaccaaaaagaattattcagtggcttctgggggaaaaatcgttaatgtgttggttcctttcaccaaaccacagcctaaaaaagtaactcacaagatcccagagcggaaacggtgcagcaggctgcggctccgactttccagatgtggatgggcgctttg

SEQ ID NO: 160471 - DNA, 1000 bp, Homo Sapiens
tttttttttttttttttttttttttttaaaaaaataaatacatgtttatttaaaaaagaaaaagaaaaaccctaccaagaacaaaccctggtcaatgagaaatcaatgcttcctctgaaagccagcaacagccggtgctgtcacacccaagaagtacaggtacctcagtccaaacatcaggtctcgaatattcttctgtggtcaaaactggcattcaacaagttgctggtctgtgtgggctccaattattagcacagacaactgttaccactggatatctcgctgcctatgcccactaccacagcccagccacccccacagcctcaggaaagttacatatcctcaacactccatttgtaggcaagttcctccactgccttcttgctggcaagcctggcaaagcgcttctgttcaaatccattggatctgtccactccgtcccagcgatatccaggccagatattaaatctgttgggaggaggtgctggaccactgtagcgaggtctcacttttttattcttgttctccttggccttattcttcttgatgaagttggccatagggtccccctctctttcctgttctcttagcatcctatccagatcttcgtcatcaatatagcgggccagaggcttttgcatctctttcattgcatcctccacattttgttgctgttgccggctctgggcaagcccttttccccactgggcatacagctcatctctctctgagtccttttctgctttcctcctttgctctaaacgttcgagtttcaaattcctcttacgaccagacttatctcgaaatacggtttcagcatattgaaattcagcttcaaatgccatggtttcttgatcctgttccttgagctcctgctgttctcgctgtatgtcagttaacaccaacccagttttagccccagaatacatgtgtgcagccttctttccaggaggctgactccttcgaggcggggacaggtcagaatcagaagatttggtcc

SEQ ID NO: 160472 - DNA, 1000 bp, Homo Sapiens
tttttttttttttttttttgccaaattggagagagatgtatttataccagtggggctaaggaggaagcagtccagtgggggactttgagtgctgtgcagtgttctcttaagagtcgtagtacagtcctggggtcaagtctctttccctaatctttgctggggaagccttgagccttgatttatccttcccttggctttgggctttgaggaagttggggatggaggggatgatgcttctttaggtttctctattccaagcccctctgaatttctagttgcaacctgccttcacacagagttgatgggaaagattagttgtagatgtcggtatgggattgagcctacagcaagaggaagaagggaactccagtatagagtacacaaaggaaaagggcaggaaagataccaaaggcttatgaaaacaaaggaagggaagaaaagagaaaaaaggtggaaaatcaggtcccagattgcttgttaggaagaatgaggtaattttgtgcctaggaatgcacaatccaaagcttgattttcaccacctccatttgttctctcgagcatccttccagatgtttctccccgtctaaagccagcataccaacccttcccgtgaaatgcccacctcaggactcatccccctccaggccttcctggatgcagatatacacaaagatggaagctgggcggaggctgatgccatctttggacagcaggtgaatgtggcggtaaccttgttgcatgcaggtccaaggcagggtgtactgaccaataaagtcatttcgggatttccagtcataatccattaccacaaaacgcagcatggcaagttcaggcaccagcacccggaaacatagtgtctgcccccagtatggattaaaaccattgttctccacatagttggtctcctgccgtgctgtgtctagacgaacgccaaagatctgcactttcaccagtggatccacaatggacccctctttggtcttgtccactttggggagtt

SEQ ID NO: 160473 - DNA, 1000 bp, Homo Sapiens
ttttttttttttttttttttttttttttttttttctctctctctctttattttcagtttttttgctgttatccagataattaataaaaaccaaccacgcaaaactgggtcccaccctctccttttgctcccagcctacctccccagttgtgggaacaggtctggagtgagaggcagggagtggctaatgccaccaggaagaaatgaaaactggctcagagagggggaagcctcaacagaaaaagaaataaattaaaagccctcctatcccctccagccagggttcgttcctttccccaactccccagggggcagaagtgagtgcagcacctgatgtctgcttcttccccttgtgtctggtgagatggtgcagcagggctgcagggggctgggtggggtcatgtccactgaagaactgtactatggggacagaaaaccagaaatgtggagactgaactggtatcccagagagtgcacgaccctgggcatctgggcaagggcaggcatgagacctctgaattagaagggtccagcccccactgacaggaggctacactgggagggaaggtgaaggtgctgaggaaagctcccaggatgagcctgggagtgcttcaggtatcagcttccagccagagggcgagaagtcctcctcacaaatggatgagtccattgaatccatggactttggagtgggggggatttgttccaaagaatggatgagtccactggccaatgtggggtagaggggtagagaagaccacataggaagagactccactggggatggaatgttcccctcccttgtgtaggctgagtcactggagatgagggggaggcaactgtcccacagacaagacagtaggaggtgggggtcaagagtggagactgcaccgaggcaagagtccatggatggggccaagagggggcaggagtggcgctgtatccacattcacttcagaagttgaagattccaaataggagaataagtggggagaggggag

SEQ ID NO: 160474 - DNA, 1000 bp, Homo Sapiens
ttttttttttttttttttttttttttcacttggccactctttcattacctgggggagggagagtgctcccatggcaccacccgaacgctcactacctgagagcaaggacaggagggaggtgtgctctctatcctggggaaggtatgtcctgggtgggggcgctgatcagtaccaaggtgagggggcagcaccagccagggtgaggccgccccaggcggagaggctcagtaggagttcagagcctgcttggaacggcgcttcatgtgcaggcgctcgtggcggaggaggtcatagttctgcgtgaagctcttgacgcagtaccggcactggaagggccgggctttgtccttcaggtgaaagtggctgcggtgccgagccaggtggtcgtgccgctggaaggccttcccacactcacagcactggaagctcagtttggccttgccgttttccagcggctctttgggacccttgtccgcgtcctcggatgccgcctgctctctcttctccaccggctggagtctgtccggctgcaggtgtatccgccggtgggagagcaggtgggagttcaggcggaagctcttcccgcaggcaccacaccggtaaggcttctgggcctcgtggctctctaggtgcccatccaggtcctcgctgtcgctgaacagctccccgcacaccgagcactcgtgcggcttctcctgctccctgcggctccgcagatgccggatgaagttgaccctccagcggaagattttcccacagttcggacacacgtaggacttcttggaggtctgcacctcgcctccggcctcggtgctgctccggtgggaggcggggaggctgcgctgcttctctgtggggctccccagctcttctgtgcagtacgggccatgctgggagtcctcgtccccagagctggagagaacgatctcgatggtcacttcttcatccaggctgttctctagagatcgcgggttgccgccagctgggtaggtgttttgag

SEQ ID NO: 160475 - DNA, 1000 bp, Homo Sapiens
tttttttttttttttttttgtaacaaacatgcatgtaaatttgtgtttcaatcagacattaaataacgtacaatacaatcatagcaattttaaagtaacattaaagagaagacctctagttctgtggcggttttgcttttatttataatctacaagggatgggagggtttgttttccacatttttaccctcaagttttaaaatttttcccacctcctttttacctacagagctcaaactaaataatgcacttttgaaccaccggtccgcttggagctaacataaataaataccagtgtccaccgatgcagtcctcagatgaacactttctcaattattttttcctttttttttctataaaaagtcaaatgatattttttcaacttttataaagtttgggtggggaggtgaaagtggggagaaggggagtgtcccaccgggtctcggtcgctgctgtcgggtagatagatacggtatacatttctttcctttcgtggcccgagtcctccccacgcgcgggtgtcagcagcctgggccgtgatcccgcctctccctggactcctcccctccccctctccctcctctccctcgctcgccctcccggccgccctcactgataccccagcgccgaggcggtggtcagtctctgtccgtagagggcgtagggggagtagtacggtccggtggcggcgggcaccggcacgggggcgccaggcgtgggaagcgggctcttggagtaggggtggtagcggctgctgagtcccagcgcgtggtgggggctgcgcagcgccagcgtcccagggctgcccggtgcgcccgaggtggggatgtgcatgtggcaagccatggcggccgcggcagcgctggccagagacgacgagctggggtagcccgacagcagtttgtctgtcccgggaaatgccgtatgggtccgcaagtggctcagcagctcttcggacgtggcgaagcgcttgtcgcacggcccgttggccgacacccag

SEQ ID NO: 160476 - DNA, 1000 bp, Homo Sapiens
tttttttttttttttttttttttttttttttttttttttttttttttttttttttttttttttttttttttttttttttttttttttttttgtaaatgaattcagtcaagtttattaaacttgctgtgtgctcagcaccgccctaggcagtaacatgaaaaacattacaaaagaagatctcaacaagggaaaaatatattctgtactatattaatttccaatcatttacatgttgctttttaaagtgttcttaggtcactttggggtatgtggtctccttctttctccatgttcccctaaagctgttgaattatgtgcctgtggcgaccatcctccaggaagggcaccttcctgctgatgaggcaaccatgggttggtcagggctggggtcccgtggtggaggagacatgctgagagaaaaaccatcaaccccgagagctcaggacactcacagtgaatcccagaaggccaaacgtggggaagccacaaagagggctctgggcccctcactcaccccctcccctaggggatgtgcttaaagtgctaacgccgtaggaaaatgatgcatagctacaagccgtcctgggtgctactagactcatcgcctgcctcttcctccctaacttgtgctaatactgggcgatggcacaggccaatagaaaagtctagtgcccagtgaagtagtagagaaggtccaacgtgtaacctagaattcccaagaggaggtggggacagaagagaagaagtgaagggcagagacgtgtgcagcaaaaaggacgtttgtgcttggccggtaccgctgggtcaggggttggtttctgtgcaaagggcaattgggttctgcacagctagcagggtcctaaattttacctgagggaacaaggctacatagcataggaaggaggaaaatccatgcagggccctccctgtcccccacacaggcacgcccccatgcctactgtacaaggtgctgtggagtactggggtggggtatacagca

SEQ ID NO: 160477 - DNA, 1000 bp, Homo Sapiens
ttttttttttttttttttaacagtaaaaaaaaatttttagtaagttccaattgtgtgtcagaattgtgctaggcgcagggggcaacaataagcaagacagatcaagcctataccgtcttgaaatttaagtttagggaccactctctgtcaaaggatccagcgctggtaatatagattgctgaaggcctttgccttctttccaccaggcaacagaatttgtgtccccgtcactgcttcttcttctgtgaaaaatatagcttcagtttggtccacgaatacagaagttggtcagagatattttctttcaagcacacaacaagcaaaacttggccaatacacaccaatcaaatgcacttcctttttccctgggagctcctgccacatctcagccctgcagggcagtcttcataagggagacaaaagaagggctatgcactggcactgacagttgggcaggtagtgctcaaataagcctaaatctcaacattccaagggaatcttcaagatcaaggtagacctagtccagtcatctcttaatcttttaaggatcactggctggatgtggtggctcacgcctgtaatcccagtgctttgggaggccgaggcaggcaaatcatgaggtcaggagtttgagaccacactggccaacatggtgaaaccctgtctctactaaaaatacaacaaattagctgggcatggtggtgcatgcctgtaatcccagccactcaggaggctgaggcaggagaatcgcttgaacccaggaggcggagcttgcagtgagccgagattgtgccattgcactccagcctgggcaacagagcaagactccatctcaaaaacaaaaaacaaaaagggatcacagatctctttgaaaatcagtggcccctttagactttctgtgccaaaaaagttatgctttcacctcagcacccagttttccctagtttatctgaagtttcatggacatatgatgtgcccgaatttcctggagctccagaga

SEQ ID NO: 160478 - DNA, 1000 bp, Homo Sapiens
ctgagacggagtctcactctgtctcccaggctggagtgcagtggcgtgatctcggctgactgcaagctctgcctccccgattcacgccattctcctgtctcagccttccaagtagctgggactacaggcgcccgccaccatgcctggctaatttttttgtatttttaggagagacagggtttcactgtgttagccaggatggtctcgaactcctgacctcgtgatctgtccgcctcggcctcccaaagtgctgaggttacaggcgtgagccaccgcgcccagcctattttagtaattttaatgtttaaacaaggtttcatttcatttcaaaaattccaaatctattagcataaagatgtaacaaaaattgctttttgctcaatcctagaccactccattgcctcacaaagaaaggtaacatgtgctacagagaaagaagtgcatagaggtgttgtactgcaaagatcctgtctattaatctccatactacagctgtgaaccacaggaaagaggcccagcccagttaggactataggccaaggcatgtcactttctgaacatcagttttattagctctaaaatacgactgggctagatcatgggtagctgtctacctttctcagcctccatcctctgcacccatgcatgacaccctgccccgtcagtaacagcatgaggaggcaatgcacaagtgtcgttatacaaatggccccaccaggcagaaaatcaccagacaaggtgatttctcagcttcttttcagctctagttttatacatctcaagttggaaaggaactttcctcacattcatcatgttcccaaggtttctctttgagatgaatactgaagcttgaactctactaatgggttttcccagtttcactaaatttgaagagttgctctagcacaaattctctaatgtacaaattctctaacgtgttttggtggaacatccaccaaagcccttcccacattcatcacgtcaccagagtttccagcta

SEQ ID NO: 160479 - DNA, 1000 bp, Homo Sapiens
cccgggtcccttccgcctgggttcacgttcacgtttattcaaacaacagagccgactcgggcgaggtctgggagcggcgggcgggcagtgtcgcctcctgggctctgctgacccctggtggtggggtcggcccaggctgggacctagcccagcccctctcggccgctgctgaccgccatcccccacaccgccttctggagcccgcagagggaggcaggggcgtccccggggacagctcaggcggccacagttgggggcggggagcatcagcctgtgcggagctgggagcctgggaagcaggaggccagagggtggccccttcggttaagtgtctggggagcggcccgggagcccagaggggtcgtcgggggaagcgcggggcacgtgctcgcaggtgatgaggtgggtgggcagcgcctgggtgtcgtggaagatgacgaagatgctgggctggcagatgcagtccacggcgctgtcgtagcgcaggagcacgtggccaggaccccgcagagggggcgcccgcagaccgcggcggccctgcccgtagtcgccagtcagcacccgtgccacgaacaccgccttatggccatcggcgttggggggcgagtagcggtcctgcaccgacagggaggcgcgcttggcgaaatacacgcccttcccgtagaccgtggcgttgcggccgcagaagctgcggttgaagccgtgggcgcagatgtcaggcactgccggtgccgtcgtgccgtggtacagcacctgctccaccgggcgccgctcgcatcgctgcagcaggcgctcccggtacagctcatactgctgctgcagcagcgggtgcgacacgcgctccacacgaacgacgcggatgctgctgcgggcagcgtccagggtgtcgtagaaggcccgcaccacctcctggaactccccggtgttctctgccagacgctccaggttgttccagggccccttcagcgtctgccccgccaaggtagggcctgaagctgcc

SEQ ID NO: 160480 - DNA, 1000 bp, Homo Sapiens
ttttttttttttttttttttttttttttttttttttgctttccagcttttatgaaaattaataacattaatagctcacagacatatacatacacacacattgctatgtacacagtcattaagttattaattaggctctgtaaaaaaaaggtttctacattagtgttccgggctaggcccgatcagtccttggcatattcacagtggcagccccagggcttggccccacaggcaggcagaggggaggcaggaggccacagagcagccggccccacagtgagcacagcaagtgtcctgggccacctccttgagtcttcagttcccttcctagcacctgcagtccagctgctcagcaagccggcagacaggtcctgatcccttctgtggccttctgcatggtggcttcgggcaacgtggcgggccctagaggatgctagccagctctgtggagtctgtttctgagcagccagagctgctggcctcgtccctcagtgcctgcagggccttcttattctgccgccgcctctcctcatcaatggggtacattttgaagagcagcaggcccagcaggatgagaactatgggagccatggtcacgagcatgttcagtgtaaacttgacacgttccggctgcgagcagccacgggtctggtaccctgcaaagtccagactgagggtagaaatgcccagtgacactccagaggcaaacttggtgaagaagacatagaaggagaagaagatgggctcggttccatggaagtggggctgcttcagatggaagtcgtcaatgacatcaggcagcatggaccagggtagtaagaaggcagctgccacactgatgccagctgccacagctaccgcatatgtaatgatgaggttactctccatgagggccaccaagatgagaaatggcactgctgatgagatcccaacatatacagctgtcttcttgccaaaccgggtcaagaaccactgccagatgggaatggttaaagtggccg

SEQ ID NO: 160481 - DNA, 1000 bp, Homo Sapiens
tttttttttttttttttttttttttttgagactgaatctcactctatcacccaggctggagtgcagtggcgcgatctcagctcgctgcaacctctgcctcctgggttcaaaagcctccctagtacctgggattacaggtgcctgccaccatgcccggctaatttttgtatttttagtaaagacagggtttcactatgttggcaaggctggtctcgaactcctgacctccggtgatctgcccacctcggcctcccaaagtgctgggattacaggcctgagccaccacgcatggcctgcacagtatttcttaatgtaaaattgtgtgatgcttatatcattaaaatcaagttatttattttatcttttggctttcaggtggaattttagaaaatacctggcaagtgaatagttctgaaagtgcttcctcttaagttctttggtataatttggtcattttgataataatcaacccattaagtaggtactttaacaccctcatatcaattaaaatggaatgtggagtacagatatttagaaaaccatgactgaggaataaattatatttttgacctcatggaaaacagaactctaaaattttacttatgtttctgtggcaaagatagccatactgcctatgaagacatctctaactttatattaaagaaatgttctataaaacatctctttctgattattagaagtaactgttctatatacttttttaaagtagaagaggcaagtttcaacttgaaaaaagaataattttgaatttcataaaattatactctttcatgccttctgattcagtaattgtcaacatctagaatttaatgtcagtttgcagactgttaaggattattcttctatttcaggaacagctaattttcctcttgaagcattttctctatttccttatcccagttttcatctcgtttttcagattctgtcaccacttcatattcttgaagttcctgctgcagttctttttcccaatctgcag

SEQ ID NO: 160482 - DNA, 1000 bp, Homo Sapiens
ttttttttttttttttttttttttttttttttttttttttttttttttttttttttttttttttttttttttttttttttttttacacagaccatatgttttatttaatgtgaaggcacaactttaacattaaaagcaaagcgttttagttatttatgatgtaactgtcagtaccagctcataaaaatatatttttgcaagcatatcattgaagactctttcagattgtcaattcaaaagtcaatttaaaaagtcgaagtctatttgtagaaaatcaatgacacattatagcagttccacataatattattgctggacaatctgttcaccagatatcacagggttttcttcatttgttgcacaatccaaatggtccatcatctgatagctgttacctttccagaactttttcatttccttacgtctccaggcaacaactgaggcagtaataagtgtgcaaggtactaaatagaggagagcaggttgcccctttttcatcagcaccagaacaacaaatgtaagtatcatgccaatagcataggcaactgtagacgaaacatagtatatgtaagaagaaccagtctgaacatcaaatcttctacagtatgcaatcaacaggcctggtacaataatgtctccaaaacccaatattgaaacaggcatgaggcacacactcattactgagaaatagatcagttttggtactctgatgactactggcaacttttcattatttccaaaaggtccagctgcgagttcaaccatgatactctcaccattctttgtgatgaatggtgttatgaaaacaaaaaatacatcatagaggaggagaaggcctagaagtatcacacatgacttgaagttgggcaacttcagtgttttaattaaattcagacagaaagcaatccccaagatatcctgtaaaatccaagcccacctgtcttcatttcgaaacacagcccaaacaacagctactgctatgcacagtccagagagaaaa

SEQ ID NO: 160483 - DNA, 1000 bp, Homo Sapiens
tttttttttttttttacaaaaaaaaaatccattacatttattaataatatatcttagattctcatcctgttcttttaaatggcgcccactggtctcatacagaggagctgtgtgactttctggaattatagaaatatccgcatccagccatgtgctgagcagaccaatgtaaaatgttcagcaggttttccaatgtctcttggatatatttaatcatctctgcagaagaactcaaaatctcagagcagctccactccagatccagggcaggaggcagcctccagggagggaggctgcgtttacgagaatctgccttttgtgtgtgcctggctgggaccagcctctgggaaagagaagcaccaagacgtgaacagggctgtgggccgatggctttagcagccacataatccctcctttgatgtccagggtcagttcgagcctggtcccccaggctaggaggagacgaatgaaagaatcttgctgtggtctttcctcgttaaaataacatttcggccaccacctgggctgaggacctatccatctgctccttggtccgctcgaagcacctacgggcgagctgctgctgtctggcgtcctcactcaccatcagctccccgtagaggtacacacccatggcctgatcctcctgaaggaacctctccacacttttgtaggctttcgtgaacttgtgcttaacaatgagttcacaccaccgatggcgaacctctgcatcctgatcctggaggtggtatgtcctctggaggctttgcagagttcgggggctcagagtcttctgctccaagagatgctccagaagcaagaccagctggtctggaagaagcttttcaaacacctcttccttctccctgcgcttccgttttcggggtctccggttcactccaatccatttcgtgacctcggcgcgcacttgccgcgcaagcccgcactccgccccggcgcgacgctccctctgcagcggctttggtattccggaactctc

SEQ ID NO: 160484 - DNA, 1000 bp, Homo Sapiens
caagaataacttgttttattaccatgatttgtgaaaagcaacagggtagacagttcaaggaaggacacagacagtgccctgttttaggttccaaatttcttctttttaatgggtggtgggagctgagcaatgatgtcatccagaggccgttctactgccacgagtgttctttcatccaaaagatccatgaagagtagaggcttatatatcttagaaattttaaaagcatgagctgtgcgcctccggatgacatctgattcattcgtgggaggaaatggattgtagagtaaggttttgtcatttggaaggggcaatgacttgtcaatgatgcagaacatgtaggcatcatggagaaggatgtgcatcggtctcttgggatgaaaactgatgtgtgtgataggagtatccctttggagccaaaggtggtgaaagccctgcttctggacagtccggctccaatctgtatactgtttgtctgggatgctgtactcaaatacctgctggtccgaatgagcgatgacaaggttgttggtattgggggcaatagccatagcagtcactgggaaattgtaagcaggcaccgtgcagtgaagctttagctgttttacgttgtagacatggactccagcactggtacctgatgcagctagccaattcccatctggactgactgccaaaagacacatggcctccactgttcctgactgaggctggaaagcatgcaggtgcttgaagcttcctcctgacagctgaacaatatgcagagctccttgatttgatgctacaaagagctttgttgaatcttcagaaaacaaaatctgaagggcagagcgaaggaatgctggcattttggaaacccttttgaggcttatgttgtcatgttcataattcagccgatagagaaaaaaccgagaaactgtagaataggctatccaacttccacatggggagatacagctacagataatgttctcaggaccctttgtctttaggtgcagta

SEQ ID NO: 160485 - DNA, 1000 bp, Homo Sapiens
gcactaatgctgcttttaatggcggcgcaatagagaagtacaaggttttactagcttgagctactagaaggtgtaaaaggtgcccgctgacactaccaagtagcctcttaatagaaatgtagaaaatatacaggacagggtggagatgagctcttgaatttagtagggtgaaagagttaactgccaacccggcactatcattgtacttgtttggagaaaatctgttttgttctggtgatgatggttttatcttcccttttagttgggtgggaagtaacagaaaatttgtttccccaaaagtttgacattttcttgttaatacacgtttcatttcagtacgatgccaactgttaagcctgcaggaatcctcctgggtatttctgaattgtgctgtgtgcatgtgtgtttgaaagctcaaacagcttgtcttcttacagcatcgagttgtttgctttattgttagacacaatattagcagtgtatcctttccgtattccctaccatcgaacccattaagatctaaaatccttgtcaagaatctggctttaaaagttgggagatggtagtttaaaaaaaaaaaaagctcttgcaaaaaccatccagtccctaagcatgggctatgttgcagcctcttccagaacagtttccactgcagtgatctttcagttctgcccacattaggttagcaggctgtggagagaagtgcctgtgtctacccttttcccaagacagtcctcatttccaaattctagttttgtcacaaaggctcatgctgttccgtgtcctcttcaaatctggaccgacagcaaagtcctctgactagagccatcgtgcttctcagctccgcttgtgtgtgccgtgtggactccgagtggcgtcgcgcggagggcgagtgggcaggagggctcaggccaactctaaggcacttttctctacatccaatggcaggttgtccccccggcacgctccacagctggtgacccgacagttcctggctcct

SEQ ID NO: 160486 - DNA, 1000 bp, Homo Sapiens
ccatctttatcggctgtataaacatctctggtctgtacatacatttcatacatcgtagggtgggaagcgagggccaaagggaggcccagcagcacaacagctcacccgctttccctacagccctacccgctctgtgcaaaccaaggccaacagctcctgctgcctcttcctccctggaaaagtcactgttacggggagggggccaggggttgaaggattagaaggagatagagggcttggtggggaggacacatgtaagtgctagaatcaaacactgaagcgaaacaggcaactggcacaagcagcaagctgaggcatgggacggggcaggaaaaggggagggaggggccacgctgcccctctgggcttgctcagctaaggctctggggtcttgccctcacgctggcagggagacaggccccagagcctcagccccaatacccgggagctagggacatgggtggcactggtaaagaaaggatggaaggggagaaaggagtgaaggccctagtgccctgtcacctcacagcccctctctcttaaacatgcaacaggcacccacccatgtgggtccaggtatggggagccagagacctagatcctctgtggtgcctgagcaggttggggtggggagccagctctcaagggaaagatggagagcctagaggagtcttcctggggcagcagccagtgaaaggacagagatgaccaaagagaggtcccctggccctgccaggggtatgacagcagcaactggttcacacaaccaggaaagaaaacaagaaagaggaattcaaggagaaataccatggtgagtaggggagggggctgtctactctaccctctacaaagcatcatgcccgaatagcagctgagatagggtgctcacgcctctccacccacacagggccggtgagggaaagggggacccagaagcccactgaccaaagcgagtgggaccacccacataccaacaccattctttgggtccattcctgtc

SEQ ID NO: 160487 - DNA, 1000 bp, Homo Sapiens
aagggaagggatcttgctatgttgcccaggctggtctcaaactcctcagctcaagcaatctgcccaccccagcctctgaaagtgctgggattacaggcatgagccaccatgtccagcacactttaatattcactatgggccctcaaaaggaaatgtttgtggggccaccaaaagcaaatgtctcttgaacctagtcacctggggggacaagtgtgggaaagtgcacctgtgttcccatgagacccactcaagaggagcagaaatcctgttttgctatttccttaattgctactagggctgggattttttcatgtttattggcccctctacatttttttctttaaaaaaattcacaaagcatgtttatatttgttagctcttttgattctccctatgatagtgtgaagacagggacaaaacgctaccatttcacactcccagatctaacaatagctaccaagtaattatgccatgcgtttcttctaaccttcgcaatatcactacgaggtagttcttactatcctcattttacagataaggaaactgaggctaagtgacgctggcagacttgcccaaggccacacagctggtaacagggactggtagtcacttgagtcctacatgagcacccttgctactacagcagctcctcccctttctagaggcctagatggaaagatgctggtgtcagcggggggcacaaaggtccacccagtcccacacatgcagagaggcatcatttgttgctgataacaaagtccttggtctgcagggatgccaggtgtgggtggtgaccaaaggagcagggtccatcccatttccatctaggaagatgtgacctctgtgagtgaagagaggttctacttggctccgtgttccatcttggctccgtgttccatcccaagatgtggcatcatagacctggactgtaccatcaaaacctgagatggccaagcaattcttcaggcctggggcccaagtcactcgcagcagctctggg

SEQ ID NO: 160488 - DNA, 1000 bp, Homo Sapiens
ttttttttttttttttttttttttttttttttttttaattgttgatatcgagtttattgatgagccatttaccttcagatgccatactccagttttagcttcgactatctcattctacaaaagttcaccatcttcaaaatttaaacatagacttaccatttgaccagcaattccacccaagagaatcaaaaacatctatccacacataaatttgtacacaaatgatcatggtagcattatttatcatagacaaaaatgaacagaacctagatgtccatcagctgatgaatggataaagaaacatggcatatcatacaatggagtaatttcggccataaaaagaaatgaagtagtactgatacatgctatatcatgaatgaaccttgaaaacatgctaatagaaggaagaaggcagagagggccacatattgtatgattccatttacataaaattcccaaatccatagagacagaaaacagattagtgtttaccgcaggcttgggaaagcagaggtgggaactgactgctcatgggtatggggttcttttggggatgatgaaatagcctgaaattaaatagcaatgatgttgcacaactcagtgaactatactaaaaaccaatgaattgagcctgggaacaatggctctggcctataatcacagcattttgggagggtggcttgagatcgggagtttgagacctgggcaacacagtgagaccctgtctctacaaaaaagtatttatttattttttaattacccaagtgtggtggcatgtgcctgtagtcctagctgcttgggaggctgaagcaaaaggatctcttgagcccaggagtttgaggttacaatgagctatgatcatgccactgcactccagcttgggcaacagagtcagaccctgtctctaaacaaacaaaacaaaacaaaaatgaattgtataatttaaaagggtgaatcttatggtatgtaaattatatctcaataatgctgttactctaaa

SEQ ID NO: 160489 - DNA, 1000 bp, Homo Sapiens
tttttttttttttttttttttttttttttttttttttttttgcaaaacacataaaatactactttattactatcataaatattttataaattcctatttaaaacatgataaaaatcaacaaaaatacaaggtactatattcttagcacttgtagtatatatctcaatgttctaagtatatgtaccttagaacattgtttaaatgtttatggaatccctgaagcatttcaggaaaatagcttgaaatcacggctctagacctattcatcttttaacgtaggtcaacatgcgacaatatttaggattaattatcctgagagctttcaattcaacattaatcatgcaaaaaaatcacatgcacaaagaatattgattactaaaattggcaatatatacatagtcatggttaattaagcaccacatttttattatacatttttcttatgttccctaagaggatattatctttggggaaaattttagagaaaatttagatctactttcccatcataaagatttttaataattcactatttaaatggtcttttgtttcatgaagttttacaacaatactaaaaagttctggaaatatcactgttttggtttttggttactatacagttttccatctctatgatctcgtgatgtttggtatctagtctctctttcctaatacgaatagagtactattaggactccaattgtcaataccagtcctcaggacctttcctaactttctacctagcacctcaatactctctaggaaactgcattctgacaaagggtttagaacatgtatgcaatcctcatcttttttcctcctctctgtctgtcattcattcgttcattaaaatttagttgagtcaaatacttgcccagacaggcaaaagatatgttaggaacaaagcttttctatcttatatttcttatcttaatcttctgcctcttaaatgaaggtcttaacttccttattaaaatataaaatccaacttgaggtttat

SEQ ID NO: 160490 - DNA, 1000 bp, Homo Sapiens
gctcttagaatagactttattgactttagccaagggcaggccctgagatgggggtccagagagagaggcttggtggggctacgtcctgggggccaggttggttctgaggggtagaaggccatccacccattcgcacggctgctccaggagggcttgccacagctgcttctcctcaggtgtggaatccatccagggcacctgcagcccatagctgctgccggtgcccaggctgaggcgtgtgccccccagctggcggttggccagggccccatggtcccagagggagagctcggcacaagcctggcgcaggtcagcaggcccaaagccatcgtacaccatggtgtgattgaacacagggctgaggctgcgtcgcacaacccttgtacgctggcggctggcctggctgtcatcaggcagcacgaagcattgtacgtaagtgtccagggatcctgcccgcagcggcaggaggtcccgagcctccttcacccagaagtgcagctccccgctcgggggcagtcctgcgccctcggagccggcggggacgtacttgagggacagggcgagtaacccgcggctcggaaggtcgtcgggagagggtgggacccggggctgcagggggagccaggtgggctcagagccccagtcccacgtgtccaggggcacttcaacttcgcccagaaagatgttgcgacccaggctttcgcggtgccacacagacaggctcagcacgcggccctgaagctcggcctgcgggacggagtaccggagagtctcgttgaaaaccggattcagattccgtttcttcaccgccgtcttgcgcttgctctgcttatccgggaggaggtagcttttgacgtaggggtccgagcggcggcgccgggcggcggccaggccctggcactggatcacgtgcacgcgcagctcggcggcgcccggctcgtagtgcagcgcgaagtgcacggagccgcggacctgcaccgcctccgcgtcgcctgacagg

SEQ ID NO: 160491 - DNA, 1000 bp, Homo Sapiens
tttttttttttttttttttaaaatttagaattaaaaaaatatttattgataatatctttttaaaaaatgtttggtaatcccaactaatcattcaaaatgcaaactgtaaacacgacaacagcaaaagggtaacaattgagtgagtaagcagactgaacaggtgacagactgagcaagagtgtgggggggagcaacagagaatgtaagacaggtgcacaagtgtgctacagacagtgataatttgagtgtgtaagaattacatttggaccacagtgatttcaaggcaaccatttaggaaacctctgggccaaatactaaaacacaggaggaatggacgagccttctttgtgagcatgctcagcatgttggcatggaaacaaggaagcatagaagctctttagtcacaatgaatgtctaccatttctaagatgcaaagaaattttctttctggtccctgggtacatcatatattgtctttccatgcttttcttgaccccggaggacagcagatgctgttctaaaatccccaaagaaacccctagacaaaaatttaaaaaccacagtagcattaacacggggtttgctggaatgcccctccctatcttggcctatgattttcttatgggcacctcaacaggaatggttaaattttaccaatctacttgataaaaaagccatcacaaacttcagtcccatggtcacaaagctagagtggatgggggtaagggtgtgtatgtgtatgtatgtgtggctctggggatctggacactgccctccctcactttgtaacccttgctcagaacactggggttgcttccactggagagactccacggtagctctagaagtgtcattaaatactcagttcgccaaggttgaccacctccattgtcataggatgatgcagcatctgcagaagcgctgtctgctgccccctactgatgggggtggagtgacaggtgcgaagtaggcgtggactttaatattgggtaaatgggtc

SEQ ID NO: 160492 - DNA, 1000 bp, Homo Sapiens
ttttttttttttttttttaaagatttttttgtttatttggtatggggtcttctgtagctcacacaaaattattgggaaaataaataacccaggggagccccctttgcccacggttcctaggtcgcggagtcacagcagccccaaaggggcaggaacctgggaatccgaggggtcccggccctggcggtcacttgcccagcaggaggccggcgcgcagcacgcggggcacgcggcggatggtcagcgagacccgggtgccgcgcaccaggcaggctcccggccgcgccgacgggcaggctgccgcattgggcggcgaggaggcggcgtccagcgcgtctacgcgggcggcggcgatgccgtggagaagacgcgtgtaggcggggccgcggagcaccagcaggctgcgcggttccagcagtagcgaggtggtgggccggggcggaggccgaggctgttctgtagggtcatcgtcctctggccgccgcggctcgtagaagtccagcacggtgtgggagcccaggctgatggtgctgacagtcgggtagtacagtggtccgtcctcgtggggcatgatgccctccccaggcagatactggttcacgaggacatggttagctgggaggcctccaaagaggctgaggtttgacactttgtccacgtagcgctggagccatgggggcagccgctcaggaaccatccctcggggatgaggaagcccacctggggaaggcaatggggtcctgagggccccccccagttctgtaactttctcccagagagctgggtccactttggctttggggcattaaaaacctgtcgaagcaaatactcctcctcttctttggagatgaagtcagggacatagtagattacaggtggtgcctgctccactctgaacggttccagggctgggactctggcgtcctgctcctccatcaacaccaactccttgcacccaatccgtccaccagcgtcccctccaatttccaaattcaacatc

SEQ ID NO: 160493 - DNA, 1000 bp, Homo Sapiens
ggggaaaattgttctgtttgttttaattaaaccgactgaagaagccaagacacagatggaaagagactaagaacaagactggaaatagtttagaaaagaaatgaaaaccggtcgcggagatgtcagtgcctgatggagtggccggggcgggtgccttcacgtcagctccagaatcactgtcagggcgagcaccaaggtgagccgggcaccagtggggccaatggaaccattagagtcctccgttcctcttgggatatttgggttttcaaacacgatgagccgggtgtgcgtgtcggtggagcccagtgggttctgggcggtgcagcgatacatggagccattgagctcggcgggaacccgctccagcaccagctccttcccgtcgaactcagcgctgccgtccaggaggcggctcccaacccgcgtccacgtgaacatgggctccgggaagactccgttctgaaacccatggaccagaatcctcactgtgtcccctacccgggctctgctgggcgtcatcacaattttgggtcctttgggggcaaccagcgtgacctctgcctgcatgggcatcgacagagctgggtgcttgacctcgcagctgaagagggcctcgttgtcgatctgtgggttgagggtccaggtgagcagggcacgtacttccacagtgccgtcactgctcggggtgcggctgtggcgcaggaagtaggtgggctcggcgctgtggacccagcggggaaactcacggctcacgaccgtctctggtatgttctctgtggttggctggaggaggatgttgggatctggggtcaggccacgggaggggcgctccgtgtagggtcgcccaccccggttctcggcgtccaggagggacagtgacttctgcatcttggtgtcatccaggtcacggtgcagaaggctgcggaagggcctgctgtcctgtagggggccggagctcgcagctggtggctctgataggggcactgcgtcgattggttcc

SEQ ID NO: 160494 - DNA, 1000 bp, Homo Sapiens
ggaacactgaatgaaatttattgaagagagatatgtactgaaaccgttgaagagaagggaatcacaacacagaagctgcaaatggccaccacaggacacaggtcgggacccccctcctcctgggggaacacccaccccaggtctaggaaactcagtaacaagtaacaacaggggtggaacgccaaagcacaaagttcactggggaaactcagacagccccactccatcccgggtcctgttctctctcccacagtcatggtcaccatcgctgtcacgggatgagtgtccactgtgccctggtgccttctttccgccatctcccgggactgcgctggggtcctccggggaggagctgctcagagaagaacacacacggctccacaaaaacaagcagcccctggcctagatctacgcagggaaagcagaggtggtgctcacgatacgggagagcagtgagcacaacctgggctcccaggaagctcacagcacgtgcccctggcactggaggggcgcctccccccaccccatttggtattaaatgtggtcatctgggtcaccgggaaggtggtggtgggcagggccccttggggggaagtggggggccccgatcccgatgtggggtgagggaccggccctggccccgcctccgcctgtctccagggccctgctgcctgagaggaggagaggaggccccggggccctcggagcctatttgcccggggaggactcgcgctgggctgcctccccagccccaacctagttatcacattcctccaggacgggcttgagcccctcctggaggagctcctcagcctcctggcctcctgcctggaggaggccctctggctcccgaccaggacctcctgggaccgcctctactttagtgctggctctggcaacagcctgggcaccagcccgggcaccggccccttcctgtgtctgggctctcacgctcctggctagactggcctcccatgcctcagactcccgaacgagcccc

SEQ ID NO: 160495 - DNA, 1000 bp, Homo Sapiens
ttttttttttttttttttttttttttttttttttcaagttacacagctttattggcccccagcagccacagttcccccaagggggctttgggacagggagggcccgggcgtccagtgcaaactacagtacgtgagtcaggccctgaggggggtgcccggggtcctccttccctaccctgccaggagggccccgctggtgggagacaggtgtatgggctctgtgggctctgtccctggctgaatggccccagactggttgcagctgggcttgaggggctgacaacaggaagtaccatcatcactgccagagctcaagatcccacacccgacatgacataaataaaaaaataaatagtgttgtatctttcccctcatcccctccctttataaaaacacaaagtcctcagagctggggcgtttggccctgaggagccgccctgtgcgagggagccggagtgtgggctgggcgagctgggagcagaggtcgtccaggctgtggtcctgagcatggccctcggccagggtgaacatggggtaccgctctgtggctgaggaggagctgaggaccctggtcagctctgagcagagtgtctcaaactccttcctgtctccagcatagaagcccacggtacagcttgggtccatcttggcaaaggccatcttgcggggcgaggtgcagtggaaggactccagggggaagtcggcctggctgacatccacagtgggctggcagtagtgagggtccaggtacagcaggaagtcatcttggtagccaatgaagtacagtgagtgtcgcggtttcccacccatgatgcccaggcacagctcgcaacgcaggagttccttcacgcagggcacatacacggggttgagagtctcgccacccagtcgcacgggcaccaggatgaccacagacttccactcggctgtggggtctggcctggccaccaggcgtgccacatccgccttgtacactgtgcagtcctgagaaacgtacacc

SEQ ID NO: 160496 - DNA, 1000 bp, Homo Sapiens
tcagaggaagcacgcaggtccaacttccaggcggtactgcttccctgatgaggcaggagggaggttgtccacactgatgatgggcagctgttgggggtcttgggtccggaaggtgaagagtgtctgatgccagcggccatcttggaccttgcagccatccatggacacctcgggccggaactgacccccagcttcaaaaatctgtccattccaggcccggaagcgtacggcctgcttggctggggtctgcccagtgccctcctgccacacggtcatgttaaggcagtggatggtgatgtgctgggtcacctcggagcttagcaggtgcaggaaattcatctggacccggctgatggcaaactcgaccttggaggccgtgatgggcttgagacacgtctgtccaccatgagtgaagttgcaggagacctcgatggtgtcagaggagcagccaaggtttggatccacccagtaggtaccatccaccatcttctgctcacagtccatgaggtccctgcagacccgggcggggttctctttggtgcccaggggcgtcttaatgctctggatgaggttgctgaggtagtgtaaggttttaaagatctctcctccctggtccagcaccagccggtctggatagctgtaactctctggcctgagtgctccactggtgtccatccacgtctggaaagctgccccaagatcatcttgttgcaattggataggaccccctggaggacccggggggccgggccgccctctggggccgggaggacccctcggaccttgcaatccccagtccccacggctgcctttgtcacccttcggacccgggagtcccgaaggtcccaggattccgaggggcccgacgatgccttcctttcccatcaagccaggtggcccccgagggccctggatgcctttgaagccaatgtctccaggcgggcccttgggtccgaagagacctgccattcctgggaagcccatctcgccagagtcgccc

SEQ ID NO: 160497 - DNA, 1000 bp, Homo Sapiens
tttttttttttttttttttctgtgacggagtcttgctttgttgcccatgctggagtgcagtgatgcaatctcagctcattgcaacctctgcttcctgggttcaagcaattctcctgtctcagcctaatttttgtatttttagtagagacggggtttcaccatattggtcaggctggtctcgagaccaggtaatccacctgatctcaggtaatccaaccaccttggcatcccaaagttctgggattacaggcatgagccaccacgcctggcccctcctgtatgctttctaagcatcctatatttctttgcactcagctaggctgtgccctcaggacctagttccaccccagaaacaaagaggggcactgtgaattgagaagaaatgaatgatggggcttgtgaggttcagcatttattcctcaggaggtgaccaggctggtcagaggcacctggatctggggacagctgagccctccctgctgctcaagactggcctgggcactgcagtggggccagtcctggcccctgacaactcaagctcctaggtccagtctagactccagggacctccaggccagcccaaggctctttgaagcaagaatctgagtctactaacctgccttgtccaacccaacaccccaaactcctcagctagctgcatccctggtggctacagcttcagatggctcccccatacaactcatagataacgggttctggggcctcacccctaattcattgggcccaaggataccctagtattagcctttcctaagaggaggagtttccccaactctcccgaaacatccagaatgttcccacaccttctcctcagtctttctttcctgaatttcttgggagtggaccattcctgggcactgggaaccagaagtaccaaactaccatctatctctcagtgcctctgtttacccatttgtaaaacttgggctgcatttcctgcttcttacggagttttgggggccattaatattaaagcccc

SEQ ID NO: 160498 - DNA, 643 bp, Homo Sapiens
ttttttttttttttttttttttttttttttttttttttttttcacagcaaattatttaatgtctgtaggtgtacctcaccctcacattgctattacgattcaaaagcctccataaactgtcaaactggcagaaccagagaaaccatgggcactttcttccaacagggtttgaaaaccatcaacgctctagtcctgttgacctggaaatggtggcaggtgaagtctctccacagcatgccttgggcctctctgctcaggagaaaaagccccccagttctacatgattcctgaggtcttctgttcttctgcggcctggcgctgggccctgcgccactggaaatagtggtagactcggacactgcagaggtaccccccatacacagtgagaagcatcatggaggtagagaaggtcttatagccaatgtcagctagctgcttgccagttggcatcttgtcccctggatgctgcagctccttcgcatccaaccgaggcctcctcaggcaggcagggtctcgaggccactgtctacgcaacttcccagcacagccgaacgcagcactcggaaccagacacgtgagggtagcgtccctggacaaccctgaacgcctcagctattggtgcagaaagcaactttctccctcc

SEQ ID NO: 160499 - DNA, 1000 bp, Homo Sapiens
tttttttttttttttatcataaaactcaattttattcaataaaataataccacaaaagataaaatgttattcttttatttatgttaaataaaaacatgagaaaatccttttttaaaaagggtcagaatattccttatgtctccaaaccaagtccatggatgcaaagaaatgctgagttcttgatacactttcatgtcataataaccaaaggagacagcacgggctcgagtctttcagctgccgcttaggaaagtcacatgcagtatttgggaaagcaaggaacagaacacaggcatgagtattttctggaaatacctcctgccctggcaatgaacctcagtaccaaatatttttgttttcttttttgtggtcctgataaatttttaagccacacatcctactgaacttcaatgatacaatttctcacaattccagaattctattggcagtacagtttacttggccaacgtggataatcttataaattttaaaattacatacaatagaacactattgcaaattttgccagtagaaacatgaccccaaggaactgccatttccaaaacataactgggcacacatttacaatgcacctgctaggttttgaattcatttgtcatttctgatctacccttaagactatgcttgaatctctgaaaacaaatgctagattcatgatttctatacccacatactccataaatccatcacaaaccctacagtctgatttagcctacggcaaatgattcatccaataggccatggtatgttcacaattcttcaatcttattcaggttgtaaagacgtttttctacgactggagtcactaagaatttctctgttagagaaagcatcattttcacctttggcacactgccaagatgatactttactacagaatttatgaaactacaatttagtaacttgcaggctttattaaaagaaaaagaaaaacaaagaataatttaatataaccccatgtcccaaaactttctagttt

SEQ ID NO: 160500 - DNA, 1000 bp, Homo Sapiens
ttttttttttttttttttataggaaagtgtcaacatgtttattgctaatataagcatttaatgtcaaagaaatgaaggtaattttacaaactcagtttttgtaagtacatgaagtttctatttgattatgtggttttatatcacattcgttcaaatgcatttctctcccttagagggactattccaacatcactcctttggaattatttcagtcatccttaacatgtgactttaccaaagaccttgaagctaaacaaacaagcaaaacaaaatttcaatgactcttagatgaatggaataagaaatagtcatcacatgtcaattagggatgttcatctccaaccaagacactgtcaaaatgtttcttctgatacagcagttataagtcagagccttcaaaaaacaagggcagaacaagagtacaataaaagaagcatctgcaacttaagcctcccacagtcctaagcctgatatgcgcaaagcaaagcctctttcccgcaaactaaattccatccatttgagctttcagagatcgatgcccaagagctatcattaatatatacagcatattgactctagttgcatcaattatgcctgaagagtttaatacccatccaagtccaaaggtggaagaatacatacactggtatggtaataggcaagagcaggctgtaaaagcaaaggctggctgtgctagtgcagccctgtgggaagttttcttccacagaggctgagtagaacagtcctgctaaagaaaccagtggaataagaacagtcaacgtaggaagagacagaaacattcttctcttccacttattacctgccactgtgttttaaaaggtatatggtattaagaaaagttggctgttgcgtttttttaatttttttaaattatgaactagcgctgctccacttcttcttgcttcttactttgacgtgtcatcctagctgcctgtggtatcatattagggatcccatcaatgattggataagctattcc

SEQ ID NO: 160501 - DNA, 1000 bp, Homo Sapiens
tttttttttttttttgttttttttttctcccttttgggctttgctctttctctgcattaatcttcagctgctgaagagtcagaggtggaggcaggagtggtctggctcctggggctgggtgtcagaggtgagagggcagggcaagcaggccaagtgagctccttgaaagcatccttacccaggcatttagagaaaatcattttcatcattggagtgggaagaggacaagagaggacagcaatcagaggccaacgctaagtgcttctgaccctctccctcacagccggttactagctgtttggacagatttgcccattcagccccaggacaactgggggggatggcagggggtctgctggcaatatcaccaggtttctcttggaaacatggtctggctgctccaagagccctaaaggacaccatcatcacagatgatgattctggaatctcttctaccctcaataaaataatccctcaatgccaaatttccataattaacgaaatcatgaaacaaaacagcatgtttcttaccgaaacttaaagctggactaggaacagtagctttgaaatagtctccctttaccctccctagcaaataacaggacccagagcgtcctttccactgctgtctgtgctgactacgcggactccaactaaaggaatccatcgaattctgtcccgactgtgcttccatccccaccttggaaaggttcctctgctgtgagaaaaacagtttagtgcaaactcctttcctaaatggggtaactggtcccagagctgctttctattcccagcacgccatccacttgccttgacgctttctaaggctggtgtgatttctgggaaaattcaacgatttgccccatctgccccattctctaaaatgaaaagtctgagttgaaagggacacatcctaagctgttgagatttatagggtaaggcaagagctcttgagactcagggaaagtgaggaaaatgggtgtgtggctctttcacgtgg

SEQ ID NO: 160502 - DNA, 1000 bp, Homo Sapiens
ttttttttttttttttttaaagttataaaaatattttatttaaatgatacagaaaaaaatgtatacttaaaagtgattaaaacttcacattaggaaatgctaaaaacccagtaatgtacataatgataaaatctaaagtgatgagaaaacataaaatattttcatttggtcctgtcacctaacaaaactatcataaatatgagattatagtaattactaaagctggttaaaggcacatgacaacataattcctttatacacatccagtcattttatacaaggaactgctatcccttaaatggaagagtgaactacttgtttaaaatattaacagtgcactatgtacctacaatgaaaccactttctccaaagactcaaacagattaacattgcaaaatagtacttctgtatcactgacttctgaaaattttaataatttatgcatatgcaagtgaaatataatttattctggtttcaacaacagttatacaaagtcacaattttccccaggaaaccattcacttcatagctgcaaaaacacactgtagcttttctgttagggtctgccatgctttcagctagctggatgtttaaccattcacttcaaatttacatgtccagccaggcacggtggcgtgggcctgtagtcccaactacttcgaaggctgaggcaggaggatcacttgatcccaggagttcaaagacagcctgggcaacatagaagaccctgtctcttcggaaatcatccaaggagtgtgataaacatgacaacccccataaactgggtaaacaacaacaatggagtgaaaaacgaccacacatgccataaagcaatgttgaagcaaattcctgctgcaataaaggaggcagtggtaatgggtatcaaggctggatacttgacatcatattctccaattccacaataccattccaggtagactatgcagtaaaatgcaattgataaactgacaagcaacaaggcactgccacagagaaacca

SEQ ID NO: 160503 - DNA, 1000 bp, Homo Sapiens
ttttttttttttttttttggtatagattttattatggatgaaatttgatccccggttagtattccacacaaatttttaaaaaggcatcttggtgtttgctttcttctgctctaagtaggctccttacatttttcttgaattaatttgcaaagtatatgtttatctataagttagtattaagatagaaaaatgataaatacaaaatagtagaggtacataatctgaaagaacattaagacatgtctcccacaccataacagtggtataaaacatgaaggtgacgcctgataggatccacaataaagtaagaaaatgtctgttcatgattctttgctgaaggatagcacataccagcagaatcataagctgaaactttaaagacagaagaggtaatctgtattttcttggtttgaggattctttcgaacactcaccagatccttatagataagctttgttgtttccagatatgggctaatcacatcctcatattgacaaagggctccaccaaggcaaagatgtttgaaaagacaaaacaggaactcttctctatctggttggctgaatatttcatatttttctgagtcttccactagcaaaactcttcgtaactcatcagaaatgagaaatggatcacaaaaagaatctaaacatttaacaatatgtccactgtctcgtacaatatcttcatcatataaccgatgaaaaaatgacattgaaagctgtgtgcaaggaacatttatagcttcaatttttttcacttcagttcctaatatgatccattgtccagaagaatctgaaagtaacttcaaattgggaataacatttgggtctttgaaaaaagccataacgaaatcatccttccgataggactgaaaggtctggtcaaagccgaacgcctgcgccttgattctgcccagcatggacctggggcagaggaggaaaaagaaatcatctgggggctggcaccctctcagagcgcaccgataaccgatcccacc

SEQ ID NO: 160504 - DNA, 1000 bp, Homo Sapiens
ttttttttttttttttttttttttttttttttttttttttgcgagaagagcaaactgtttatttacaccttggtctgtacagtacagctccccgggaggagcctgccaccaacagcctgttccttttggggcagaagcaggttggaggcaaagagctcagaccctggacagcctcagggcctcacccccactgtcccctccctggggcccacagggcaggtcccaccccagcactaaagctaagcctgtttccagacagagcctcctggggcaaaaaagtcaagttgaatcccacagagtcagaggccatctaacaaacccttgggcatgaggccacatgtgtagttcattccacgtaggcctcagaagacccagccaagaaagtgggaggagctggaagggagcccacagctgtgagtccttggcaatgcaccgtccgctccgtgacatcagttggtatttaatggcactctggtctgagcacctcagcagacaaggaagggctgggcaggtgttcacagcaggcaggggcagcagctagcacctcttccttctgcccaagtggggcccgcagctgttctagacaccagatgtggtggcctcaaggcaggcctgtggccgtgcaccaggaaccatggacagggcttcctctgggggcagagacagtgcacggagcggctgcggtcccatgatatccctgctggggccaatgccccaggttaaagagtgatgctttgcccgacatcactaacaatgcagggaaagctctgtgggagaagctgctttacacaaagttgcccttttctggaatgcaaggctcctaaattagctgcaggctggaggagggactaagtgggtcctagccccccatgcttaagacaataatgaaagattctgtacaaagttaccaagtctacaggctgagcgagccaagggtaagtggggcctgatccttgtggacgaatgtgcccgggagagctggcctcacctgggggaggca

SEQ ID NO: 160505 - DNA, 1000 bp, Homo Sapiens
gtgtaaattcatttattttggagcaatgagaacacatggacatagggaggggaacatcacacaccagggcctgtcaggggatggagggctaggggagggataacattaggggaaatacctaatgtaggtgacaggttgatgggtgcagcaaaccaccatggcacgtgcatacctatgtaacaaacctgcacattctgcacgtgtaccccagaacttaaagtataataataaaaaaaagaaaaaagaagttcatttattttgactcctacaaaggcaaggaatagggtttttgttgttgttgttgtttttgagactgtctcgctctgttgcccaggctggagcgcagtggcgtaattttggctcaccgcaacctccgcctcccaggttcaagcaattctcctacctcagcctcccaagtagctgggactacaggcacacaacaccacatcaggctaatttttttgtagttttagtagagacagggtttcaccatgttggccaggtttgtcctgaactcccgaccccaggcgatctgcttacttcggccccccaaagtgctgggattacaggcgtgagccactgcgcccgaccaggaatagggttttaatacaatttttcatctggcctgaaaaatatacttcagtgttcaatgatttgaaatctctgagatatcagggaatgaaagggattaaaagctttaagaaatataaatataaatgtgtatgtgtgtgtgtatacatatactattttttttttttttgcccagggaagacatctgtcagtgctcataaaccctgtttcctctggggataagttagtaccagcttaacctgagggtgggcaaaaaaaggacatgcagaattcaacgcaacacacatcctgacaagtttataaggaccacgagaagtttagaggcaggaaataaatagtaacaccaaccataaaaaggctgtcactcactctagagtttaaaatgctcgtacgcaggtggcggtgggcc

SEQ ID NO: 160506 - DNA, 1000 bp, Homo Sapiens
ttttttttttatgttgtgctctttattgcaaaaataaacacttttaaaaagacaacttctgttaatcaataaatatcctttcctttctgtactggatctctggttttctccaggctgcctaattaactgctttgtgcatgttcctatctggagacagtgctgaggggttagggccagagccttcattaaggagaaatgaaatactcctcctgtgtatgtgggaggggcccttgctcctgcggctgcttccacccccacccccacccccacccccacccccaccaaactaaatgatcaggtcattggaggtgaaggggttcatgactgctggacagagaatgaaatatcatgtttatttggtggggaggggacagccagggtctaatgctattccaaaaggttacttctcaaattagggacacctgggaatttgaagcgctagcaggccagccctggggcaagaactggaagggtttataggccccctgaataaaggctatggcacttgatcctcaacaccagacatctaaggtacaactgaaaatgactcattttggacagaaagggtttagagtaaagagctggactaaccaggagagaagtctagttgttcctacaggtgcactggaaacactccagcagggaccttctgggatctggggagcactgctgccaattattaacagcagtcagggccagtaaagacctatcctgcctaaacaccactgcatccctggtaatctatctatgacccacttctagttggtactgatgtcctgccaagaagctcaaccaacagtagactagattctcagaaacgagaagagtctgaagagagacccccatatccagctgctggcctgaatctccgtttttgctgaagcaggcaagctgcagttaatttatggttagcacatcactctggatctcgtggcttaattgagtttgtaaatcactcagtttcttcttcaatcctgagagggctgacaggacaatggtt

SEQ ID NO: 160507 - DNA, 503 bp, Homo Sapiens
ttgatctggaggagggggtaatttatttaatttgttgactctggcttacaattttgtcttctgtttccatatctgggtcattagaagccccttcaatcccatcatcccttttcccttcaaatcagggcaactcagagatagctttcttggctggggggcctgttggcttttccttttctctcgctttttcctcatacatcaggatcatttttaggatggcagatctcttgcccagcatcatcctgagaaagtcagggtagctgaacgtctccccggagccactggacacctctccaattaatttctttagctctaggtgagtcttggggactccaagtttctccagcattcgtttcagggacatgatatcaatatcgccatttccattaaggtcaaactccatgtatttctctgggtgaggggagagagcagaagggataagcgctgactggagggttttcagcaggggactgaggaaggggttgccaaccaactgctaggtg

SEQ ID NO: 160508 - DNA, 1000 bp, Homo Sapiens
gaagagcatgagtggtctttaattcaaagcagggaagctccaagagggtgactggggctgagagttagcggtgggtggaggagggggccttggcatcttctctttatgtctctgagctgtgccttcgccaccccttctgggtcactcagttctccttcatgtccttgatatagtcctggacccacttgtcactggggttggtacagacggaatggccccttttggtgatgaagacaattccgggcttggagcactggctgttggtctcatagtaatccataatccgctgacgcgggatcttgtaggtagtgtaggtgaagcagcactctgaggggtggtaaggtccccgtgaggaggattcagtcttggtccctagggcgatggtgatgaggaggaagaagggaatggcagccacggagatcttcatgctgtgggaagctgttgtgggaggagagctggcctggtgggagcttcagaggctcaggaggtgttggaggtgggtggctggcctcttttgtctctttattattatattgagtagggcttcagctttttcatgcaatcctgaactcccggaccactgggtttggcacagacttgccgccccttcttggtgaggaatatgacacctggcttggagcactcgctgctcgtttcaaaataacttttcatgagtgaacacgggatgctttgtgagatgtaggaggtgcagcagtcagcagcaaagtgaaagctgttcagaactactggattttccagtggaagctttgacatcattaactctgtctctgcatcatttatgaactgggcctgggatccaaggacagcaacaagcatgaggcaggagagggcagccacggagaccttcatcctcctggtgggcaggcagggctggccgaggactcctgggctcactgcttcctggctccccgggataccagctctgcccttgtatttataagaagaggaggatccaggaagtcccagggcagaggtcaga

SEQ ID NO: 160509 - DNA, 1000 bp, Homo Sapiens
ttttttttttttttttgtatattaatatattgattctttgaaaatgagaattgagacatgggctaaaattaaatacatcaacaacaaaaatcttgtaaggagaggttaaaagcagttatcttcaaaaagtaggtctgagtttatagagtggaggtaacttatttgttatgagctctttaggataaggtatatttgtttcattttgatcctgcatatacattactttaattatgagaattaggttcaggaaacacctcttaaggaagtcacttaaaacacatacacactcacacagagacctcaggaaatcacatttgtattagcaatattttagccagtactttctgcatctagatttatttcctttatgatcattaagattctcacctaaacaagctgccaaaatacattacctctgattttatttagattctaaaagttaggatacaaaaagcacataaacatctacaagtaccaaaacatttatgaccttataattttatagtgcaagaaaaaggacaaagacaggaatacaaataaattataatctaaagagttacatataaaatgtccttgattatttgttaaaatctgctagaaaagtaacaggaatgttatcaagcctttctagacattttgaacacaatctgacaccgttgcatttcctggttgtatcctcagcttaacaggcactggagacagccagcttcttcaaatggtccatgaacacctgcaggctaacatcatcagttaggatgggtgctccagtttcctgtccccaagcatacaggttattgtgtgtctgagatgggttcactttggacaaaaggaatcgagcctgactgcctccatgctccgtgttgatgtaacgtggcatcgggaagcgtgcttgcagaatttcttgagcatcatccagtggtgcctgcagaaggtgcttgaagttttcatactcgggcatgtcctggtagccagctttacgccactgggctatggtctcacc

SEQ ID NO: 160510 - DNA, 956 bp, Homo Sapiens
ggcggcacagacgcgggctttattaacatttggtagtgagcacggcccccagggcatcgcgggggctcgggtcccggtgacgcaacggttaaacctggctcgcgacttagcgcaggcgcctgggggaaagcccggagcctgagggcggggccacggagccacttccggcggctgtgggcggaaaacccaaaacttccgatgggaccaagccttccgtggcttcacacgcaccggaagggaatctgggtcagccctccctccaaaggagacagcacggatcctctttttgcataggcctgagggaagtacttccgcccatattcaagatggctgcccagggcagtgggaacgggtggagtttcgggatgtggagcgaaggtcactgggagggggcggagcttcccctgcccaagttccgatcccaccaggactggaagactcgcgtccagctggagctttgccgcatctgcgttgctgtgcccgcgctcttcgggcgaggaagtcccttcttaaaggagtccacaaactcgtcactcatcctccggagctcgcggccatagcgctgtgctgcccagaggttggggggcgccgagcgcgagcggccccgaaaggggctgggctcctcccccatcccttcgtcgtcctccgtccccgcggggtaggagctgtggcgactccggatctccacagccccagcgcctccatgatggctgctgctggttggctgctcctgctggtgactggcgtcccacaggaggcctggggcctggcgatgatgcttgccggagcctgagggcccgtcccctgcggggctggggcccaggcccctctctgcagagctggagtcttcctgctcactcggctcaaactctgggatctggaacatgctctgggcccaagcccgatctcgaggcacctgacccgggcctgccgcctccctccagcaccccgggctc

SEQ ID NO: 160511 - DNA, 1000 bp, Homo Sapiens
tttttttttttttttttttttttttttttttttttttttttttttttaaaattaatgcaatataggaaaaattaacaatttttaaaatttcacttagaattcatagattacagctgttcagactctagtaggccccggtttgctgatctatgagcgatactggtttgtgtgtagccaaaaatccctacagaccagtggttgtcaggcgaggaaagttttataccccaggacatatttggcaacacctgagaacctttttgtttggcaccactcaggaagacgcgttactggcattgaggcaagggacagtgctgaacatcccacaatgtacaggacagcctcacagcaaagggtgacctggccccacatgtcagtagtgcagaggttaatccctgctctagagacaacacagggatcatgggacacaagtcactagccctggaccagccactgctcaagaggccacgtgcaatccacggcattcatctgtccctcttcctccactgttcagcacttgtcgtcaatctggaagctgctaagagcctgtctgtcactggcagagaaagagcagaccctgtgccggctgcaaagtccttgagttgcaggaaagtccaggcctcagcctctttcaggcctggggcaggaaagctttggggtgcaagataaggcagggtgaggggccctggccttatgatgttttaaagaaaagttttttccggaggaaattaaagcaaccaggcatctgtttataaatccctttcaccgaaacagcattagcgaccctaagcaggagggactgcaggtcttcagagtgagcccactgctcaaagatgtcgtccagggtctcaacgtaccaggagccactcttggggtccctccaggaaacaaaacctgggaaagtagagtaggacacaaagatgtcactgggtgtgggcaaactagatatggcgtccagctggtcgaaggtcctcaaaccttcctggaacggggtggcatctgg

SEQ ID NO: 160512 - DNA, 1000 bp, Homo Sapiens
tttttttttttttttttttgcatgtatatattcattgcagcactattcacaatagcaaagacatggaatcaacctaaatgcccatcaacagtagactggataaagaaaacatagtacatatacaccatggaatactatgcagccataaaaaaagaatgagatcatgtctttgcagcaacatggatggagctggaggccattaccctaagcaaaccaacacatgaacagaaaaccaaacatcacatgttctcacgtataagggagagctaaacattgagtacccatggacacaaaaaagggaacaacagacaccagggactacttgagggtagagggtggaggagggtggggtatcaaaaaagtatctattgggtactatgcttattacctgggtaatgaaataatatgtacaccaaacccctgtgacatgtaattgatctatagaacaaacctgcacgtgttccccttaaactaaaatataagttaaaataaaatcctcgttaaatcactgcctgaaagtctttattgaaaatctgggagaaaatatattgaaatgttagtagtgcataactttaatttttatactttttgcatcttacaaactttctacaataagtacacatgacttatataaacagagaaaagcaatcattatcttaaaaataactatccagtaactgccacaatctcctgagtccagacaatctagagcagaagggtagactgaggaaaatatacacagtataaaaaagtaacaaaatcaaaacctgaaacaaagatcaacatccaataaatgcttctgaataaagggagagtagataagaactggattttaatcccaacactgccatttaccagctggccaatactgagctagttactctaaagagttcagttttctcatttgtacaaataggatttgtctttccatctcactgagttgtgatgagagtcatatgcaacagcatatgaagaggctagcaaaaggtatttaacaagc

SEQ ID NO: 160513 - DNA, 1000 bp, Homo Sapiens
ttttttttttttttttttttttaaaaataaagcctctttattggtacctgtaagctcaggtacaaggtgttcccacaagcacacaggctggcaaggcctcctgggcaaggggcaggcccagagcctgcgtttcttggcacagacacagagagaaatggaataaattatagttctgacactcagggacaatgtagaaattatgatgcaaaattaaacattagcaaacaaagggtataaaaaccctcaggagccacccctcgccaactggcctcagggcatgggcaggtgggccacgctgaagtgcagtgcccagaaagccctgagataatagtctggggcatggttcgcgccccgaggtaggccctttgccctctctgggcttcctgtttcctccttccccctcctacatccctgggcctggaataaaggctgtggcctttgggaagggggaagatggaacagagggcaggaagtggagggggcagggtggggcagaagggagttttggtcacagctgttcagcccaggctctccccctgcctagatgatgtccttggccagcacctgcccgcagagccatctaggagccaggcagcagacatagatcacagagctcaaatccacacctagtctgcaccaaagcccaggcagggcaaggtgtaggactacaaggcaaaaggggctcttgagggcctgtgcccaccccacccctggcattacccaccagccaaagaagtgcaaccaaagcctcctcaatctccaaataaattatggaaataaattatagtcttcacagtccagtggatttagccacccatgggtctagggctcagggtggcagaagccacctgatttcagccctgtctcaccgtctttgggctaaggaacatcacgcaaagaccgaaaagtggtctgccaagctccagaggagccacattttctcctcttccaggctcacgttgtggagatagaagagcaagctgtgggtgtggggggccgg

SEQ ID NO: 160514 - DNA, 1000 bp, Homo Sapiens
cataggttcttttaggtttttattatgatctcttgtttttatacctgaataacaattttccccaaaggaatgatgatatgtaatctttattctaaaaaggacacatagtgtattgatagcatctggtcagtggttatcactgactatcttcaataacaattactcatctaagaaactcttccttttttctttaaaatcgttggtgctgatccagacaagccctgggctgctgctcctcatcctgataggatctagcttctagactgacccctctcaagaacaaaatacagggagggacttgttctggattccctttgggcaaatgcagctgcaatactcagcaggcttggcctcaacttccagggcttttgttttttttcttttaaatgtatactattaaagttggattattaatctaatatttgtgtttgccttggggactaataaacctcacaacctgaggatcacctcagttaaaccaaggctttgtcatcacagagctactcagcagaggtctgtctcagctgttccttgaactaaggaaggagtcagtcagctaggagagaaaagtccttttgaaagcagacagcatcatgtaccttgctgactcagctacatacataaggcctcaagccttgctgccagttcttaaaggaactgtgttctcttttcacttttcctggcttatggggcagtagagggtttccgacctcaaatgccaataccaggtaggtagaaggaccttaggctcaactgctggctcctcgtaataacacacactgtattctgtggtgggtgccactctgctctgcctgtgtcatgtcacctttcctaatccagcacatcctcgcccaagaaaaccctattttggggtcattcattctattcttatttctctcttatttgttctgatgtttcagttggacttgattccaccgcaggctctggctccagaggaagagatgggggctttgtgaactgggatgttcctccagcacct

SEQ ID NO: 160515 - DNA, 1000 bp, Homo Sapiens
aagctctataatttatccatcaagatattttgatttgcggaatgcatttaagtacctacaacatgattataccccagggtaacatttatagataaggtaatagttgaaaagaaaatcaggaaatacaaaatatttgttactgcaagcaattttaatacaaaagtgtgtcttgtttctaaacagttcattggtagagcttcagtttctgcctcaattaaaaccaattgagataatcacacagcaacatggtcggagctgaagaacagcagctaaaaaacaggagccccagacagccccttttcatggtcacttggtcagttgactttattacgcacaaaaaaagacgaaagcaaacaggactggttaacaagtgtgctggtgaactccattaaaggacgagcacgtgtttgtcttacgtccacattttcagaacaggctcgtggaattcattcctcagtttgtgggaagttgatcgaccatttaaataaatagcaaaaaaagtggataaaacaaatctgaaattcacaatgtcaccaacgagcctatcccttgccaagggtctgggtcctggtgaacacaagagttactggtgtctaggctggatagggagcaacaaatcagtttaaaaccccaaatgttctgacgttttctgaacacttacatttacccctgaattctagcagctatttgtcctttaaacacccagtactgaaacaatatccaaagacagtattgcaatgaactccttttgctgtatcatgtgcaaatgttacttagatgaggttccctctctttagctaaaaatcacaaaacattaaacaatggaaaaagccctcccctcagttcttgctaattgaggtgtccgtgatttacaaaaaaagagttccttaaacactgcaggattcttatttttttaatataatttatcttgctgagatagcaagtcaagtttataaagaagatgcatttaggaataatcctaaaagataaagcaggttta

SEQ ID NO: 160516 - DNA, 1000 bp, Homo Sapiens
ttttttttttttttttttgaaacttcctgtagctgtttattctactgcgagtaacaaaacctaggtcgttccatgttctcatgtacagtgatataagcctccgcaatataaaatacaatgtacaggaatctctatcaagtaaactaaagaaacacacttgatttttacatttgtgtatttaaattagaaaaatttgctttatatgttaaacaaacaaaaccttctcatcgtactagatgttggaacgtgacacctactttaatgtaatttaacctatggacacttggctttcaacaccaaacatctcaaactgatacattctcaatgttttcttaacttaaaaaatctgtgctataaagtgaaaaatctgtagtgacgtacaatggaataacagactccaaagaacaagtgaagttctttaattttacatctgtaaaagtttatgaaaatataaaaaattatcaaagtgtatttgtacaaataaattagccagatttttttacttcacacttcagaagtactcgaaaaatacacgacaagcaagagactgtttcacagtgaacagcttcctgtctcatttgcagttcttgagctagtgatcactagttcccgtctcagactttacacaagtcttgttccacgttcaaggacaaacttttacatgtatcgtctgacaaataccagtttggggccgagcgtacttttcccgggatacagaagaactgctcagaaggcgaaactggaccaacaaaactcctgattattcaaatcaaggactcctccctgcccccaaagtacacttaattggtttgttactttttttaggctggtaaaacttaacatttttcaataaattgttatttaaaatgcaacaattatactaggacagatgttgctttaaatcatgttttggaaaaaattgataaggtgatatataaaatctgagcacgctaagaaatgtgtttctgtttcccagttgaaaattgtaattccaatttta

SEQ ID NO: 160517 - DNA, 1000 bp, Homo Sapiens
gctggtggccagtgtttatttatgcagataagcactgtgtgccactagcatcaggaacagccacaaatctcatgcgcctgccactcagtggctggggtaagtcctagcagagcttctgagcgtggttatttaggaaccatgagtccagctaggatggggcaggcccacctcctgggggctgcaggcagaacctcaggagaggacagagaaaggaggtgggaagcaagtcacgattcagctcacacggtgtagacaggctgggcagaggcggggtggaccacgctgcagaccagcaggatgtggctgtccctggcagtgcccatgctgcctctttctgccttccgggccagcatcaccacacggcccatatggatgatggttactttggcagtcggcccctgctctgggccacactgctggggctggaggccaggctcttagccaaaacttgctgggtgacccttggccagtggttgcccctctctgggcctcagtttccttccccccaaagccaagtgtcctgagctctgggctgttggcccaccctcagcagtccagggcgctcttcatggggcctccaacaccacctcccaggacagcacaggtccaatgtggtggtgtgcagggcagtgggagactcagctcacggagcagctgcgcccatagggacctgaagctgcagggcccccgggctgtcctgggccgtgtccccatgggcagcagtgcttagggtttccagccactgctgctgcagctctgcggaggaggcgctcaggtaccaggactgcttggcccactgcagcttccacacatgccccgagtccagcctctcctcagggtccggcacactcagtttgcagctggggagagggatggtgcggggcagccggccgtcctggctgcctccctgcaggtgcagcacctggggatctgacatggggatggcggcccacacctcgctccaggtctcaccgctctctgacagccgcagggggccgca

SEQ ID NO: 160518 - DNA, 1000 bp, Homo Sapiens
tttttggaatgcaacagaacttttaatcccataaaagactcaatatatttggcaccctcattttatagtactcctttttggtacagaatcattttgccaaaatactcctgtgatacagatgcacatgataaactgtaaaatggaatttcacccattgaagagccccaaaagaacaatatggtagtgcagcatgaactaacatgcaatttctaattttcaatatccccaaattgcaaaatactaatagctaatatatatactatatgccaagtattaagtactttgtaatattatcataatctgttataaccgcactatgaggaaagtagaatagtacaattatctcactttgcagatgaagaagctgaggtatagagatcaatttacacaaaatcatataggctgttaggctctcaagtctagctcttaagagttgataaatgtggagcctttggctagtaagctttgctacttctggaaatgaatttagccttagaagtatgttgaaaactactgtttatgatttgctgttagaccaacaggtaaacagtgaactataagtcagtgtcacgaaaatatcagtgtcatgaaaaggctagagtacatggagggggaagataacttctggcttgggaggtggccagagggtcaaagaaagctttgcagcagtggcatttgagccaggccttggaagataaaaaacatttgtgtcctatacttagtaggagcttggtcaagacaacacaaatattaacaaaactaatgacctagatgacattaagaaatataccctaaacaagatgcacaacacatgtgtgacaatattcttgcttcatttcaatatccactttaccctagtgttctgatttccagtttggttgtcatatccatgttcgtaacaataccaaaatagattatggagaccaaaatctaatactgtttcttttttatgataaacaccttttattatatctcagtgtgcaaaaatacaaattatctt

SEQ ID NO: 160519 - DNA, 1000 bp, Homo Sapiens
ttttttttttttttttttagcaatacaaaagataaatatttattcagaacaaaacttttaacaatcaattttacattctaagccacaaggaaatagcaaaacatatagcaaaggaaaagcaaacactaaaagaaaagcagtgtactgtcttttctactggataacacttagttggcccatgacctctcgcttggcctatctcccaagtacattttagagttaacagctcactcataattttgggttaaaatccatctttctcctgagaatcaggagttgcacatgagctccagctagctgcttctctagggttcgtagctattgaggctaaggtgcaaatgtaaacctttggtaggtttctttacacaggggcacccccatttctcactggtggcaatgaatggggaaggggtagggcctccaaaggacctggcacactgtaatccagaagtggtgccccagggagcaacgaatgcaccctggagtgtggtccttggtccgttccgtatctcccaagtattcagaagcccctccttaaaaaccttctctttctgctccctcctccaggtgatttctcagcattcctctgggctgatcattctggagagatcagactttctgggccctcaagtgttgaggaaattgttgtgaagtgtgagaggtagtggaatgagcaccgggcttggggtcaggggactctactataggctggctctggcaccagacagctatgtgattttcacccagtcatttaacctctttgggcctgtttcatctgctggaaaaccagggaattggtccaaaccaactctcaggttctttccagcaggaatattctagattccatgattctataaaaaatggcttctgagccaccaaaagagctgtcatgaagtccatgcatctttgtgccataagagaggcccttggccaccattcagagcttattgattcagattatatacacttctaacaacactggtttcacaaattctcagac

SEQ ID NO: 160520 - DNA, 1000 bp, Homo Sapiens
tttttttttttttttgagacggagttttgctcttgttgcctgagctggagtgcaatggcgcaatctcggctcactacaacctccacctcctgggttgaagtgattcttctgcctcagcctcctgagtagctaggattacaggcatgcgccaccacgcccggctaatttttgcacttttagtagagacggggtttcaccgtgttagccaggatggtctcgatctcctgatctcatgatccgcctgccttagccaataatctttctgtttaggtaaatttgaaaaatatacatcattactaccacattcatcctagttagaatctaatttatatttattccactctgtttatgatttggtaactaatttgaaaggcattatattatcaaaagtgtatcagattagctccctcaactcactatatctgttaacagttctgaagaaataggcactggctttgaatatggcctgttccagtttgtgaaccgttgtaggcaagtaaagttgttgggcacagaggtgacctgtaggatgactgaaggtaaactgtcactactgtatacaaagaagaaaaataagatgtaggaagagatctgttataataacatatgacatattctatctaagtttttcatatatttcagaattgtaaaaacaaaactatgtaattttttctaagatgtataaatgacttacttttaataataaatatttcttgatttataatgtaaatacaattaaacaaatatgggttactcgaattaaaaaaatggcacatgtaaatgagcattttagtacaaataattaaaatgtatttatattatatagaaatctacacaatggaagatactactaaaatgttgctctacagcacatcaccctagacaaaatagaattctagaattctctttaaaaaaaaaaaatcactgagaattagatgatgactgtgaaataggttctcccattacaatactacttctgtcattcaaagttctgaccacg

SEQ ID NO: 160521 - DNA, 1000 bp, Homo Sapiens
ttttttttttttttttttgatgagtaaagagaatgtttatgaagtggctcctacataatgtcccagccctgggagtcacgaacagactccatggttttcattggcccctcttcttcggtatcagaatccctggtttaaggcaaggatgagagaagaacacgaggacgcaatgaaccagattcaagctgaggctgtgtggcatggcagaaggctgaactattcttgtgtagccctagggatagtccaagagccctctagtcttctctgaggcaatgagattcaagggcagctgtgatccttgcccttgaacggaaaccagccgtggccaaatctgtcctcacagatccatgtctccctggggcagtggcagagcagaggatagttccttattactctttgctcaaagggagatgtctcctgtccttgcctgcatttcgtcgcctctttcgactcaagaagttctccaatttcttgctgcgtttcagctccttgaacttctcagctagtgccaactggcgctgctcagattttttcaggaagtatggccgatggccctgctgggcctgagcccgacgttcttgcttcagggccaggtgcagctcctgctgttgctttcgttcctgctgtgccatttcttgctgctccattcgctgaagcagttgctgcagtttctcatgctcctctcctgaaaggtgcttcttcaactgttttttcacaagctctttctctttcgctcggatgtcattcaagaattggtatgttttgtcaaacacctcaggattatattcccctgacagatcatcaaagcgagggtcccgggctacctttttactaatgggaacaacctgacgtaaaaatggtactcggatcttggctgacatttccagaggcctgtgcttatctgcaacacatgcattttggataggtggtctagaagcttgtttcttaggactatttccagctaccaattgtttgtacgtcttagtccccacttggctct

SEQ ID NO: 160522 - DNA, 1000 bp, Homo Sapiens
tttttttttttgtatgagcaccctctaaggaagcagtctttatttgcatttttagagtgaacacatatatgaaaaacactgcaacaggttgacacaatgctcagtccctttttaagtgaattcctggggagaaagtcaaggaccttagggagcagagcagtggaatgcaaacacagaaattacctatgagtcacttttgtgagccaatgacacggcctcactgcagccattccaagaagtatctttgctcacggtaaatgcaaagtaaacaaaataccacactgcatatttgaaacaaacaaatgtgacgttgcctatactggcctcatgtgcagaaggaattttggtcagacaatgacaaaaaaaaaaaacaaaacagattgtgaaatggaattaaaagcacaattctttgtatctgggaacgtttcactggcaacactaactgtatgatacagacgttacctggaacagtagttatgtttctcttcctatccccaaagaagcacaatagaagaaatagacgcaaaatggaggagggtgttgtttaccaggttatttcagtgcagcctgtgggaatgaatacacgggccacagtgagcagtgcccttggctgtattccccagggttctgtatgttgtgcgatggttatatacaagagggtttgacaaaagagagttaactactaaaggtatccaaaaaaggcctgagaaaatctggttaaaatgtataaccttgtattgctactgatgggagttgtttttatatcttttacaaataataaaaagattgttaaaaaatagatttatccagaaagatgttgatttgaactctaaaaagcaacgtggaatcattattttcccttttgaatgaagagccatggagctccgtggttttcagctccctttctggttgcaaatcaatccttcctctggagtgagtctagggcatgcgggctcttcctaggtgtctacgtggaaatccttcactcatgcaggtgtag

SEQ ID NO: 160523 - DNA, 1000 bp, Homo Sapiens
agatcttgctcttatatttatttttggtaacatttaagtgatacattttatcctttttagtagccgctccagcattatagggagacagagtatggggaaagtcttgtgtaagtgcaaatggcattccatttgttgagaaaacagcccaatgaagcaagctgaagcagagaaagcttcctttggggcagcagttggaaggagaagggaacatgtcctaggagtgggatcaggtagcatgttttgcacgggatggggcaggtttgctcacttgcagtctgaagtgttgggaaaggaggggagtgagactctccaggaaagctttggagatctgttctcagtgtcatcagttctcttcgaacatttctaatttttcaccttttcttcccttccatgttacttgccctgctctacagattttgatccaaacaatatcttcaaggcattctttggcggtcctggcggcttcagctttgaaggtaggtgggcctgctgttcttgggagttcccagatcacaagccaacacactcattgcctcttaggcagctctttgggagtcagaggggcccatgagcgggggcagctgaattctcatctagcagggcatctatccactcggctgttgctaaggatgaagacaggaaggttcccaggcaccccttgccttgggacctttagccaccgcatctctgcagggtcagggaggcatctctaactgcctagtaccaaggcttctctgcaagagcaaaggtactatatagataatgctgaggtcagaagctacccatgtataatacagtcacgtgctccctcttgcacccaaaaacagcctgagctgtttgatacccatagagtttctctctgtgtttgagtttgaagcagcccttgaagacttttccataatcagagcaaagtgatcttccttagaaaatccatagccaactaccaacccctcttttctctttcagcatctggtccagggaatttcttttttcaatttgg

SEQ ID NO: 160524 - DNA, 1000 bp, Homo Sapiens
tttttttttttaaagacacatgcacacatatgtttattgcagcactattcacaatagcaaagacttggaaccaacccaaatgtccaacaatgatagactggattaagaaaatgtggcacatatacaccatggaatactatgcagccataaaaaatgatgagttcatgttctttgtagggacatggatgaagctggaaaccatcattctcagcaaactattgcaaggaccaaaaaccaaacaccacatattctcactcataggtgggaattgaacaataagaacacatggacacacgaaggggaacatcacataccggggcctgctgtggggtgggtggagaggggagggatagcattaggagatatacctaatgctggatgacaggttggtgggtgcagcacaccagcatggcacatgtgtgcatgtgtgacagacatgtgcattgtggacatgtaccctagaacttgaagtataataataataaaatttaaaaaaaaattcttagatgtaaagatgcctcacctgactccactcaggttggatcagcatcttgttcccttttctcccctgagactttcaaatagggcagagtaagatggaggaggtaactctttgtctctgctaatacctaatcatataatcttatttcaaaaattggccagtacagttggattgactacaaaaaaaaattaggccttgtccatttatccagaggtttccttcaaaacttttaaaaaattttatcacctaaaatggattttaaattatcagaatttagatgtagcaattaagtaaatcttaaaggaggtgtagaattcctttaagaagttattgtctgcttcccattgcagcaatgtctgcaatactactttttttaatgagcccagaaacaattctctgcaactgtaaaaattatgccagaatgcaagtttttggttagtgccatagtttcgttttgttattgaaaatgggataagtcatgatttattccctcccttc

SEQ ID NO: 160525 - DNA, 1000 bp, Homo Sapiens
tttttttttttttttttcatttattcaaaatatgaaattttattataattgatgtttaatgcaattcactttacgaaggtttttgtggttttccctaaaatttctgttttaatgaaggctcctgatcatcctggatgtcgacaagttttcttcttcatgtgacgtctctgatgcacaataaactgattagtttttctaaaactgattatattcatagggtttcatctcactctaacataaagtttaagctaaactacgtccatttaactaataagccaaatttgtaagagcttaacagactataaacttaactcttgctttaaagcaacaaaaacaaaaccctgatgaagacctggaagtgaattgttcgtttttcagactctagcttccttgaccttgtgctctatggttttgaacacacaggacccaagtttgctgcagaaataacctccaaatccatcttatgaaccaggaagactgtgagggtttttcttttttttttttaagggccaagggtaaatgtaatatttatcattagcaccacatcccatggtcagccccacctgaataaacggcatattgggatttttccacaaactatgagcctaatgaaaaaggaaatggataagggaaacaagttcccagcctatgtcacatgagtttctgcactatgtgttatgtggtaaggtatgcattccctcaggacttcccaaatccattacatgctagggttttctctctggtatgcattctggtgtgatgtaccctaagagctgccttacggacaaaagttttcccacattcatcacattcatagggtttctcccctgtgtgaattctctggtgtactctgagagttgaattttgggcaaaagcttttccgcattcattacactcatagggtttctcccctgtgtgaattctctggtgtgcactaaggtgtgatttctgggagaacgttttcccacaatcattacattcataggatttctcccctgtg

SEQ ID NO: 160526 - DNA, 1000 bp, Homo Sapiens
tgatttataaaaggaaagaggtttaattgacttatagttccatatggctggggaagcctcaagaaacaatcgctgggcgcggtggctcacgcctgtaatctcagcactttgggaggtcgaggtgggtggatcacgaggtcaggagattgagaccaccctggccaacatggtgaaactccatctctactaaaaatacaaacaaaattagccgggcatggtggtgggcgcctgtagtctcagctactccagaggctgaggcaggtgaatggcgcgaacctgggaggcagagcttgcagtgagctgagattgcgccactgcactccagcctgggcgacagagcgagactccatctcaaaaaaaaaaaaaaaaaaaagaaaagaaaagaaaaaaggaacttacaatcatggtggtggaaggtgaaggggaagcaacgaccttcttcacatggcggcaggagggagccggggaaaccgtcacttgtaaaaccatcagatctcgtgagaactcactcactatcatgagaacagcatgggggaaaaccgctcccataatccaatcacttcccaccaggtctctccctaaacacccaggattaccattcaagatgagatgtgggtggggacacaaagcttaaccatatcacgcaccaactgtgtgccaggcaccattctaaatgcttcggcttcatccaatgtccgtaaagctgttggcaaagagtaacaccaggaggcagagcctgggtggcactgctgatctggcacaaggtggactcaagagctgcccagagatgtccacacaccccaaccccagcctgtggctgggcctccagaggaagccagcagtactggacggctgccaggtgagatacctgcagctcactgaggggtctgcccatgaacctgtttctgtgatggcctggttcctgaaatgccaacccctctgtaccttagacagaagccatgccattgtaccatctgcaggtccaggcaggaccacctaa

SEQ ID NO: 160527 - DNA, 1000 bp, Homo Sapiens
ttttttttttttttttttttttcaagcacaaaagacgcctttattggtgcccagatctaaagggcaggatgggctggtgtgaagatgacgtggaagatgacagtgcttcccctcttcccctgggagtcagcctcttcccctctggcacggggcctagggttgggggctctagactcagacccccacagcccagggcaggggaagggtcttgagcttggtcgtgttttcctcctgggccaatcacagaggcaatagtgggagtcctggggaggggcatggctggcgtgggggtggggcctggagccctcaatgcagcaccctgcaaaccccaggggcagccccccaacctgtgcctggccctgcagggtcagctaaggcacagtggctgggtcctgtcctgccggaggccagagcactcccggcgacctggccctctcaggacgtgcagctgggagaacacagctacttctttcgccgggtggtcctcgaactactggagcaggggttgggggctgcggtggcctgttcggaggcagctccggagtctttctgggaggctggcctgcgcttctccccgctgactggtgccagcggggaggaccggagagaacagggtgctagcagggcctgcacaaatctgacagcccccacggccatgaggagcccccagagcagggcgggggcctccaggggagacagctgagagcgagtccagtggagggcctgggccagggtgctgttggcgctgcgggtgcgaggtgggcttttctcctgtagtccaaactgcctgagcagcgtctccagcgtggggtcccccagggacacggatgggaagaactcctccacccactggcgccgccaccactggccctgctccccaggctgggagaaccagtacttgtagcgctgggctcggacgtaggtgggcggctgcttgtggaagggatacctggccacttggctctggacaaggcggatcactggctccttgccctgcagc

SEQ ID NO: 160528 - DNA, 1000 bp, Homo Sapiens
gaccacgtcccacccccaactccccactgtgatcctcccacagaaagtgaccaccctgcacactcatgcccaaacaggagaacactacaccgcaagacactgtttctcatagagctctattgtggcatataataataggtactctatataaattaaattaaaaataaagctccagcaggttgcacaggttggctgttaataaatatatctctgggtaattgtgccccaagaccagctcacgaccactctccctcatccagagaattatacaaaaataaatacaggctcggggggtaggcggaggacatgcccagttccactctaaaagttcccctcactcacaccatctacccgttccctcatctccactggtgtcaccacagggagccctgtgttgactggagagcttggggatgagaaggcctctctttcagttgagcattctcagaagcaaaggacccaggtcccctcactgcacaggccatgtatcccatcttaagcctctgctgatcccacaagcagagcctatgagaaccaagccagagagaggcacagcgcaagcaccaggagggacacaccgctgttcagagccacagggaccaccactagcccggccaggacccccagagtctgggtcaagggcccccggagctgaggaggcagtgcacacacacattctgcagggactgctagggtgggagacttctttgggggttcaaggcttgggcctgcatccttttcatcctgggagctcacatgaggcctggctacactagagagacagacttcggcccccaagggactgaggagggtgggattttgcccctgcagaaggacgggagaggctggctccttgccagatatgggatccaagctgcctgcccactcactggtgacctctatctgggcttctgtcccggcctcccccagggactcagtcaccccagctatcaccctattcatgtgcaaagagctggtgtccttgcccatccctttctca

SEQ ID NO: 160529 - DNA, 1000 bp, Homo Sapiens
tttttttctaagatctaaaatgtgtttattttcctataattcataaagcactttataaagcagtaagatcttaaatttgtgcacttttaaaatataccaaaaagctatcttcacacacattttctcattggttcccacaaagatcccttgaagtcaaaaggagccgcattctcccatttgccagaggtgcagcctgaggatcaaggagggaggttaatgtgccaaagagggccacagactactaagtgaggattgaaactcagtgtcctgacttctaacccagtaagctcccattagttgacacgtaaacacctgagatatagtccaaagatgaagcacaggtgacatattgggactggatcttcttggtcaaaggatcaagctgagagaataaaactccaggactggaatctgggcatctgggatggtagttggggtcaagggtggtggcactgatcaattcccattacctggctgctcacccacgccagtggtggactaattcctataatgcttgtgccaggggaatccctcgggtactaactgaagctccacctgtgatggccaagacaacacattcatcacctgttaccaaagtcctgggcctcccacacctccctttttaagggttttaccacctgtcactcaaggaacacagagagaagtacaggattagccagtgaagggcagtggcaaagttcctgcagactctggtctctagttcctgactttctctaggaagtaattcttgaaatcggtgcttctttcctgccacatggcactcccatttggagatgatccaaaggaaagcctaccctgggtctccccacttgtcatgtggggggattcacatgcttaaggctcacagcattgagcaacaaagggctctcagctctgctaagtcctaaaagacgccccacaaaacacagttgtgctgggcaagtggccacaagcctatgcctgggagagccccctcctatccaggcaaaaggcttctcag

SEQ ID NO: 160530 - DNA, 1000 bp, Homo Sapiens
ttttttttttttttttgatggttcaacaagtgtttattgagcagccacatctgccaggtcttgggatagccagtccctgtgctcatgggcttagatcctggcagaggcctagtggagaggcttggggtgggggtcggggcatggaaggctgtgctattggccagggactcagaatacaggagagtgcaagggtgacagaagtttctttcttgggcaaagaggcctggaatggtggcttgaatctcagccatgccttagccttcccctctcagccagagaagacccaggtctccctgcccagaggtccatgcatagccattcattcgttgattcattccttaaccaagaattaatgagtgctactctgtgcagggcctgtaagagcatgggctggaggaggcagctcaggggccgggcaggggtgttggctgcaaggttacaagagaagggtagcactctcagaggcctgcttgacgggcgcctgggactgggctgatggggggcctttctggggcacagggtggtgggaatgtaattggagaggcttccagaggcacttggacttgagaggcctccatggagcctctgacagagtccccagggggaacacctgctccaagagtctgggctctgctttcccctgcccccaccacggaagacatgtcaagctgggaagccatggaggagaaggggagggcaaaaaagttgttgagccactgggataaatgggaggagccccggagggagcggctgcgggatcgcacagcccctcgtatccggtggggtgggctgatgcccctttgcagctgggcaggatgttcctgggcattggcaggatggttgaggggccctgtgatggcaggagtgctggcttggaccacatggggagaccaagtccgaataggggcccgatgcaattgagggtgcaagcggagggcatggcgaaggcggatggctctctgtgctctgtacaacaggtagcggatcccacggtggacgg

SEQ ID NO: 160531 - DNA, 723 bp, Homo Sapiens
tttttttattgttacagaaccattaaatacaacttatacacaagcaagctgggcggcgtccggggggcagggagagtgcaagagggtcaggggtgagcagtccgggcccggtcctggagggggctgaggctgccgtcgtgggaggggcttggctggcggaggccgggctgcctgtggaggccttgaagctttgccagcagctcctggatgaagtcctcgacaggtttcccacatgacttcaggagtccctggattttccggcttctctcctcttcactctctaactccaacaattcatcaatgttgatctcatcgggcatgtctgcctccatgccgcggtacagctcctccaggcgcccgtcgatccacttctccacgtccagccgccgctgcagctcccgccggtcatacttgacggtgacgcgcgcgtgccgcttctgcagccccccgggactgccccctggcccgcgggcccgcgatggagactgcagcttgctcagcacgcgcttgcccagccgctgagctgccatcgcgctgctggacccagcctggccccgcgctgtgcgccttcgcctcgcgccccgggtgcttcttacgggccagggcggggctagccgggggcgggggctcgggctcgccgggaggtctgccccaccccggccgcctcaggcctcagtttccccgtctgcagtgcgagagtaggccgctgcgtcggcttgaggc

SEQ ID NO: 160532 - DNA, 1000 bp, Homo Sapiens
ttttttttttttttttttttttttttgggccacactgaggcatctttatttctctgggtcacacagagcttgggcctgggagcctcttctgcatgggggctgcagctgccaagggagcggctgagaccagaacaagcgctcgggtgggccccagtgcaggttgggatgtgcccggtggagtaaggtgtgagaacccccagcctcactctctgcctggtcctgaagcagacagcagcaggctggcccagcctcccctttatgagactatcctagggtttgacagcaagtcccagatgaagggtgacaggcagctagggtccacctggtctctcctcagcagggggaaccccctgcgggcagctgggaaggcagtggccaaaggtcaagaagatgaactctgcccagacttctgctgcctgtggctatggtgggacagggctgcctttctggtcacactgggcagcaggcgactgccagggacctcccagtcccagggctgcattccctgcccggcagcccctctgctgcagctttcggatgagttccagcaggttcatctgcagcatcagctcctgtgggttggtggtcacgtagaagccagccacccccgccttctccagtgtgctctgctggtcagccaccttccggtccagctccaggatgatcttctggtccatcgcccgctgctcctcacggatccggtgttccacggcctctagttctcgctgctgagccgcctgaaccacaggcaggttgtggggccggcaggcctgctgggcttcctggtgcttctgccgcagcgcctgcctgagcactcggtgctcgttctgtaggcgcaggcgctggttgtacaggctcttttcggtgaggtgctggatctccagtagcccctgcacgatttcgaacacggtgccgtcgagaagcgccagggccaggtcgctgagcgtggtgtaggacaggcgctgctggaaagagctgggcaactccttcaccaggctct

SEQ ID NO: 160533 - DNA, 1000 bp, Homo Sapiens
tttttttttttttttaagtcagttgttttattaaaaaataagcactatgcttgggtttcataaaatttatacatgaatatgtacacagacacaaataaaataatattaaaaataaaaatcacacttgctttcaaggcagtggtcctggcaccccacatacataatcaacttttcctttaaagaaattgcttggcccaaggagaccacagttagagaaccactaataaagctgtagcccgttgcctgcaacattttcaattcgggtttcaaaaatatataaataatttaattacaaaacccaacattttttttctcttttggcacagtgaagcatcggtcaatagcaagaaatcactgaagagcctctgacatgtctctcacactcagtcatacctggaaatgccacatacgtacacggatgggggcccagaaaccccaaacagtagtcatatcatttatagtgtggaaaggttccctgatgtacttaggggggagggaagggacataaatcaatggaagttgcgacaaaaacagtagaaataagacgaagcctgggcgttaaagaaagacaaaaaaagtccttatgaagggaaggaggagcaggcttcgcaaagaaactaaaacaagaattgctttggtcctctgtaaagttataaaacacaaaggaaaatatcctggactaagtttaaatactcctgtcaaaatgctttagctttaaggcacgtttgatggagattttaaaaattcatcttcctctggattcaaagtgcaaagtccgcgcgcgggcccgcgttcccgcctccccgacggcgcgcactcggcgttcccgggccccgcggcgctactcaggctaggagcgtctccaccgggtacggcaggtgcgggccagggcggcggactgaggccgcctgcagggctgcgggcagccgcagggggcagtacaggtgcgcgccgccggccgccgggcctcggagtggcttggcgggggccgccgccggga

SEQ ID NO: 160534 - DNA, 1000 bp, Homo Sapiens
caaagcaattgtgacacctacctgtggaccaaggaaaaaaccaaatcatccccaatctttcagttccacaacaacaccattataaaaacgagttgatctgaagtggttccaaatctttcttatcttcaagatctatgattagtaattctgactcgttgcaaagcaacatattttttgagatactgttgtgagccccgggagaatgtcagagtcctgtccacttggacatgggtggaggggaggttgggcagggctgataaaagactagtacgcctcgtgtctcttcagtcttattttgcaaacatcatctataaaggtttttgctactccaagttttggtagcccaagctcatcaaagcatgtgtctattatgtgtctagcatagtaaaaatggctctaaattgcatataaatgcccagattttaataatctattgtttcaaaagaaaacaacagtagtgtgtaatatatatatacacatgtactatatatatacatgtactatatatatacatatatatattacacacacacacacacacatatatatatatatttttttccttccctaggtaaaggagtgatagaacttgtgccaaaaagagggaatctataaaacagaaaatatagtttcccccttaaggaaagaaaagctggacaagattgaaatgctctgtcttctaaccccatgaccagaagcaagaaaaacacattaagcaagttggtgctgggaggctccacagggtctgggaagcaccagggtgcccacttacttgcattgctgtgctcggcccttctataggtagggctggacgcccccgccaaccacggtgcagccctcgctggcatctttcttgggctcgtagccgccgcccggggaccggtagtgggactcgagcgggtgcgcgcccgccttgcccgcgtcgctggccgcctttggcgcggtgtgcagggcctcgccgggggccgcggccgcagagttgtaccgcaggagaccctgg

SEQ ID NO: 160535 - DNA, 1000 bp, Homo Sapiens
ttttttttttttttttcttttttttttgttattttaggcaacctttattacagaagtccactattttaagtgactttttgccaattttagatttgaagggaaggtctcaagttaagcttggaaccacttagaatccaagagggtagcaggaagatccaacccctcaaagcaggtggcgtgggtgccactgggaggggatctggggcctgtcttgagccgtaaatcttcctccacctgagacgtgcaccccactgtaccagagatgcctaagactccaatccctgggttctggctgtgtggaaaatgtctctacacagtcaagcttcagctgactacatgtcaaagagagacaaagttaagagcagcctttcatggtgtcaagaagcagttagcaccttgacttcccctccactcactcgctgacctgctgcagcctccccgggcacctcaggcatagaaaatgagctcagggatctgcccaccctggaccccagtcccgttggtgctgtccgaggagcactggaactggaaggccacctttccacactgcacttccgtcatcccctcctgcccaaagtagctgagttcgctgccgtccaggacggcactggccgtgtagaaggtgtcttgttcaacctggaccgggtgttcaaaccagaccgggaaggtgttactggatccgtctgacatgaacttggtcaagttctgagccagaaccaccccgagccgcttgagctcaatcttcacgctgtactcagccttcccagagctggagccatacaggcccagccctgcaataaatacccttctgtccactgcaaactggatgctgtcgcagcgcccgcggtaccgccactggttgctgcggtaggcagaagactggaatcggtggcacctctgcggggcgaggcccttcctcttggtcaggggaaagtccaggcggggcttgttggtggccgtgtaccacaggaagatgctgtgggtctcctccagagtcagg

SEQ ID NO: 160536 - DNA, 1000 bp, Homo Sapiens
taacattgcaaatgacaaacaattcatttttaattaaatactaacaaggaaaaaaggcaccatggcccattcaagtattttgcatagatgtacaaatattgtaaacaattaataggtggacaagagagaagaagatctgttttccgtgaacaatctcccaaataaaaagaaaattcacattgccctggatcccagacacatacaaacgcacagtggacggtgtgagaggacgcgttgggggtgactttggaaatgtgggcttggattctacagaacctctccttcgcaggctcccctggggaaggggacctttccagttggcgttcccatggctttcttgggtgtccagcagagctgttatacacgtggttaacacaattactgactttggaactggtccccagttttcaaattgcaagtcttccataccctctgtcaaataagaataaattaggaagtaggcagggagagacttccaataaagattggaaaggcgtattgcaggaggtggggaggggctattgcttcagggggaagggactatggcaatacaaaaaaacactccaaccagaaaatcagcaagtctcagaccttaagatctgcaagtgtctcagagctggggcagaaaaaggctttacttttatagggagaagtcagcaaggctgaaaggaatctatggctagcaggcagttacaagattgagccaggtgcccaggctaaggcttctagagacagggagacagggcactaaatcccttgaggtttgttttagagatggctccaaggcccttaaaaaaaaattcttgggttgtaaaattggcaggaggttaatttcacttttaaaaagatttacctacatccccatctgcacaaagagcttgctaactcactaacccaaacttgagttaagcttccctcctccccaccagaccctggactttgggccatcctcagcctgagccagcaaacagcccctcccctggagacaaaaaaaaaaaaa

SEQ ID NO: 160537 - DNA, 794 bp, Homo Sapiens
ttttttttttttttactggtgaatcttttatttggacaagacaaaaacatctccacactgttcccttttatacagaaaatggaacatctcaaatatattagtttttctctttttcaacagaattcatttcaatctggtcccaggaactgcttctcattttaggattcacgttttagtaacacatatgcacccattacagccaaaagagcatacttgaattttggatagtcattcattattatggtgaccataccaacatatggtaaaaaccctcttgctcttcccaccacgtccttcttttccagccagttctggccttctttgtacaagcctctatcatcaacttcattattatctcctttagtcagaaatttgatgtctccattatctttttcatgaactttgattactctgtgaactattggaatgtctcgtccttcaactttaaaaacaactatttcaccagctctgattgggtcttcccggaaatttgtgaggaacaggaggtctcctctgtgaaaggccggctccatactgccactcagcaccaccacgatggggctctcactgcctgtgagcacgatcaagcctttccatatcatgagtgcagaagacacgatcatggcgaagtttaaaacctggtaatagagctggcgcttgttcatcttcttcaggtccccgaagatatccaagccggacgcggggagatgagcccccacggcgcccgcacgcaccatagcagggtctccggggacctagcggcccgccggctctgggtggcacagacggctgcc

SEQ ID NO: 160538 - DNA, 1000 bp, Homo Sapiens
tttttttttttcatttttctaccagatttattatttcaaaaaagtttattattcagcagacataattccaaaaacctttacagaaggatctcttcacttcctgcccacagacattcatacagtttccttattttaatgtcctgggaagaggtagaaacatcttgtcaaagtcactctttcagtggtgggcatctgcgctctaccatctggctgctcaaatgaaaatcgaaccttgcggaaaatttcctccacatcacaggaacaggcatattcttgcatatgttcaatgagtcttccaataaaaacagagcccattgtgggatgtctccaagaaacattatctggtgtggaagagcagaaagcgataaaatccttctctatgtgggctttcttaatagcatcatcctcaaactcttctgtagttggtaaagataggtttccagaaactcctactgaatctttaaaccacaccacaccagggctgtcaccacggcaggcctggatgatgatcaccttcggtttgtccttcaaacttgggcagttcttggtattcaacatgttaaagattgcattgagttgtagtatatctgggacttgctcagagtgtttcttcccacaaatgccttcccgaataccatgagacatgaacaccaggaacgtgctgtcagaggtcttgtgctctgggcggtgtgcaaatgcctccagctctgtagtcatgtccgaagcagtgagattttttttcacatctacgctgtaccccagattttgtagcagcattgtcatgcctgtgatgtcaacctcagctccagttcttctaggaatactgtcaaattcttcattgcagataatgagagcaagacgtgtgcggcttgacttgtccattattggataaatctctgccgacttttgtttccatatcctttgagcttcttctagggagcaaagcttgacattcccttctgagcctgaggatgtgggcatagctgggttgtcctgcact

SEQ ID NO: 160539 - DNA, 1000 bp, Homo Sapiens
gcaaatgaatacttttattaacatggtaagtttttgtttgttttaacatggtagggttctgacctcaaatatttgttaggtctgctactcaaatgaacttacagctggacaacgtatgaaccttgaagatgcctcttctagtccagtttagggtccaatgcagacagttccatactgtcatccccaagcccctcaagggcctttgccaatctttcattttatgccaagtcctctaaaacgcatcagggtattacatcaacttgtacagaatatcaagatcttatcttctattttaggttccatgtcaaataaagctgagttaggttgtccaaacaaactcaccagacaggttacataagatagtgtaccacaacaaatttaaattttgaacaaaacacatctctcctcctttggtctcacacagaaattaaagtctccaaatacagacaatactatccattctccagctcttctccagattcacgagtcccagccaggtcggcccatccacactccccgttgaagtctggtcctttcttcagtagttgctgcatggagtcgtcttccagaattaatgcagctccttcagcacctccagagctggagaactccaactgtgagtctcatgtgtcacacacagacccaaagttccagggagctatcaggtcacacaagaaatagcaaagcacctcaaaaatttagaaataaccaccaaagcccgggaacaaatgtgactgctgcaagagcttacaatctaggccctaattcctgtatgtgagagcattttcaaacaaaattacttcccaaacaaaaacacgttaacaatcgaaactcatattgaggtcatcaaccacagaccatagcagaaaacgtagtgttaagtgagacagagcatagacaggaaaaaagagaaaacaaaaggctctctggtttcggcttctccagggtgtcagccaatctccaccagttgaccagaatccattggctggaaaccgccgac

SEQ ID NO: 160540 - DNA, 1000 bp, Homo Sapiens
tcgtttgtcttcacttttattgaaatacaaaatgttaaatatgcaagctgtactaatgaaggtgctccttgaagttgattaaggagggctgggctgcttgtggcttccattttcaattgccaggaaagaggtagaaatatcttgtcatggacagtcgttctatggtgggcatttgagctttggcccttggagtttcaaatgattgctgtaccttccgaaatacttcctctaggtggcagcaccaagaatatttctggaagcatgtgatgagttgtgtgatgaagatagagcccattgtgctgtctctccaggacacgttgtgtggcgttgaagagcagaaagcaatgaagtccttctccacgtgggtcttgtaaacagcatcttcctctaggttctcagatgactgtgaagaggccacttccaaggatgctggagagtctctgacccacagttccccacggtttgcacctctgcaggcctggacaatgatgaccttgggtttgtccttcagactgaggcagttgcggttgttgaatatctggaagatggtgtcataaagcagcacatctggttttttctcatcatgcacagttccgcagattccctccaggatgccatgagacatgagtaccaagaatgtgctgtcagaggacttgtgctctggtctggtagcaaatgccctcagcgctgactccatatccctggctgtcagattctcttctacatctacactatagtccagaccctcaagtagctccttcatccctgtgatgtcaaagtcagctccattcctcggaggcagatggtcaaactctgtattgcatatgatgagagccaggcgtgtgcggttgtttctctcctttattggatagatctcttcagctctttctttacatagtctcaggaattcttcatgaggacaaagcttgagggcatctgtagattctcctgactcaggtggtccagcctccatattcggatgagctgcaggatattgcag

SEQ ID NO: 160541 - DNA, 1000 bp, Homo Sapiens
tttcaccaccacggcttctctccagccttctctttattttctccagggcaccagcccctctgccagcctgagtccagggctcctaggcactctaccttgcccttgccattcccagggcctccccgcggccccgcaggggagggaggctcagagcacagtctcggcagtgctagggtcatcgaggaactggctgacgcgtttggggtgctgcaggcctggcgcggggtccactcccactcctgcctccttctgctcttcggtgtcctcgtccttcccctggtccttggagaagtacaagaatacctcctccagcatcgtctggctcacggaaaagtcctccacgccgtgctctgcgccgtgcaccgccagctctccaaagacgcgcgccagggcgcagcgccctcccggcggcagctggaagcgcaggcggcctccatgtgcctcgcgcagctccgacccagggaactcggccgccacgaaggccgctgccggctgggaccttgcggcgggcacccgcagggtcagtgtgtgacccgccgcgaatctgcccttgagatgttgcgggctgcccaggcagcggaaccgcccattcaccatgatggctaggcgcgagcagagcgcttcacactcctccatgctatgggaggtgagcatcactgaacggccctcccgcaccacggccaaaaggctgttccaaaggaagcgccgcgcgctggggtccatgcctgtggtcggctcgtccagaaacaccacggctgggtccccaaccagcgccagggccgtcgccagcttgcgtttgttccctccgctgtaggtgcctgcaggccggtctgcgtaccatgagagtcccagacgcgccaggcccgagccagcggtctgggcaacctgggcctccgggacaccgcgcaggcgcgcaagcagctccaggtgctcgcggcccgtcagcagctcaaagatggcatcggattgagggcagtatcccatgctgaggtgcgcagca

SEQ ID NO: 160542 - DNA, 1000 bp, Homo Sapiens
ttttttttttttttttttaagtttcattacacatgtcctttattagaagctactttaaatcctttttcaaacatgaattgattttaattaaaataaaattttactggaacacagtcatgtgcattcatttctgtgtcatcgagtgctgctcttaccctacaacggcagagttgagtatgcagttatgatggcgaccatcagacccgcaaaccctaatgtagttaccatctggcccttcagagaaagtctgctgttcccagctgtatagcattcccctcccaccttctatcccatcagcccaacctaactcacttgtcattttgtgttctcgatggtttatttcaaaagtgaatgatataacctttacctagctcaggttagcctttttcaaagaacaaaacaaaatttagttgcttccttactggtgcagtgttttttgtcagtgatcctcagggggaaaaaaaggtgtcccaatcctagttttgctagggcaaggtgaaccctttcaagtttgtataattagtttttttaaaaaaaaactcagaaaattaattattaaactctgattattgtttctattttatttgttctggtttcttcttcaagaactccgattgctgtgggataggtcatctacagctaacttctgtcattttaatctctttgcccattccttcccatcccatgttggatcacttaataaatgtgttgccaacattatcaattttattctctgctgtggtatttctgcccttttcactgcatccaaatgaatgtgtaaattttgttgctggattttaaatctttttatatttttcccatcttagcccacttccttttcttttcagcctgcatctattttttgaccttgtctgttattatttcctacttcagtttctgaaaagaccctttctttttgactcctattaaaaacactcagcaaatgtttctgcaattttccttgtttcttacagtaagatattctctaacataagctttg

SEQ ID NO: 160543 - DNA, 1000 bp, Homo Sapiens
tttttttttttttttttaagacggagtctcgctctgttgcccaggctggagtgcagtggtgtactcttggctcactgcaacctccacttcccgggttcaagtgattctcctgcctcagcctcccgagtagctgggattagaggcgtgcaccaccatgcccggctaattttgtatttttactagaggcggagtttctccatgtaggtcaggttggtctcgaaatcctgacctcaggttatctgcccgtctccgcctcccaaagtgctggggttacaggcgtgagccaccatgcccagcctaaaaggacattcttaaggcagaaagaagggggcaggcaagggtggtctcagcccccagatggaagtcagagtgggctgcaaaagatgcagatgggcaggcagggagacaggtaaacagacagaaagacaaggtgccaagggaatcaggaggagaggtgtcctggccagggaagagggcaccagagcccagcccacacaacctctcggctacattccttgccctgctggagtcagggaaaacacatccactgtgtccttgggtgggaaatggctttttttaaaaaatagtttcctataaagcatcaaaaaaacctcagagaaaacctcagcaaaagttcccttctctcaaatatttggcatcggcagtagggctggcatggctcgctctggccctggctttcctattgctgtggcccggcctggcccactcctggggtagctcctggcccctgctgctccctcaagagagggatgggcaggaggtgggagattgcaggtgggcttcggggtgtccctgggtccctgtctggaagttcgagtctttggtaactgggaaggggaggaggagaaaagcaaagcattgggcgttgggagggtccagtgggcgcctttatcaccgagaattcagccgtggggcgaccacagccaggtgcccgttcttggccttggtgatgagcagctccgagccgggtgtgaagtca

SEQ ID NO: 160544 - DNA, 1000 bp, Homo Sapiens
caaaataaaaatttattcaatctgtaacaagaacattgaatctgcacatttgcgcacaagttcacatttaaaaacagtggagcatatctgtaataaaaaaatctatgatacaagtggaacatcccaaccaccaggaagattaaggaaggagatgagaccactctatattctgcttcaaatgcctcaaaaatgtcccagagattccagggagcacctgctttaataaaacatgagcataaaagtttggggtggcttggggcaaaggtaacagtcagaggagagtcttctggacttgttttccatgttagaacaagtcctacaaaacaaagcagaaagaaaaaaaaaaaaaaagaaaagtaaaggcacctttagatatgccaagcaaaccaaaatccaacagaacataaaaatcaaacatttccctgtgggcttactgattgggaagcacttcagggccagttacccagtttttagtttgggtattagctctgcatgtgtacacaggacgctgccaccagcattgctttgaggacacagacggcagcaccagtcaaatgcctcttaagggatcttcaaggtgattaaggatgattccagtttagaaatcctatcctagacctctggggcactgagaaaatgaggctggttatcttctcatagcaggagccagggccagtcaccctccatttccaggctggaaaagtacagaagcaccttgcaatagctcttcatgacgtcaagggaccccacaccctgggagaagggttaggagtgtgcagcttcctgctttggtggcaggccttttcctaatatgggtgtcagaggagttgaggcagcaaatatgcttgtgtctaatacatgccttgatcttttagtttggaagggaaaacaaagtccaagatgcttttaagttggattgatgctgaaacagctaaaatttcatcttatccaccatcaaaaagcaaaacaaaattaaacaaaatgacactagccattcacc

SEQ ID NO: 160545 - DNA, 1000 bp, Homo Sapiens
ttttttttttttttttttttttttttttttacgacgttaagacatttattacatacagagcagatatgtgggtttgcttgcagggccaaagcctgaggagaatcgtcacccctcccccagccgccccactgctcagcccggagtcacttcgagatcctgggggaacagacgagggagcggacatacatcacagtggaggtggcagggtggtggggagaagccggcagcgcagcggctgcagccctcggtggccagcggggcttgtggggcagctccccaagatctgtgcttctctggttgggggtgggtgcgggggctgggctgccctcataagggcctcccagacaggagtgcagtgggcctggaaggtaggaataggccagagaggcccagctgggcagggagagcagtccagggtggcgtctgccctctgcgggcttggagtcggctgggggcggctccatcctcagccccacgggcctctgcttggtggcctctctgttgctccctgggagcaggccacagcgggcaaccctaggcacttagtagcgtgtctgggagctgggctccgtggagccccgtgcaggaggcaggccccgggagcacatcatcccccatcaacctgaggctgagcctgtgtcctaggactgatcccggagaggccaggggcctccccttcttcctgaggcctgggcctgccctggcagcctgagaaatcccaccctgggggcttctgggagggacaggactccagggcccactcctccaaggtgagtcttctgcccaggcagagcctggggggacacgggtcagaacggggctggcaagagcctgcctgcatgggcaggatggggtagcagtctctgttctcaagcagctgccccagggagccgggcctcgtgcttttatgccagttccctgggcaggggacagctggggtggggacagacaggatagaggcttgacgacggggaggccccagagaaggccggctggggtg

SEQ ID NO: 160546 - DNA, 1000 bp, Homo Sapiens
cccaaaaaactttatttattgtttcaagtggcaaaatgtcattggtctctgtggggtacctggcggggcagacggagacctggggtgaggcagggatacagtcccacccattataaaaatcaaaggcttttataaaaaatgctataaattggtatcaaaagaaaacccaagggaggctggaggaggaagcagagagggagagggaaggaggagaggaagggacaaaaccttcaaccactagtgatgaaatccagggaagggaaggtgtggggggagttcggagggtgatacaaagtgcataaatgtgcctccccagacgctcctcagaggtggaggggacagaggctgcagcctggggcatggtggggctccagccgtctcctcacccagggaccccacaggaatgggcactgcctgagactgccaggtgggaagaacctcagtgacttctcagaccttcttcttcttcagtttcagggcttgaagccagttgggcgacgatccttctgaccctgaggatttctctggcttgggaggtaacgtgaggggctttcccagtcctgggaccttgcaggatttcgaacgctggaccgcggactccttctggctcgacttgctctcagccagctctccctcctcagctgagcgattccgggggcgcagcttggccttcagggctgaggggctcaggccaggaaagaggttgactttcagccccttggtgcccaacgacatccgtgtccggcggctctgaggttcctccactacctcttcatctgaagatggcacccgagatgcccgtggctctgtagagtcctggaacaggtgtgcatccgagtctgctgcctccgacaggcccaaggtacccccaggccgaatgaccggggcccggtgcccacgcttgcgccccaagttggcacggctccgatacatggcactgtcgaggatctcggtgtcctcaatgaaggagaagtcctgactgggggatctggcaggaggg

SEQ ID NO: 160547 - DNA, 1000 bp, Homo Sapiens
ttttttttttttttttgctactattacaatatttaatcatttttacaataggtctgctggtctatttcaattaaattcattctcagaaccatcacatatcttgctgaatttcatttaaagcaaaagcaagttgcttaatttttgcttccattgtttttttgttcttgcatgtttcttccaaaagttcacgcatttctttttcaatttgatggacctttaaatttgcagaatcaatacacttctgcttttcattggccagctgtgctatttcagcttgatgagcttcaacaattgcatcaacttgtcttttaaaggcatcatccatactatgaagtttttccattgcattcttttgtagttcaatacttttgtctctttccgctttaagtttcttttccttgttttcaaatttttctttcacttcttttacttgtgtttcaagatgacatagaagttctcctttatcatgccacttccgattcagtgtactgtaagcttttctgatttcttcaagttctacttcctttcctttcaactgttgttttagtttttcttttctttcatgtgcctttccaacttctcaagtacctcatccagttgtgaagatttttcatcaagttgttcttgagtgcatttttctatttctgtgatcttttcttgtaatcttttgatgtgttcatctttttcttgtaaacaatcttttaattttctaatagtttcagtttggtcgtctatgattttgcactttattcttaatgcatcactatcactttcatttgtctttcgcagacattcattctctctagataaactctcaatttgagcctccaattttccacgattttgggctagagaagatccttgttgtgccagctcatgtccccatacttttctttctgtccttaaaccaaatattagtgattccttggctgctagctcagaaataagctggactttttcgtgcttgagaagttctatttgaatactcttctgcttgtca

SEQ ID NO: 160548 - DNA, 1000 bp, Homo Sapiens
tgagaagagctttcagagtggttttatcattaaattaatatctaatcacataattcaaagatataaaaattggaatgtagaaggtggggcaagcccctccctcaggactggaggcggcagcagggacagagccgcactgaagcgggtgagcgtgcgagaaacatacagccgagcaggctgccccgaacactcagtccagggtggaagcatcgccccggcaccccccaacccccgagcccactgcgcagcccacaggaagagtgcaggcttttcacatttcagagggtggggtggggtggggtggggcggggtgggcccctggctttgggctgccctccagcagcccctgaaggacacaggcggtgatggtgggagaaaggccccctctcccagggaggcctccttgtcctgagcttgggctgaggtctctgttccagtaacagatgctggttttgttttgtttttttttttaagacagggtctcgctctgtcacccaggctggagtgcagtggtaccatcagagctcactgcagcctgcgcctcctggagtcaagcgattctcctgcctcagcctcccaagtagctgggattacaggcgcccgccaccacgcccagctaattttgtatttttagtggagacggggtttcaccatgttggccaggatggtctcgaactcctgacctcaggtgatctgcccgcctcggcttcccaaagtgctggattatgggcgtgagccaccacgcccggcaggatgctggcttttagttcatttaaatagaaaataaacctgaactccacagacaccatccagagtgattacaggtggcgtccaaaggtcaaagggcagcctccacagggtttccttcctggttctgagacttcccagggacagcagaacttccttgcactggtcccaaggaagcccctcttggccaccctgagaggtgttcctgtccccagatgcccaggaggagcaagagtgtggggaccggcccttg

SEQ ID NO: 160549 - DNA, 1000 bp, Homo Sapiens
ttttttttttttttttttagaatcaggtggctcactgagctctgtattttgtttcctggagctttcactggtttcttcccctgagataccccaagtgacatgaaaagcatactcagggcctagagacactttactggggatgggcttctgtcacaggtcagaggtctgagaagaggggcaggccccactcctctccactagtagagaaaggttgacagagaatcatttcttgcttctcttggccgtagttttggttgtgctgggggcctcagccacagaggccttgggggctgtggctgctcgtgcccccttccttccccagaaagagctttggtggcccctgggaatcagactgcatggtttcttggtgggagaggaggcctggggtgaggagacggcctcagggactgtctcctccccttgcgcaggagtggcagaagggctgctgtccccagccatgggcaccccaggtagcaggggcaggtcggtgagggtgggctgcatctccatcctcagcaggtgctctgtcagggccgtctgttgccggtgctccctgtgcctgctcagctcctgctccagctccttgaggaagcctcgttctgagcagaatgggccactcagctctgggaactcctcatcgcttgaggcttcatcctcctcatccgaaatccagcgctccaccacaggctgcccgtccaggtccaggagaagtggcagggcttctgtcaccagctcgcggtagccatcctggttggtgcagctgtttccagacaggttgaggatgagaaggctctgggggaactcatccagcttcaatgtttctatcaggttctcagaaaggtccagaaactggaggcatgggaggtcgaggaggttttccacctgcctgatttggtttcctgccagagacaggaagcgcaaggaggggatgcaagccaggttctcaatttgctggatcttattcccttgcagatagagactgtgaagattctggaggcct

SEQ ID NO: 160550 - DNA, 1000 bp, Homo Sapiens
tttttttttttttttttttatggttctaacttttattattaggtcagaacgaatgaagtagcagcaaaagggtctctcctatgatctgtctttcactggtcctcagggcaaggaggaaacttgggcaggagatgattgctcaatcccagcagactctcagaatctcacttggacccgaaagtgcatctgcttggtggcattgttcttcattcctgtcttcagcatccattttgatttcatcctttggacatactgcatgtctcgctctcgcataagagccgctcctgtgctgccagtccatcccagggctctgtactgctgaagtactcggcccacggccttccgatttttggcaactgccacagctcttgacaagccaaatcgctgtttgtagtatctcatcaaggagcgatgacccactctggcaccagaaggcagaatcaattccatggtttcatcatcatattccaagttcttttctgagggcaactcctcagccttattggggtcctccccttccttgtgatctggatagctactcctaaaatcatagaagtctgcaaattccaaagcagcatcgccatctgtgaagagcttacagtggcttttgtcattcatatgtgcctgtacagcttctgtggagtagaaggacttccctttctcgttgcaccacaagcaaatcttgccaacaccaactttctctcccaagtatttaatcagtcccttaatatctgaaagatattctatatcaggaataaagaaactgtggtctttggtcatgtgagccacattcttcatcagcgagctggaatgatgggaacaaaataagcagtccgtgatagggatggcaccaaggggtgggccttcctcagcctcttcctcctctgcatcctgctccaccacatcgtccattgcttcagtatcctcacattccaattcttcatcagaatcaatatcttcccaatcgtctccatccaggtcctcttcctcctcctcgctg

SEQ ID NO: 160551 - DNA, 1000 bp, Homo Sapiens
ttttttttttttttttttttttttttttttttcacccaatgatcttttattatcaggtatcctggctggcccaggacccagagacagacaagctggggccaagcagggcggagcatctgagacccattttacaggtaagaaagacaaggagcagaggcctgcatgaaactgcagtaagcagcaggcgccagggggcccaaccccactggaatcgcctgccctgccctgagcctggcccacagtggctgccacatttcagacagggcagtgagtgatgggacgtgccctttgccccctctggtagggcgtggggctgggggaaggagcaggacagtaacatccgtgctgctggctgggacccagaagtggctgggacatgggggctgctttcttctgtgtagaggcctccctacaaggctcccccctcccccgaccctttacctagggcctgccagaaaacacttctcattgtgaaggggacagaactaatgggggacagtggaggacatggatctacccccattcctgagtcacacgactcacccagagtcacggcccagactgggcctggggtcatggcgccaggttgcccctctggcctgtccacagctctcggagctcgacatgacaacccaggtcccgcagggcggccttggccacgtcctcacagtcacggtgggcagatcgggcctgcatgatgagtgcctcagcccccaggtccaggatgggcttcgagaaggcctggccgtgggccaccaggtttcggatcagcatgcaagcctgtttctgcacgccggccttctgcgggtgtgccttcatggcctgcagtgctgccacagccccgccaccctccacgatgatgcggctgttgtcgggcttacgcagggccaggaagcacagggccgcgcagctctgctcacacacctgggggctggtcagatgctgggtcatagcagccacgatggactccgtcccaccagcacggacaatagcatctttc

SEQ ID NO: 160552 - DNA, 1000 bp, Homo Sapiens
ttttttttcatgaaatcaatattttattcagtgtcaaagcatcttaactgaattgtgtaagtaattttgtctgtaattttagaagtaacatttgtagaaaatatcaatattatcagttgtgctactagaaatattgaaggagttaattctgaatttattcatttatgcagttatctatatccacttaggtacaaaacttttgtaagaaagataacacttttattgcattataatttcatattttacaggagtcataatgcaaacttataagcataaatatatacatgatgctaccaaatggcaatgtaaccactaagagatttaaaacataaaactagaatttaacaagcaaaatacttaatatggcttttaatggaaaataactgtttagaaatgatttgttattgccccattctagtcattccccatcaagtgaacataaaattatgatctccatttaaaatggtacaagttatctaagccaactttgtacttttttgctacttttttgtagcatgtatgcagtatgatttctggacttccttaaatatacatacatatatacatatatacagatatacagtacacagttctgttttaatacccctgaacatcttgattaaaactattacaatttttctattataaaactacttgaaaagttggcataacttcctggtattgaagttcaatcctacagaattaaaaaaaaaagcaacaaaatgttggttataaatacattctttacaaaaaaaaattgaatagtggtcccgcactcataatttatattacagtgaaaacattttatcaatttaaaggtatttgtatcttgttgtccttggtttctgtgtgaaatagaggaagttaataatgagaatattgtaggcaggcctatttgttaggtttttctaggtgttcatttttgtgtaagttccaattcacttcttttgagttgttgttgatttctatttgccttgtattactgctgctgctgcttctt

SEQ ID NO: 160553 - DNA, 1000 bp, Homo Sapiens
ttttttttttttttttttcatacctacttgatcattctttttatttttacaaagcatggcaaaatgaggaaaccactgacaggtgaagaatttgcacaatggaaaaccaccttgaccatctcatgactttatacaggaatcggaggtaagtgttcctttaaagtgattttgtcatgaaagagtcatctgaaatgactctcgtgatggaggaaaggaaagtaatgaaatcaacattcatggttatttaaaatgccttaaaagctaagcataatatacatagtaactccttttcctagtataaaaatagtgccagaaactatatttgttcaaatatattgaaaaggtataagaatacaaatagatattaacagtggctagtgatgcctcataaggttttcttaaactgtaatataaatttatattttcaactatttacattgctttcaacaacattcattaagacatgtttacacaggcttttagtaagtatatggaatggtaaagtgagctttaatactttcttcttcactctctgtagtagagcagaaggggtccaaaaccatgcacaatttaacagtccagaagaactgtgtaatctttacctggctagcacatggaaaaaataaactatatacaagaatacaaaactcctaaagtgttcttcaactatcagcaggttaagtgattcatacttgcaaaaagacaggatgtttgtttactggtagattcttagtaagtttcaggtaaagaaggtgcataaaacatatgttattgatgaaaatggaaatgatgcagtataccccatgttctcacattaaattggcagtatcagaagctaagtctcttctctagcacctccttcagggaccgtgagctccttggggtcactgctctgtctccacagcagagcacggtacctaacatgtggcaggactcaataaaaggtgggtcagtgtatttctgatacaaaacaattaaattgtgccaccttattttgact

SEQ ID NO: 160554 - DNA, 1000 bp, Homo Sapiens
tttttttcattcaacaagtgtttattgagcatctactacatgccagacactattctagaaacctgggaaaggaggggttagggtagcttggagctgtcccagctgtagctctgtctcccagaagtgaggtctgcaggggaacagggtctgggggtcctcctgcctgggagagggaaggctgagtgtataaaaaggtggaagcctctagaaatgagaaggctgggtgtgtgggactcatgctggtgccttcccagacgaaggagagggcccagaggaggcagcttcctggagcagagacggcagcaggagcgcccgtgcccggcatcacctcctcttcagcacggatatgcaggacttcttgaggggcccgatctgcaagtgggcgtccacactctccaggaagaaggcaggcttgagtctgtgggtgaagagccccgcaaagtgactgtccaggcggctctggaaggggtcaatgggggaggccgggatgccaccccggcggggccgggaggccttcagcctccgcaggaggctcatcttgccgtcccgtacagcatagaaggccaaggcacggtcagcgtattccaggcagaccccaaccgtgggcgagaaggggtggggcaggggagcctccagcccatgaaaccagacggagaagctgcgtccattccactgcaggcagcaggagtgggcgttgcggcccagccggccgcggtcgtagggctcttgtggggagaagtcttcggccatgacccccatgctgacccagccctcgataatctccacctcccagtagtaggtgcctcggtccagggcaccctcgcccagcacctgctcacaatgggtgaagcgggtgggcgacaaggggtagttgataggacacagcaccctcttgacacctttggttccaaacagctgcaggaacttgtctgctgtgtcgctgtccaaatccacaatataggcaaacttgaggaaatagtccctgggagcttcactctcc

SEQ ID NO: 160555 - DNA, 1000 bp, Homo Sapiens
tttttttttttttttttttttttttttttttttttttttttttttttttttttttttttttttttttttttttttttttttttcaaaacagatatagctggtttattttggaaacaagtctcatccagaaatgttatttactgcatttaaaaaccatggaaggcgatttgcatggttcctccccacgccctcactcccaccaagtacagctttaccacccaaggtcctttcaggaccccaggcctggcggctgtaggagagagcagtgaatcctaagggcaagagaatggcgtccacttgccagagtttctcagagcagagccagctgctcctccagacaggccggtgaggctactcgacaccctcacaaaggggaaaccctgaaggaagtacttcagggggtgcctgcccgatgcgggaggttttgggctagccctccccagatccccggcctgaggggcctcctccagctgcagaagtcaagctgccaaactgccaaagtactcctgcagctccagcagggcccggaagcgatgggagacagcgttcttctccgccttaggcatctctgcgtacgtctgctcatatccatcaggctgaaagcaggggtcccagccaaagtcctggcagcctctgggtgccacgatccggcccgaggtccggcccctgaacaggcgcacgggctggcttgggtccccggtgctgagtgcaaacgtgcagagcgcataggctgacttgtcctcgaacccggccaggagctggtggagaccttcaggctttaacttctccagaaaccactttatgtaggggccggggagccctccaagggcattgaagcacagacaagtgtcctcaaccagcacgggcccctgtacctggcgaactgcctcctgacatttctgtatggaaatctcatccggctccccctggtactccggcaggtcaattttctgtgccaccaaagtgcatggaaacttatctcctagaatctgaacgacct

SEQ ID NO: 160556 - DNA, 1000 bp, Homo Sapiens
cctattttttttttttttaatttttagaagagatgaggtcttgctatgttgtccaggctggtctaaaactcctgacctcaagcaatcctcctgccttggcctcccaaagtattgggattataggtgtgagtcaccacacctggccaactctcttccttctgtatgcacatttcacctttaacataacgtgtactatcatcattatttttttgagatagggtctcactgtgttgctcaggctggagtggaatggcacgatcttggctcactgcaacttccacttcccaggctcaggcaattctcctgccccagcctcccaagtagctgcgactataggtgtgccccactgtacttggctaattttttttttttttttttttgtagagacggtgttttgccatgttgcccaggctggtcttggactcctgagctcaggtgatctgcctgtcttagcctcccaaagtgctgggattataggcatgagccaccacgcctggtctgtatgtgctttttaaaaagcctatcccatactgaattgtgggaacctatgaagtgtctcttaatgtcaattaaaagtaacagtggctgcagatattgatttctgaaagtacatgagaatttgtctctaactatggttgaaacaacaaaaccaaatctgaatcaggtagaggtctaccagacacaaactctgaaattaaacactaataggactgttactgggcaggggggactcctttgagtaaaaaggtaacatacagttttcctaggtggctggtgctctcccccaactttcatactggaacaagagttaggctcaggtttacatgatcctctactattcttttgtgaagaatgacaactgagtcagttggttgagcttgaagtgttccagtcctaagggattcactctcacttaatgtcatatattggtaaggtgcctacatgaggtcagtgtttgtggctacatataaagaccaatgatgaaatgaggaattatttt

SEQ ID NO: 160557 - DNA, 1000 bp, Homo Sapiens
acgagacatgaaaggagaagttttattggaaacatggcaccaatagactggctcaacgcagagttgccataaaccttccatttgtaaaaaatgcattatttgcaaagtgcaataaagcaaaacgcaataagatgacatatgcctgtatctgtatcaataggaggaacattgccattttcttctacatgacataaaattgtactaaaaggcactagtatgtgcctttctgggtggcaggcctccactctcatgatgttttaacaaagcaaagtagatatacttacggattcaaattttgactactgaataactcatttcaaaaagaaaattcagctcaataaaattcagtatctgtctaaaactatttgtcagggtaataagttcatgggaggtccaaagacaaagtatgtagtcctattctatactaaagtaaacctggattgagatttataataaaaatcacaacacaacagtattacttggtaaagtcctcaaagtagattttatttatacatttcttcaaatgattgtggtattttaaaaaatctctcccaaatttgatgacatagggacagtggtgagaacaaagtatccctaaaggaaacaaatatcgattggtgctttcctagctcactgagctaacactcagaagccaatttattctataatcctaaagaaccttaaatgtgggtttgtttgaattggccttctgagaatcattgaaataaaggaaatattacggaaaagagattagtttccaaaaatgtgctgtctttgaaaataagtcttcagacatgtgtgtcggaaaagatctgcaaagcttggtacagtgttaatgtgtaaagagaaccaatcacctccatggactttaaaactcaaaattatctatgaaatactttaaatgacatggcattaccaacattctttaaagcatttcatttaaaagaaaaatgtaagactgttctcacccttttgaaaagacctaatccctttctaaacc

SEQ ID NO: 160558 - DNA, 1000 bp, Homo Sapiens
ttaagcactcaatagatgttatttattattaaaatgacaaacatgtcactgccattgccctgccctctctggaactcaactctaaaaactgcttttattgttactttagaaatcataaaaatctcattaaggtcacatatttttgatccccaactaccatgcagctcagtctccatattactgaaaaaaagtttggatcacgtgacttttggccatttctaaaaatcaaattaacactcaggggacagagatttgtcatcacagaagatatgcagaaaaataggcacaagaccttgaagtgaatcccaaagaggcgctccaaccacagatggagtaaccaccaccacggctggtcaagggtgacagcagccacatgatgggtgttctttcaaagttagtcacatgcctgcagtttgtgttgtctagagggaaattgattaacccagggaaggtcatcccagctggtcttacctcctagaccctgcagccaggattactgtgcctcattaacaaactgcttccttccaacttggccaaggtaccatgagttactgaggtgcctcaccctagaaccttcccagtctcttcccaggcatatttattcctaaatcttcatcctgtcagcatcaactccctactctgtagggctgagagtcaggaggtcagatgagcttctcagagagatagcaaaactcatttgtgttaccataaactcatttgtgttactgacagctgaaaactgacagctctcttgggaaagctctgaagaaaccaaagaggaacagtgaaggtttcaatgcggaagtgggtctagactgtgtgccgctccattgaacatgttcagaaatcactagcaagtaggaacggaaacccaagaattatgtggttcacctgaggcatagcaggggacgctgcaagtgaaggagacaggatgtaagagttccctgcactgagtattttaaccaaatggaggaatgactctggggtccaggaaagggag

SEQ ID NO: 160559 - DNA, 1000 bp, Homo Sapiens
tttttttttttttttttttttttttttttttttttttttttttttttttttttttgccttttcaagtgtttatttttatacatttttttgtattaaaaagaaaagcataattaccacaaattacaaaggactaaagcaggactagaataatgaatgaatcacttcagcctggaaagcagatactctcaataatattaatgttataatacaagctcattcaagtattttacatttttttgtccttttaaatatgatatcctagcacatagtaaagataatgtactacgagcgtaaggtggaaccttctccgcaaagccagatgacaagttttcctctccagtgagaaatgggctccaagttcttatcttctctgccatcagcatggctgaagggggagagggtgggtgttagggaaaatccagggacccttccacacaggaggtactctggggttccattcaggagggtgccagataattcagatcactctacccaggctttttggcaaaaaacaaccctcaccctccgtaactagtcatcttccttgtccctcctcctcacttcccttccagggccttctaagcagcttactttcttttgtaaaatcaatcaccaggaaaggggaaaaaaaaaaaaaaagagctacaatggaacaaaacaaaaacatttaacaactttgacacaggggctcagcacctctatctgagccccaggggtccaggctggggcacggctggatggcccttctctactggtagtgcctttgctcccaagtgcaggaagagggctaaagagaaacctgccccttaacagggctgaggcacacagacctgctgatgtctgatgcccagaggttatgttggcatggaccaaccttggaagggataggatgaacagagggatctgggcaggctgttgctttatctcaggtcttggatccccatgggacgatggtaggtgtgaagtggttagccctgatggcccctgccacttctggcat

SEQ ID NO: 160560 - DNA, 1000 bp, Homo Sapiens
tttttttttttttttttttttttttttttttttttttttttttttttttttttttttttttttttttttttttttttccatgcccatcagggtttattgtttctgtaacagcggccacgccctggggcggtggcctgtgcagctggagatctctcagcaccttgggttgggggcggggctgggcgggacatgggatggaggcggtgcctgtggccagacagggtggaccttggggcctgcaggcaggagatgagttcggcggccacagtggcccccagcagcagcagcagcagcgggaggttcagcgggcgcgctcaccgcaccaggtggaaggtgagccagtacatgagcataggctgcgccgccgccaccgccatggtcaggtacatgcgcagctggttccgggccccacgcaccgggaccccctcagctgctgcgtctgccaagatcttcagccgcagcgtccggatcatgaacacaaagatggctacgcagcaccagcccagcaccaggtagtagccaatcttcccgaagagcaggcccatgaggaccccgccaatcatcccgacatatttgtagcccaagaaggccaccaggtcgatggtggtgaggtcggtgttgacagtgaccagatagaggctgagcaggatggccagcacctccagggtcagccaggccagggctgagctcgcttgcagccccaggaggtctggggagaacctatcctgggtccccagcgcaagaccagccaccaaaacgtaggtgatgaaagccattgctggaatgtagaggtccggggcattgacgtcaaagcggggggccaccggggtgtcctgttggtactgcacttcccagtcctggtgtaggtaggggaagaacagcaggcccagctttctgcccacatacatggtgtccacagcaaagtaatacttgagcttggtgatggggatgaagcggtcgatgttcttatccaccagctccttgccctgcgcggccaggc

SEQ ID NO: 160561 - DNA, 1000 bp, Homo Sapiens
ttttttttttttttttcagagtatacggaaacgagggagctttattggttacatattgtactgcagagccaacagagagcattcgcgccagaggatacatgcagacaggcagctccaatgatacacatgcacccaaggagccctgagccactgctttgccctggtttccagcgacaggttctggcctccttggtcccatgcttggagctgctgcacctagactctaaggggcaggggtgagagagaccagagcacctgcctgagcaagtaggtgtggaccaacaggctgcccccaacaaaggggcctataatgcaataacagtttatttgagggctactttcttagccctctcaatctttaaaatacaaaaaaatagactttattctcttaaaaatacattccattcagtatatgttctgagctgggaagcagcaggaaaatagggcccctttcctatgatcctatggttgtgaggctttgaggagaaccctgctccccactcggggtattcaaaaaataatccctaaaagcagctctttccaaagcaatcttgtcagagaaataacaaaacctcataacaaggtagccagggacccagcctctgggtccccattcctttattgggaagtggtagcacttggcactgacccactaaatataaagaactaaaactgccccaggacgacaagtccaagaacactatagtgccccctgcatcccgaacactccactgacgggggttatttatgtgcaagcttgcctacagctgagggtggggtggcatccttggccccactgcagatccctttaacccacactgtgactctttctcattgccacccaaaagcaaaaaacagccacagcttctttatccacctgcagctttctctggtttagtatcagagtggcaaaaaaagcagcagcacgtggaagagatcagctgctggtactaagccagcttcacttcctccaaccaagcagctctattgccaggtcccc

SEQ ID NO: 160562 - DNA, 1000 bp, Homo Sapiens
agaaagatattttattttttaggaaaagagccataattatcttaaatgtgaaaaaccacatccaataaactgatataaagttttaggaacaagggaatatcttattgtcacgcattcacagtgaaacccattttaatgcaggtccagagccaactgcagtcctgtccaatcccataggtacaagggcctggctcctcttcctgtgtactgcccgacttcctcatcttactgggtccagcataaagcagatgtccactgtcttcctcacatgctgtgatcttggcttagaggtaggcacagtgccgctccagcagcgaggggttcgcgttacttaggaacagcagctcttttttcccttcttctgtaggagctttctcatgttgaagccaattgttttccaaataatactgaatacaactttcaaattcctttgggttatagttggaaaccaggatgggaataaagggatccagggcatcaaatccttcctttcccagcaactcctggggcagataggctttccggggcttaaagagagacccagtctggctcaaagccgacacaatggcgcctccatgccaatcatttttcatcattttcctcaagttgtgaacaagtgctaattcctcgggggcaatcgggcttttatcttctcttttcagagtggttcttccccaaagagcattgattccatccacggccactaggaggtgaaacatacccaaagaactttgcctctttagctctttcagcacaattccaactgcatctgtggcgttcctcacccgtgttatgccctgttcaaccacttctcccagaggactccctttctcagtgctttctctcttattccagacatacttctcttgaacttttatctggttcaggaagcgctcatttgtagttttgaaattcttcagccaggttgaagcctctaaaggttgatcaaagcgctgtttgttgtagctggactgcagaagatcccgacaatttttcaccc

SEQ ID NO: 160563 - DNA, 1000 bp, Homo Sapiens
tttttttttttttttttttttttttgaacttacaaaaaggatttttattaaagagaaatctgtttggtgggtcagatatgaaatagatttacagaaactttacatcaggtgtctccaagacataaaaggccgcccaggaaaagcaacgcccccttgccaggatgccagtgggaggacggcaggatggcagcccaggccacgtggcgtggaccctgcgtaggaggctgcaggaagctccaggctgcccgacagtcacggcgttccccggaaatgggttccctaggagggagcagcaggcggcgggggttccaggcatgtctgtgctgggctcggagctcgtgcacgcacactgtcctgcttaaactcctagtccatgtctcgtgggacccccaaagccgtcccctaaggaatgtgctctggtacacaaggggaaaacacaccaacccgccccttaccgagacagcgggcgcaccagcctgggccacgtgagcctctgctgagctctttggcacagcacacctgggcctttaacacctgtcacttacaaaagtagacattcctgtagtaaaacttcttaaaaacacctatttctgcaaaataatgtgtttctgtatgtggagctctgcaaatatacatgtcctttgggaagaaagcagcgtggaccgagactgagggctggtccggggacgtccgagtgctgctggaggtcggtcaggcttcagtccctgcccgctgcccgcgctcacatgaggtcgttgagctccgcctccagcgccttggccatctcgtcggcctcggagctgctgccctcatcctcgttgctggactccctgctggactcgctggcggcgtcctcttcattcagcttcctcttgtggcctctgggcccccggccccctgccgcgctcctctcgctggacgcaggtgccccgagcgtccgctccctgcgggtccctggcttccggggctggggctcctcctcctgctcctcaggcctcct

SEQ ID NO: 160564 - DNA, 1000 bp, Homo Sapiens
ggtaattaaatttttttattgttgaaccaaaaaaagatccaatgacaaatccatataaatgtgataccatttacaatttttaataaccataaaagcaccattatataagacacttaaaataatttttcacagaacattagaaagaagctgttggccaacaagaaatagagcatacgtcctctgtggtcttgtctatcatgatctcacattaaatctgattccaacctgttggaaattaatttggattcataaattcagcatcagtataagaagacattccagagttgtgaggacttgattgtcttaatgccacataaaacatcaactgctcattttgtaatgagcatggcttttatatatccctgtatgacctatatcctggggtgcctaatttcttgcactcccaaacatttgagctgccgactaattacacatgttaataggcataattttagaagtcgtttattccttttaaaagttagtgttttatgaaggcaggcttattttatttacactattagcacaacagccaaaagttattcaggtttaatcctgctgaataaagtagtaaaaacacaaggcgtgactttaaataatgacactgatttccctcagtagctcctgtagctattaaggatttgacagcatttttaacaatgatacatcattaaaataaagaaataacttcccaaagtgtctactttgaaggacaatgttcccttagatgtatgctttctggcatattaacattaaaggaaaatcagtatcataagagtcgcacatctcacatttttagatacatagattatcaaagtagcaatggcactttgataagtagcaatgcccccccaccacttctctccaccttcccaactttaccgatggagatgaatttcctgaaaaaataaatagatcacttcagagcaaatggtactgaagcttatatataatataaacactttatttcatctatgaacctatgtaaatatattcttgggtg

SEQ ID NO: 160565 - DNA, 1000 bp, Homo Sapiens
tttttttttttttttcatgagagttacacaatagacatttattcacttcaacatcacaatttcacacgaagttggaggaagcccttccctaacaaaacaagcattcgcattaggggaaggaggctgacctgctctagggatgaaatacatctaccaagatatagataaaaacaaaaacaaaacagatggtagagccaaaaaacagagacattaaaggaaatgaaaaacgttataccaagtaatgtttataaatccagatcataagtgaacgtaggttacaaaaatggaagttgtaagtattgttattcttgtacttttcacacaaacagaatttttagaaaagcttaaggtcagggagtgctagagagtttctgtatggcaggcaagaattcttccttttgaacaagaccgaaaaacctcaggacaaagagaaagtatatcttttaaaaactgatttcatagtaatgtttctacatattttgaagcacctttatgtatttagagcatatcaaattaattcatttctttccctgttaataaaaaaggtacattcacagaatcagtgtacttagaataaaaaataaacagaggaaataagaactaactcgagttaataacaacatctttaaggacaagtttggtcatttaaaaactaagtcttgttttgttttgcttgtttttaattactcctttcatacttaatatttcaaatatagctgcttcagcaggacagcttttcagtatcacagtaagtacagcccaatacaggatcatccaaaaacacgttgacacttccaagacactggcacggggtccacggagttttgcgcgtaaaattttaaaaacccttcctacggtgatgtttaaggccaggagcattcatttctcaaccttgtatcaatccaggatccatcggactaggtttcattaggcaagagagtagttcgttcctcctctgtgctgaggatgttttgagatttagacctttttctccttgaat

SEQ ID NO: 160566 - DNA, 1000 bp, Homo Sapiens
tttttttttttttttttgcataatagttatcatatttcgatttatttccatgtaaattggttgttacatgctgagttagtacaaagaattataaaaaagataattaaatgcattgaaaaatataaaaaaataactgcagcatattagactacatgatttttaactaaaaatctttggattgtgaaagtaccacttaactccctatttgaaatctggccacaaactcattgccaaacagcatattctatactgaattagattatcatcccacaaaatacagaatgtgcatttctaaggcataatgtatgttcaacaatatactaatatattttggaaaccactaaatgtcaagcattatccatacagggtattaacacattaatgttttcattaaaaaagaaagatctctttcttcatcacattacacatttatagaatagagatctgtcaaataaattactgcaaagtagttcaagctaaaacttataacacttgaatcatataatcgggagcaaataacctttaaaatgaaagacaaatggtgaaatttaagggcatttaatttgcataaatgtaatgttaacagtcttttcctggttacatattttatgcttaatttatatatgtcactctattaggtccttaacactcttataggtcagttttaattttttccaattttattttaccataataagcattatagaagtagtttgtcatatataaaaataaggtaatctcataaaaataattcattgtgactctagaaacaatccagcatcaagaccactacacagtttttgtgttgtcaatgcctgcttcaaaataaacatttgcattttagaatcttgtgtgtctaaactcatgtttagctcttaagctctcagaactccataccagagacttcctccaggttaacagtcattgtagccttggtgtgtggaagtcttaaaacaaaggtcttcataaggtacatggtttggtcttcctttacattgaa

SEQ ID NO: 160567 - DNA, 1000 bp, Homo Sapiens
aagctttgcttttcttcatttggcttgcgtcagaaacacaaggctcggcacagcgaaggcttgcacccgcctcccgggacccctcaggccgccacctctgctgccaggcagtccaggtcctcagcttcccggggcccttgttccgtgaactctgtgctcagctgccacaccttcactgtgccctgggcatcgcccgcagccaagagctgagtctgctggctgttgaactccagacagtagacagggctttcatcctgggtttgcttgatcaaaactgtgggtttctgggagcttttctggagatcaaacagctgcacgtcacctttcccagaggcagctgcaaaaaccaagggccgcactggggaccagcgcacagcaaacagatacttgagggagagctgcagcgaagtcaagggaggggcctgcagcatggagtacaggtggacatgcccgtcagtcccagcgctcaggaagagattcctgtggaagggggaacagctcacagagtagatgggaccgccgtggggggagaaggtaaactgtgctggggcccgcaggggcacggagctgggcatccgcgtgagggctgcctctccagctgccagggaacacttgagcgggaagccgccttccgtgcccagaatgaacagcctagggtcaaagctggagaaggccactgccgtggcgcccacctcggtctccccgcggggatgcttcttgagcttggtgctccgtggcagctgctgcatgaccagggcgaagccctctgtgagctgcagctggcctaccccgatgccctgccagagtagcaccttcccgtcggtggccacactcagcacctggaagcggtggctgtgcccaggctcgggcagccacaccacctgggacacagggtctgtgtgggtgtcatccgtcaggcctgtgcgccacagcagcgggtcctcaagacggctcaggtcccacaccaacacctcaccactgtacagccctcctgcgacgt

SEQ ID NO: 160568 - DNA, 1000 bp, Homo Sapiens
ttttttttttttttttttaaagggagagtgaggctttttattgtgtatgaattcacgtggtatcgacaactccacacaatattaaaacactgcgagaaagtgggtgcggcacacctggaattttaaaaaagtcagaaataaaaacaaccagacatcccaatgcagatggcatagaacctgctagaaccacaggcggcggctggaaacaggagacaggtctttacgaaggttagatgggcagcggttccgtggacagaggaggaggcgcggctggccggcatatggcttctgtgcagagggcctggcctcaggccgtggactttttaataagtgaccccttgaggaagggcgtggtggctccacctccacccggaagcccccccgggtcactcacgggcggacaggtgtgtgacggccctctcctacctgccccagaacttgggcaggacgggctgttaacttggagatggatgcgtggcctggaggcctagcgttgcgcctcggacacggtggccggcccgtcaaagggaccacgcagaaggagggaaacaggagcaccttccgccctggcccagccgccccgtttatgtccccagaggccagaggtcgcagctgagctatctgtgcttggcctggggttacccctggggagggtgggagaggggtgagggttctggctccttcctggagagaggagggcaggggaggcggagctggtccgggaaggtgcccaggtgggtcacaacagggtcggggcctggcccgctgtggcccttcacctggctactggtgtctcgctcagcagcggggaaggcccgtgggagacccaggctacagaaggagaaacggccttctctctcccacccgacgctgccttgtgtgtgtgcgtgggtgggggtgagtgtccttaactctcttttcccctggcgtagctgagagaggcttgtccccccaaggctagagctgctgctgccacccccgcccgccagctccccgtctg

SEQ ID NO: 160569 - DNA, 1000 bp, Homo Sapiens
tttttttttttttttttttttttatagcaaagtatattgtaaacaaatttaatgaccaaatgatagactggtaaaaaatgtgcctatcaccaagggctgatacctttcctgtggcccaggccctctgctctttaaaaatggggcacaaatacaggcaggtaagagacagacagctctcatcctgcactcttggctttctgagagatatgaccccaaggtcctggagtctagctgctgcttcctcctctgggaaatagaggagtgatattggtagtacctagggcatagcactgctgggacaattcagtgatttggggactgatctccatatcaagatgacctgatcctgtctgtgtgcgggacagtggctagcacggagcccttgttaggcccgcctaccatctgacccttctcaaaccttcccgtctgaggacatctgcatgcacacttgtccctccaatgctgtctcactctggatggccctgacacctgagaggccagacagccaagtggtttctaggacctttgtgattctaggcctgggttcctgtttcatttctgcctctgatggccgagtggccttgaggaagcaacatctttccaggcctcctttgacccacttcactagttcatggggccatctgaggatccaacccggtgtcaggcacttcgctcgggcctgacagaggacagaagcgctccgtagcagaggctttcgttctttaatagtcgctctgagcatcttgtctgcctccatccagctctcactttccctgtctggctctaattctggttgacccagagggcatagctgaggctcggaggtcaggaaccgtggactccaggaggcagttttgagggtccttcaggcttggccacggcaggataccaccattccatctcagaggcatgaggagtccctaggccccgacttggtgacccttgccctgtgtgccccctcaacagtggccaggccctcctgtgtgtgtctgctggggga

SEQ ID NO: 160570 - DNA, 1000 bp, Homo Sapiens
ttttttttttttttttttaacctacaatgacttatgtgtttatgaagtgttctaaaaaaccatacaaaaaccaaagaaacaagaaaacaaaccttttcaacttgatgtagggttcagaagatacatacattccaaataccacagtaagcattcatctgaaagtttgccggttggtctttctattaattaaaaaaattcaaaacagaatacagatttaactatgtacaatatttacaacttacagattttacaacgaaattatacagttaagtctgtcgtggaaatgttggcattttggtatataacacttcagaaatttcaaaaacaactttacctcaaaaacatgttacacaaattttccaaagtgctgtagctcactggctcattttatctcaacaatccagtttagcaatccaggtacccaaatcttgaggcatgaagtaaccgctatactactgagagacagcactttttatacaacagcagaggctgttagaaaccttgggtctttaaaaccctataacaatgcccctttcaccctccaatcctgagacaacaaatcctgtagttccccctcatcatcgctgtcagcattctcttcttcctttttctgcagttcttttatggtcaggatttctttaagtttattttttatttcatcctggcgattccgtagcttttccacccgtcggtaacactctatctgctcatcgatctccccaatctggcggtccaaccgtccctcctcatcctcttcggcaactatggcttcggaaatagtgttgacctgcctcatggctttttggaattcgtcccactctttgtccatctgatcttttggagcatcaacctttcgtactcttgcatctacctcagggtcgtcaaaaaaaccttccggtaacgcttccgcggtgttttctctcctttccaccactttttcatgtatttctgctttctcaattgaccctgaatgaggaattatgggggccttgggaggatt

SEQ ID NO: 160571 - DNA, 1000 bp, Homo Sapiens
ttttttttttttttgagatggagtctcgctctgtcacctgggctggagtgcagtggcgggatctcggctcactgcaatctccgcctcccagattcaagcgattctcctgcctcagcctcccaagtagctgggattacaggcgcccgccaccacgcctggctaatttttttgtattttagtagagacgggggctcaccatgttggccaagctggtctcgagctcctgacctcaagtgatccacccacctcagcctcccaaagtgctggggttacaggtgtgagccgccgaggccggccatttttttgctttttgaaaaataattttgattggtccctcactcacagaggactccagaagccagggtctgttgcatccatgaacaccgctccatgcgactgggagctccgcccaccacaccaacgctggctcgctgcttttccagcactggaaacttccacaacaagggattcttgggaaaggcagtggctcagactaccttccaccaccacttgcatctgtcagagcgttttagaaacccttaaaattcaaacatttctgctggcttctcttttagcttcctaacttttcggtagccctttatggccaggacagcccccagggcaaagaccacaatgcccagggcagcaaagattccagctcctatatctgctccgtggaaactgcagccgaaaccgctgtagcctttgctttggtacagcgcctgcctctctttacacacaggagagccataggcagcagagaggtagtggaagtagaagtacaaggccgggatgtacccccccgcgatgagcatgtccaacaagccttcggtcaccagcaacagtggacaatgccacgggacccgcaggacacccatggcaacgaagaggcagcagagggctgtgagggctccactacaggccattgccacagtgaccatgggcagctttagctggtagaactggacatccagttgctgggccttctccccgtcagcac

SEQ ID NO: 160572 - DNA, 1000 bp, Homo Sapiens
ctcactcacaggtgaaatctagaaaagctgaactcacagaagcagagggtagaatggtgtttacctggggctggggccgggcagtgatgttggtcaagggatacatttcagttacattggaggaatatgttctagggatctatagtaggacatggtgactggaaaattgctaagagagtagatgttaagtgtcctcaccacaccaaaaaacaaaaagtatgtgagttaatgcatgttaattaacttgatttagccattccacaatgtattcatactttaaaacaagttgtaaacaatatatacaagtattatttgccaattaaaatacatacatttaaaaatattttagatatttgtccatttttgtttcaagtttacttgctggtcattttattgttaaaaaattcttggttgttttcggctgggcacagtggttcatgcctgtaatctcagcactttgggagcctgacgtgggtggatcacctgaggtcaggagttcaagaccagcctgaccaacatggtgaaaccccatctctactaaaaatacataaaattagctgggcgtggtgatgggtgtctgcaattccagctactcgggaggctgagacaggagaattgcttgaatccgggtggcagagattgcagtgagctgaaattgcaccattgcactccagcctgggcaacaagagcgaaactctgtctcaaaaaataaaaataaaaatgactggtttttttttctgtgtgtacatgactgacaagaccagtggtttcctttaatacctcatcgacgttcccaggcactttttgtatttgaggtgtgtgaagtaataggttggcccttgtcttgagcgtgatactgaacacaccgactaataaaatgggggcctttggctgcacaccaggcgctctgggtactgatgagctcgcccccaactccatgccaggaatcagaacggttgcccgggagagtcggcagaaagaggaggaaccggatgcagtg

SEQ ID NO: 160573 - DNA, 1000 bp, Homo Sapiens
ttttttttttttttttttttgaaactaatcaatctttaatttgagagccaaaaagctttggtgagatgattacacttagttcagaacccatgaaagctacaaccagtgagacactgctttctttaaacaaaacagtttcaaatatagaacagtctgtgcttttacaacttacgagggctcctctgacacagcagctccttcttctagctcttgagcttgtttgaaccatggcaacttggcctcgactggaagtttctctttgggtttatagcagggagtgggtacgatgcattcctcttttatgtggggctttgtttttgggctacagcctcctgtgtgcattcctcgatggtcgatgcagaggaccacacggtatctgaggccctggccacatgtcactgtgcacggagaccactcctgtgccagccatttagggcagtcaaaaatgttgcagggctgcgcgatgggcatcttaggggtgtacatgcatttccactcttccactgaagtgacatgcccctggatgtcctcctccacacaggaaactgcccggctctggatgccccccccacacgaggaggagcacgcggtccatggggtggcctcccaccgaggaaggggatggtagaggtcataaggcatgatctgcttgtatccgtcactggctggacaaggatccaagttgcactcctgaagcttgggtttgggtttgatgttctctgggtaatagtgacagtattggtcagcaaccacacggttgctcctcagatcgtagcactcagccgatgtcagctgataacctcctccacaggttgctgagcaaggaaagaaatccgtctccctccatcggtggatgatgggttgatagaagatgaactggactgtactgtcagcggagcccgagttacgaatcttgacaatgaaatctgctgtgagtggtccagccattctcagtatctctttgtctggaaatttctggaagtccacactagaattgtcc

SEQ ID NO: 160574 - DNA, 1000 bp, Homo Sapiens
tttttttttttttttgctttttataaaacaagtttattcacattttagaaaaactaattccaggacaggaaatggcctccctataggatccctaagagatcaagaacagaaggccagagggaggggcttgggagggaaggagtggggaaggggaggcacgtctcccattctgggtagtgggaggtcaaataaattaaaggaagagtggacagagggagagggtgtccaggcaaccagaggagggcttggagctgggccggaagacagtcgacacctgcaagacctgaggagtaagggatcaccgttttcgaagcctcttcatgaagcagcaagtgatggtaccaaggacagtggcaccagtgactagggccacccctgtacccaccagcagaggcacaaatagggtgtccagggcatgcatgtaggggtagactgtaacaggccctgagcgggcactgcccgcctggtaccagctgtagtcggcatgctgcacccaggcgctgggggcacagtggtacacgccttcatcctcgggccccaagctgtgtagtctcagccgatggcttcggggccccaccagctctacgctgacagggcctcctccaggccggactcccagctctgccacaccatcctggcctacgccacccaccagctgggcagggacagagctgagctctccgtcctctggtcgctccacccaccagctggcggccagccgcagtcctggggggccaccccgcacagagatgttgcacagcagggaggcagtctccccgcggtacactgtgcctcctgctagccatgccacagcctccagcaccacaccttcctcccgcacatgtacagggagaggccgggaacgggcactggctgcttcacgaagccgggtcccagaccctcgaacataggctttggcgaggcagcggtaggtgcccgcatcaccaggcctggcagcctctagccgtagccggtatgttctggatgccaccttctccat

SEQ ID NO: 160575 - DNA, 1000 bp, Homo Sapiens
ttttttttttttttttttggagtcttttttttttttaattaagtcaaatgcagagcaatttcccacactatatgcaggtgtcagaatgaggtatataaaacatgtatatagagaaatgcctttatagaaaagtagaaaccagtaatattctcttctccagcatcactaacaccaagagaccacctgaggtctaggtccccaaagcagatggctccatagaaagccccactaacccgtctccacattgggcagtggaagggttctggaaaggaagctctatggctaggagctgccaaggcctcttgagtgtgacatcacaggttagaggccctgctgagctgctagcacagtgcagtggagaaatgttgcgctccgtcaggaagctgggctcttgccatgccagtagcttgcttacgaccttgggcaagtcactttttcctctctggggtcctgtgtccaaaaggcttaatgagccctttctaatggttctttgattgctttatgagttaggggctgtgaccctagccccagtgccctacaggaaggtgctgacctggacgcccgcaggaccacctgctaaatcaggcccacttggggagcaagccctgaagtgctttattaccttgcctctgagcttagtttccaggttagcctcttagaagcagctcacaaggccccacagtataattcccataggttagctaactactctcttacctgtgcaaaatgaagacaggtcactatccatccctgaagagaaactggggcatcccaggtctgcctctgctcctgtggccaaaggcggagcagatccttctctatcctcttcctaagtggaatgctcagtgcaattcttcctttccttatgaaacaggaagagtccctgggcccaggcctggcccacggttgtcaaggcacatcattgccagcaagctgaagcataccagcagccacaacctagatctcattcccaacccaaagttctgacttctgtacaaac

SEQ ID NO: 160576 - DNA, 1000 bp, Homo Sapiens
agggggacacaaggtgctgagccagcttggctggtgagggttggagagacccagcaggggagggagggcagtctcaaagggagtggggcctccttcagtgcttgaaatgaggccaggtgctgatgatgttatacaaagcctgcccaggggacaggatgttgaccacgtcactgtggcccatcagcaggtagtttggagtcaggtacccctcaaccacggcacactggatcaggtcctgggccgcctccagcgctgcagcatttggaggcttttctacaaagtagccgatgaaggcaattcctagggcaatatcgttgaatccataagtgtgagagccttggatgtgccatccaaccccttcatacacgccaccatcctggcccaccaggaagtgatatccaatgtcacaaaagttccgtgtgtccatgtgaaaggactgtatgtttcggacgacagtctggcagtctgtggatacagtgcagcttgtgccagcggtgtggatgatgatgacatatttggctgggaggttcattttagggcagtgtgtctctctggcttcccaagcagatcgtttgatgatgttggggcaaaccttcctgggcatcactggatgttgagggtccaggcaggtctcttctttcagaagaagtggctgaatatacctgggcgacaggtgacccttctggatggcataggagatcagaccctctgcagctgataaggcagcagggctgggactgctgcctatcttattgccaaagaaggcgatgcccagggaaatgttgttgtagccctgggtgtgcaagccttggatgttccagccaacaccttcatacaccctgccatcatccccaaccaggaagttgtacgccacgtcgcaccagcctatggtgtagacggaatgggactgcaacccccgcagcatctggctgcaaacgctctgctgctggcactgcatccctgggagctggtctgtgatgatgtaggccacaggcagggt

SEQ ID NO: 160577 - DNA, 1000 bp, Homo Sapiens
ttttttttttttttttcttttttatgagttggaaacaactttattgatacctgagaaaaagtgcaggaaaaatattcctcctgaccaggtggcctgtcccctgaggccagatcattctctcgcctctcccttaagccctgggtcatttgggacctcactggccagcacccagaggctgaagacatccacagccagagcctggaagccagacccagagaccaggagagggaatgtctacagcgtggctcctgaggtcagggccaaggtcagcgtgggaccctcatcggtcaagggccagcgcctcttggatcactgtccggagtccgacggaaaacagctcctcccatggttcccggatccaggcaagcagggctgtcagctgctcctgacacaccacacggagtgcccaaaagctctccagccgggacacctcatcgtagaagagcagccgcaagtcctcaggggctgagcggtagagcagcacggagctcaggctgctgagtggctgctgctccctgacacgcacagcagggcccggccccgagggaggcaccttctcagaggcttcgccagatgctgctggaggagagggctctgccggggaccctgcagcatcctcatctaacaggaacagggtggacggagtcagcaacagggatacgaggcaggtggaagggccttcaaccaggaacgcccgaaggtagaagaactggcgagcctccaaggatgagtctttttccagcaatggccagagccggtgctggggggtgacctcctcctctgtggcactgacacagttcctccaggcagggggcagagactgcaagacatcaaggagctcctctaggaaggcccggcaatgcctggcatctcggggcagcagcacacagcggcccgccccagctgcccactctagccgcaggctctggcctgccaggcccagctctatgccactcagatcctgcaggggaacagccagggtcagctgcagccagctagc

SEQ ID NO: 160578 - DNA, 1000 bp, Homo Sapiens
tttttttttttttttttttttttttttttttttttttttttttttttttttttttttttttttttttttttttttttttttttttttgattttaagtcctttaatttattttgaatatcagtaattacattttcaaaatatgatataatttaaaggtatcagtaccataaatctgtatcttacagtaggaaatgtaagagtaaacagcctatatacactttgtactactgacacaattttatgtatacaactctatacagtatctactaatctccagaaaacccacctacaatccatctgtctggactgtgggcaagtggttctttctgagtcagggtctcactctgtcacccaggttgcactgcagtagtgcaatcatggctcactgtagccttgacctcctgggctcaagtaatcctcccatctttgcctcctgagtagcttggactacaggtacacaccaccatgtctggatacattttgtatttttggtagacaccgggtttcaccatgttgcccaggctggcctcaaactcctgggctcaagtgatctgcctgtcttggcctcccatcgtgctgggattagaggcatgagcgactgtgccaggctgactgtggacaagttttacaaataaaccaaaataaaaatattttcacttttcagctgcacatggtggaaatgtacatgtatgatgacaaagtcggagatatttattacgctgaagacatttaactttgttccatgccagccatgagtgacaacgctagagattccaaatggggaaaggatcctctacagacggctttgtttaaaatggttacaagaaacatatggcagtttttaaaatcagattccattttctctatagattccattcgccaagtgcccaggcctgcctgccaaccgtctgcaaacatgagagccaagttcaacaccttcatgatagcttctttcacaaagctgaccttttctctcagcagacaccggtcatggatggtt

SEQ ID NO: 160579 - DNA, 1000 bp, Homo Sapiens
agctttaaataagaaatttattgcaaatatagaaattgattctctccatacaggaatctccgagttgaggaaaacaatttcgtgccattcagttttaaaacaggaaattgagggaagggagaggcagatacagggaagagaaaataaagttaacccccacccccaaaagaagaaaaggagagggttcaaggccctcagaggaaggaaagtttcgtaacacagcaagggttcacaggttcagagcccagggcctgagcccagctctgcaggacccaaaccaggtgcccaaccacagccaacttggggactggcggctcctgaggaagggagggagggagggaagtgtggccgccactgcaggaactccaagcccctgtcccagccctgtgctggagtgtggagtggcagaggggcagaggaaggaggagcaggcccagaccatcctgcccgtcctacaggacccccttcctctccctcctgctcagcaggactgcctgacctttagtgaggcctgaagccgcctctggaggcaagcagtatggaccctggttttgtcttagaaggggcacccagggtcagggaaggagtgtgtcaggatggaatctgagcatgagagttagaggaggtcccctctcctggggctcagccacctctggagcagccaccttgtcagacaggagaggtggcaatggggccagccaggcaaggctgccctaaccttcacactggcttccacgggcaaagtaagcccctcagggctgagcttccccaggctccccgacggcttgccccgcccatccacactcatggaaagggggctctgctgggccaggaatgggcaggggcagggtagtaggggacagaggcggtgcttgggggacaggcagccactgcaaccccactccctctagtctcgtcttcacacccacccacccacccacccttctggctcctcttgtcattcacagcttggctccctgtccccccatcccacacagga

SEQ ID NO: 160580 - DNA, 1000 bp, Homo Sapiens
cacttagaaaaagctatcaagtattttattatttttattctacattatatacaggtcataaaaggccacagcagtttttcaacatataaaccctttaaaagtagagggcactatgaaggatagacaagtatcaaaatgaagtccagtaatgagggcatatactcagtgcagtatttctgaggaataacaaagcagataccgagtcatccatactttgcttccaagtattctatacgtttttataaacctctttgagatttgttaacagcctaggtgtgccaagttgccatttattttaaaagtgaaaccagaatgaaagaataatgaatctaggagggtacctttcctaatgcttgtcatttacagctctccaagaaggaaagcctcaattctttaccactttctacttcctccttccatcaaagataggaaagagaaaaatcaggaaaaaaaagctcaatattctaattcttcctatttagctggagctttccttttctataggggtttcttcaaagtatagttcaggccttttaaaaattagcttcaaattccaaaacacttaatattgcaccctccttgaacaataactaaaaaaattggtttccactctgtgaaaatacaatctttaagcctatcactggtatcagcagatcaatataaaaaaatacagtaccaagctacactggtatatttccatattaagaacttcaaaatatacttatcactgagaccatagtccttgcattagttttcagtccactatgaacaattatctgctgcatgtaaacatgtctaaataactatagataaaatacatcaatcataaatttctgtaaaagataataaaatatcttctttaaaaaacaaaacaataagctattactgcattgtttccaattttatgaaaatggaacaaccatatggttgttgccagtcctgagttcattgtaataaaaatggccctagttcctggttaaagtcagcaaccaatccattc

SEQ ID NO: 160581 - DNA, 1000 bp, Homo Sapiens
aatatagcagcattttaataaaatttcatatttcatttccataaggcaggatattttatccagaaaattagagtccatagtttaatgtgaagaatattaggaagaaaattaaaatttgaagacaaagtttttggaaatcctgtctaaatatattagcctttattttaaaatttaaaatacaaaaaaagtatgatacagttacacttagcaactttaacacacatttttcagttcattaattcaagaaatatttagagaatatatatgccagaaataccaaatgaacaaaactgacaaagcccctgccttcatgggacttaccttctagggcatgtgatgggcatgtttggggctggggagggggaagtatagacagaaataaagaagcaaactcatagattgtcaggtacaggggatagggaaggcagatgggagaagggtttgtcttactgataagataatatttgaactgagatcactaaggggagctctctggggcagagggaacaaaacactaaagcaggaactttcttgggagccataatagggtaagtaagaggcagaataatgagagataagagatggtgttagaaaaaggtagaattgcatgtgtgtgtgtgtgcatgtgtatgtatgtgtggtgagtggtgtggacgtgtagaggggtaacactcataaaggaccttgaaggccaccggagggagaagtcattggaagattgtgagcagggaagtgacacaatcaaattcatggttaacagaatcactatggctgttgtactgagaaaagattgttcaagacaaggactgggaaattagggaactaaataataagcatattgcgattaaaaaggttagaggtagtgacacctagtggatatggtggcaagtcattcttttctagttatatttcaaaggtagcatcaaggggatttgctgttggattagacgagagttgaaacagaaatagaggagtcaaaagcaactttcagtttttgacc

SEQ ID NO: 160582 - DNA, 1000 bp, Homo Sapiens
tttttttttttttttttttttctgtttcacacattatatttgtttgaacttcccatgtttaaaaattttgaagaaaatccctggagtagacaatccctagagcactgacatgctgtggtccaaggttcaccaggaacagtgcctgtgccctgccacatggcggggttccttcaagcctctggtgatgaaggtgctcagggaaaggaggacggaggggcgcggaaggacccagccactgctggccaccctggcctctgctctgtgttcacgggggagcagactctggggaggcgcccctcctcaccacggcctgcaggccgggctggagcctgcgccttcaggggccttgcatctccagctggaccccctggcacaggatgtgctgcagtagcccgttgaccacatccagagtctcgtccttctccagcacgatgtcataggagtccatgtagcgctcccgccgctcctccaccttgtcattcaggaagccaattttgagaatgttctgcacaccaggaaccccatcggccatggtgaggtccccgatagagtctcccagcaggatgacattggttttgccctcaagttgctggaagtaaccacagttctcacacacagagctgttcttgttgtatgtgtgtatcagctggcccttaaatccctggagaaaaccatcttcattaaaatccatgtagttagacacgatgtggatgttggggtggaacactttcatctgtcggataatttcttccaggatatcaccaatgcccgcagaaaagatgaaaaggggaatgttgttatggtagagtgtgttgaagaaggtcttatatccctccctgagcattgcattggactctctaaccacctgggctatctgaaacttctgaatcttctgctgacataggagattgtgcgctttggtccaccattccaccatatgaggtagcttctccttgacggtccggtgtgggtcgatctcaattgggtaatagtggtgaag

SEQ ID NO: 160583 - DNA, 1000 bp, Homo Sapiens
tttttttttttttttttttttttttttttttttttttttttacatgtaattgtttatttaaaataattttccaagtcttccaatgatttaacaggctttgcttcacttttatcatctcaaacagctataaatcaacacactttttgtattttattttactactatgtatgctattttaataacatttttctttattaatactagaaccaaatatattgaccaataagcagtatagatttaaattatcttcttgggttggtctgaggttgctgatggattcttgggattgatctgatgctagaagctatcttaggccctgtctctaactcactgtatgtttcaggcaaaacatgccacggttctaggtctgttttctcatctgcaaaataaacacccaaattagatgatacttattgttttaactagctataaaattccaatactatattccccatcattttcacttacttttacttaatctttatttgctacttttccacctataaagcgtaattttccatatcaagtaaacataaattcattaaaaaataaacacaaacccaaaatattcttattctaatatatctgcattaatagataaaaaggctttagctttaattttcatttttcatttctacctcttaaagtcaatgataaactcacaagtgtaaaatgaatgcatttaaaaacataaaagatacatttcaatgacaagaaatatgcaatgatcatgaaaatctactgtacactttgccacggtcaaagaatgaaggacaatatggaaaagccaatcttcaaatatatccttaacaaaaactctctcctgcatagtaaaagcatcatctaaacagcagctccaaccaaaaaaaaaaaaaaaaaaaacaagcaggggagatgggacagataactttctccaggttttccagataaaaacatgtggtcaccaggaattcaaggtaactaggtacttcaaaagccacatttaattcaaaataaaatg

SEQ ID NO: 160584 - DNA, 1000 bp, Homo Sapiens
ttttttttttttttttttagagatatcaatagatttacttagatccattcacttaacatcaatgcataacacattccaaaagcgagcatatattaaatttaaaatggatcatcttaattgggttcaataattggataaatggtcaaacgattttcattttctatgttttgggccatgcatttcattccttattgatttgctttacttaattaacatatcaattattcattttaataggaatagagaaaataatcatgagaaagagcagtggtagagaatatacttctcactgctgcacacaacatgtatggcaggtgatgataccaaacagctaatttctgcagagacctaaatggcacatcttggcacatgtggataagtagaatgtttagtaatctaaaaaatgagaaaatattataaaaatagaagaagtagaaaaccctagacaagttaaaatacagaaaaattttaagcaaagttatttgaatcaggcaatatttaatatatcaaatattaatcttaataactatttataaagtaatctaaacccaggactctaaccatgtcaaaaggcagccggcctcctgaccaccccacaatcctttgccaggattagtgttctctgattacatacttgggcaccccctggctacgatagtacttgtttattattgagattataaaaataaccattctctaaatgattacacatagtaaataaaattagaactatacataaggatttgaataactgcatttctttaaggaccacttgcaacttcttctctctgtttcacaaaccagagtagaccagcgtaggacaagaagagcatggaacgcaaagaagaagatcagcggaacgtttctcttgttctgcttccactccttcactttctgtgtcacttggcaagatccatggttgatgaactacctgcaattgctttaaggattcatcttcttccatgtagtttttcagtgagtgtcctactccactggaggc

SEQ ID NO: 160585 - DNA, 1000 bp, Homo Sapiens
ttttttttttttttttttttttttctttttttttagtttttatttttatttattttccagtggccagttactagaaatgtttttattttttgcatgttataaatattttctctgtggtttgaactttcaaaaccgtgagtgattttccactctctgttatagagtgtttttcttttctccaaagttaaaaaagttgtcccttgaaggcacagaaaataaacttttgaaatcaatgaaaacaatggaagcgctgaatccagtaaaccaaagataacacaaagaccaggctacagaggcaagaggtgtctggtgagagggagtggctgagtgaggtgacactgtttcctgtggaccccagttttatctttcccatcaattagtataatgggaaaattcttgtagtgttcgatgatgtcttctactgaatcaaacttctcatctcctctgagtcctgtccccagggcaaactgctgattcctctccaggaagcggatttttacattgtagactttgttctcataaaacacagccaaaacatagggctcttccttggattttgtggaacaatctcggaccaagaaactaccatccttgttctccttcatgaatgcctcttccactgcctggcggctgtattctccaatgtaccattcattgtgctggacatcctttctatcagaccttttggggaaaggtggtctccagcttgtgtatttatagggcagtatattttcgtgagggctgcagctggctggaggctggcatctctgaggagaacagggctgcatgcctcctctatgatctctgttttgcacactgtggttgcttgtcgtgaatgaagaactgctaatggcaagtggaatctcttgagtattttggttttctaacagatgagttgattcaggcttcctctggttatgaggaactttttctgcttcaaggacctcacttaagtcccttaagcttatctgactgggcattccctggacttctggaaagg

SEQ ID NO: 160586 - DNA, 1000 bp, Homo Sapiens
tttttttttttttttttttttttttttttttttgacagtttaactctttattctccttcacagcccagcagaccccaaggcgggcagagggtgcaggccgtccccaggatgctggtcatgggccagggtcatccttgcacctgcggcagtaggggcagcagccatgctgaagcaccagcaactcatagtcctcagaatggaacatctggaagcaggaggggcacatggtaatggaggcgtcaggcagcagtgagcggaagtattgccacctcaggggtgggggccatcgcttgatgaggacatcccggcggctcatggagcgcagcaccagccggctcaccaccactggcacgaactctgagccaccttgctcaaagctcagcttagctgtgaacgggtcctcatctccgatggagtccttggtctccactagccgcagaatctgggagctgttgtttgcaatctctagctgtctgtcatcccgcttgggtctcagcacctccaggtcgatgagggagatggcttcttcatcagtgatcccttcctccaggtagaactcaaccaggtgtagcacgtcgtaggaagaggcggagaagatgaagggctggcggcagttgatgcagacgttgcccaggttgttgagcagcgggttgttggtggagcagcggtagcacaagggcaccaactcctcactgtcgtggaagggcttggcgcggatggtcagggtacccagctcaatggacttttggaatctggcagggatgtacaggccacgcagcttgtcataggcgtgccgggccagcctgtaggcaccgagggccttgctctgcttggccaaggtgaagagtattttcactttagagatgcccgagggggtgtccttgggcaggctgtgcagcaggaacctggagatgttgaaaagagtttcaggacgatggacactgaacggatcttccgtgtggcgatggatggcatggtaaccatggtacagctctgccaa

SEQ ID NO: 160587 - DNA, 1000 bp, Homo Sapiens
tcttaagttacacaaactgataatttactggtttcttttttactctaataggagcaaattaccacatacttgaacaaagttaaaatagttactatttctttataataaatttgatgtataatttacttgtgctttttgcaccaatttataaatacagtatatgcaatacacaaccaagactgacactgacagtaataattaaattcaaaagagcaaatacttaccatacaaaataaacagcaaatacaccttttatgaaaaccagagccttctggactttggggccagattctctggaaaccatgtcaagtgtgagcactggaatctcaagccagctactggatttttttttccccttaaggtggcataaggttcaggagaaccaaaactggcaataaatagttggacgattccactgcagttctttcaggcctttaggatttacatgttgtaccttcacaatgactctcatcaatgatcttgcctcaaaacaaatttgagtacagctacttctaacaggtttccgcacatcttagggcggctctcaaagaaaccttggtttaggttcttggtttaagaagtttaagtactaagcaacaatctgtttcagcaccttttgaccacaacaaaagcaaagaagagtcctacataaataagaacaaagtttataaagtgcttatgagattacaaacatttcaaattagagcgatgcaaataaatgtccgtttcaccatcacaggtgaatgcagaataaacaggccatgtttctgtcaagatctgacatgcctttcaaatcagtagtttggtccagcacagtttggaaaataaaattaaaaaaaaaacaacaacgtcatcattaatgaatgaaatacataaataccttagatccatcataatccattctttctagaaatgtgagattcaaaaaaagcaccaatttcaaaaggtctgctagcacactcttccgggagtaggcctgcctgcatgattcacatttgta

SEQ ID NO: 160588 - DNA, 1000 bp, Homo Sapiens
tttttttttttttttttttttttttttttttttttttttttttttagagagaattctttttattacgagtgaacagatgaactaaggtaagcgggtctcagccttccgctggtgcagcatctccacgcagggcctcagccccgtcctggccttgcctgaggactgcaccatgggtgttccttgggcatggaggaggcagcaggaaggggtgacaggagcaggagcaggtgcagggcacctcacaccacaggcctcccccacctctgagctgccaacagccaagactcctggcgaggccgggagaggaggggtgagagggaaggagggtctctgtgaaagcaagccccacccccagagcagagcagagacccaggtctgcaaatcacaccctccccccacgagttcctcctttgaggccagcagcacccgagggagggcaggggctgcacggagaccagagaaaggaaaaccccacagaagaaaactcaaagcatcagtcccatgcgtgtctgctgaacgagtgaatgggcccaaaggctcttctctacaaacggcacgcatccatccgacagggggccacaggacacggccggggccgtctgcgtctgtgcctgtgcagcccacaccagtgcagcccggggccctctcagacctcaccacacgcgtgcccagcacatgtgtgcacacgcagatgcaggagagaacacacaccaccgtctctttgcacacgtgtgcccctgtccggcccggggggctcatctctccttcacgtggttctgtgctcccgggcccccgctgccggccccatccccactgcccccactgtggaccccgccggccccgctgcatagcacctcggtgaggtcgtccatgatggcggtctctttggggtccagcaggttgaactcccgagcaaagaggatgaagtggacgtagagcgtgttcaagtgtccgtgcagctccagggccagcgtctccttgaagtgggcccagtagatgt

SEQ ID NO: 160589 - DNA, 1000 bp, Homo Sapiens
ttttttttttttttggttggaataaatttatttcatctgtctgtaaacaaggtgtttaatagttatggcatttttttaaatgcatattaaatcagatgagttagactgtatcccagatgtaacaaagtgcagggaaagaaatggacaaatcagcaacaagatttgtttttaaatctgtacattatccacaaggcccaaacaatagaagcaaatactagaatgtccctaaagtagtgccattcgaaagaaacccttaataggtcagttaaaatccatctcacaatagcaacagttcattttaacaatagtatggcacagaatacatatgaaaaaaattcatcacaagacagccaagtccacaataatgcaacttcatataaaaactcaagctgcaaataaaaattggtcctatgaagaacaaactggacacactccagatggttatgttgggatacctaatgtccataatggcagccttttacaattttactaaagagtagagctggtgtgcaaagaaaaaggaagaaaaatctgagctattgcaatgatggaatgtccctggggattcaatcagtatggttactgtaaggtcatgggaggaagtgctttttgctcttgttttgccattgcactcttcatatgtcctgtagacactatgaataaaggtttgtctctgctcaagtgcaacaacaatactaaaagcaaactactgcagctctcaatagctcatcaacaaaagggattttaattggttaaaaaaaaacaggcactgcataaaaaaagatggaagcaaaccaaatgcctatgtgcgaagggagggggggcgggaaaaagagaagagtgaaggaatgatgcatgcactttttcctcccaaccatgcgctacaaaaggaagactaaatgagccaagtaaatgctcaaagtgctgaaaagacactgatcagagattgtacaaccggcaccttgcttaatattaacttattttagtaatcaatatccca

SEQ ID NO: 160590 - DNA, 1000 bp, Homo Sapiens
ttttttttttttttttttttttacagactactgagcatttattaaaataacaacaatgagagaacaaagaggagagagggtaggggggctcatctccagactcccccccggctcctcatgctactcggggcagggtgcccacttttcttccgtgcgggaggtttttcagtcttgggggctgtagcaaggcggcgagggacagcctgggagggaatctctttccgggggatctcacccaagcgggagtctgtgttccttctggggacattatcccctcggccatcagtcccgctgtgttccagcctcttcaggtagagcaggagatcctcagcaggcagagccccccagccccgagcctggtagagtcgcaacagttgagacacctccatcagctgccttgggaatgtaagcccatctccacctctctctggggaaccactgctgggaccactgccttgtgaatgggaggagggaggctcagggacccggaaaagactggatgccatggctaagggaactttggttttgtggacaggcggtggaatacgtggcacttgaggggcttcctcccaagatgggacagtcagaggaccagacttagggggcaacaggtcgacagaagggttctcattgttctggggcactgtctccagcaactggtgcaaaaaattcttgaggccctccagctgagcaggcggcagcccttgctttaggaggccctccccgtcaggtccaggatcttcctcagggaatggcctttctgccctatgatcgggatggaaggccccaagtgcagagaaggccccagctgtggatgaagtgaggtctggtttgggctccaggggctggaaagaatgctggctctgaaaagaggggcccaacaggaggctaagatctgaggaggaactgcaaagaacaggaggcgctccaggtagctcgtcccttgcttcccggctctgctgcaatacaggcttcagggccacggccatgggaggcatag

SEQ ID NO: 160591 - DNA, 1000 bp, Homo Sapiens
ttttttttttttttttggggtttaaaaactctgttggggcccctgctctgcagggcccggacaatcattccagcagatctggggacccgtcccagtgcacccaggtgggcagactgccaggggctgaagtctgtatctggtgtcctcctggggtcaattcctgaagtcctcttctccagcctcaaatgtggtgtccacaatctcatcgatgacggctgcctgggagcggaacttctgctgctcctgctccacgcttgccaccagctgcaggtaatggaacaggagctcctgctgcttctcagtcatggtcccaaactttttctcgatgagccgcttcagcatggtgccttcactcgccacctctttgggctctgcagctctgagctccgtcagtgagtcttccagcagcttctcttggatccgggcggccctctcctgcttcgctttctcaaggcctttgaacagcgccgtctggaagctatccaccaggacagtaatcaccaggttgaggaagatgaagtactggatgatgatgtaaattatgaggatgggaatgatgtaccaggcgccctgggcacggctgtccatgtagatgagggaccagtcatccagcgtgagcaaggtgaagagggtgaagatggtggtgaagatgttctggaagcgcttggggtcagatttgcggaacagtgcccggaggaccgcggagaagaggaagaggcaggtaaacatgaggatgaggatggctgcgatggacggcaaggactggcccagggtccctgtcacttcctggacgctggtcaggaagctgagcctccgcaggacccggattgccctcagggcccgcaagctcttgaagaccttgaggatccggaagaggctttggtggtagatggcgaaggagtgggtctgcatcagcaagaagtccagcacggccatggccataatgaagaagtccaaattgttccagaagtcaaagaagtacgagaggcccagggcgatg

SEQ ID NO: 160592 - DNA, 1000 bp, Homo Sapiens
ttttttttttttttttggggttttaccagttttatttctagactttcatgtttgtctttttgtcttctgctggaaacatgccggttacatgttggtgctgggaagcgccgcggtgcaaccagaaatgcacagacccagccgcccgccgcccagaccctcagacttgcgcgtcacaggacagactccgctgtgccccgtgcacttgccaccagcctttggcctctcgatacacacaacatccaggacttgtgcccttgccccatcacgacagacaaagcgtccctcaaggcccccgcgtggttcagacagacgccgcagccaggatggttgaggtaagcgtgagccgtgttctggaggggtggggcggggtgggcctgtgcccgagatggcctccgagcacaggatgaccctgccagggcagggccccaaccacgtgggcccgcagcggggtgcaaattcttttggttcggcagcttgctaggtgaccggggcacacagcactgtgagctggcttcattgagatttggagtctctttaaattagcattatggtgtaattaacaaaacaataacaaacagaacactagtacataacagattaaacatacccaaaacttgaacaaattccagaagctattccaatcatcccgaatgagagtcctacaggtacaacgccgtggtggcacgtaagacacacttgttataataataataataataattatgcaacttccatagctacacgcaaagaataacacagctgtaaaaactactatgatgctacgcccccgatcagatgaagtgcccagcatcacaggcgcagggaagagaagagggacacagcctggtctctggggacaccggcgcggttctcacgcacgcggcctcggggccggcccccgccagcctgtgtgggatcgcgcccgcgtgtctgcccgccaaagcaggcagaacctgcccgctgggtccaccatggctaagtgaagcatgaggtattgtga

SEQ ID NO: 160593 - DNA, 1000 bp, Homo Sapiens
gtactatattttattagtttttatttaggaaatggaactttcactttatcccaatattttcttcagaggtagactttgtttttatttcaatgagttcttccactcgagctagaacactttcaatcaaatcaaatgtgaaaagagctgaatgcaggaccttaagctgcatttcaggaggcatattagggatctcttctccacttacagttatagaacaaagatctttagatttctgggcctcttggctatttttaatttctgcttcataatgtgcttttgacatattaagtcctatatgaagtggctttaagaaattattctcaatatttccaagttctgtccataatccagtttgattgtcattttcattatctttgataaccaaatacctcaataaatttaatgaagccataatcctatctgagttttgcagtaaatctgtttctgcaccctctgggagaaaaagtaccaaatcaagaagggaaatcaactgtggtcctgtaaaccatttgttgttacgtgttctctttaatgacatgtcaatttgatttttgatattttgaataataaaagcctccacacctgagtgattacttgtattcaataagcacctaaataatgtatatttgccttgtgaatccaacttgttaatatacagctgaagcatagctaaactctttttcctcagtgtctcaatggggcaaagtgtcattactttcactaagccctgaggtacagtaagaaaactcttgatttctaagtactggtaaagtagactattgtcttctattctcaataaactattctccagcagctccaatcctttggagataacagactcttctgttctttgcaaaaagacttcaatgtgccccatattaaactgcaaaaggtacaatgggcttaagaccattggaagctgatcaatatggatgccctgtacaaatactagatatgccagagaagccattgagtctgctaactgtttattttcttcttc

SEQ ID NO: 160594 - DNA, 1000 bp, Homo Sapiens
ttttttttttttttttttttttttttttttttttttttttttttttttttttttttttttttttttttttttagggaaatgtttttaaaaatcaatatccatttgacaaaacattcatataaagagaaatcttacaggtaagatgtcatggaaagagaaacattatataaacattaaacagggaggattcattcaaacatattttgtagccactcttatatttagcaaaataggtaaaattattgcaaaaggtttaaaaggcaaacttaccctttctgtaagaattacaattggtgaaaatgcagaattcatgaaatcataaacatcaatttggaataagtatttcagaatctgaaactcagaagcatcttctttctgagaaatataattttgagaagacaaagagttatcagttgaaaccatctgactatttagcagggtattttccacagatctgtctatctccaccagagcaggcccttcggtgtctactgatggtttcgaattttcatcactatctttagaagatgagggttcaaaatatacttcttcgtgaattctcgtaggtaactctatgttagagaccatatctgacagactgtatgaacttttgaatatcataacttttgtattatctgtgggataattatcaatggaaaattctccagtttcttcattttcaattacattattttgatccagtatctgtttgggaaatggcaattctgtttcctttggaatgttctggaagttccaagggttgtcaaaattatacaagaactttttcaaatatggtatagtatcagattcgtctgttttttctgagactggtttcttgtctatttgatcttctgtttctataatttttatcgtttctatttcttgttctttttcagggtctaattcacttgttagaggatgttcatgttcatctgccccaccatcttcttcatttttcctgtcatctaacataattttatcttccttggcatatgcaaag

SEQ ID NO: 160595 - DNA, 972 bp, Homo Sapiens
ttttttttttttttttttttttgtcaagcacagagcctttattttacattttctcaaagaggacattgtttaagtgagcagctaacagaatttataagagagaaagtgacagcaaaggtaactggctcaagtccctctgtgtacggtacgccatgtacatttcatgtctgagcaccttgtgtgtgtggtttaagtgaaggtaaggcagtgtagattgtgcgaacaagagatctgtgttctgtcatcaggaaaggctactacatgcatcacacaaaatgcacaacctgaaatgcttcaatctgcaaccgaagtttcctcaagcaagaattcgcatgaacactgacgaacacatacagagcaacttgggcagagagaatggatgatgccatgaggcagtgaggttagcacactgatcaagagccccaaaagcaggagccgtcccagtggcagagcaggctaggagggtgagcagcagccatctccagccaccttgagttccttcctgccttcactctaagttgagcagctccacgtcaaagatgagggtggcattgggagggatgacaccggggtggcccgtggctccatatgccacatcaggggtgcaggtcagcttcgccctctgccccaagctcatctagcagggatgggggcagatggggagaggagaaagaggacccagctgggctgcaccctcttcaaaacctttgatgacttcctgtttgccaattctgaacttgaaaggtttgtttctgtctctggatgaatcaaacttcttcccattttggagcattcctgtgtagtgcaccacacacgtttggcccttcttggggaatgtccttccgtctccgggggagatggtctcgatctccacgcccatagcggtcccacaggccccgcctctggggggtccctgctgctgcccgaccccggctcggctccggccccagccccgccgtcgctccggctcgc

SEQ ID NO: 160596 - DNA, 714 bp, Homo Sapiens
gggaaaggagaaggtggtggggtatgctggagctgaggtctctgagtctctcagggcccacaaacacacaggcttactccttgggcttttaagtgtttttttgtttgtttttgttttttgttttttttttggaacagtctggtccctgatgggggcctctccccctgcccctccccagtctggttacagctcagttcgtcgctctattttgagcagctccacctcgaacaccagggttgcaccgcctggaatctttgggggagctccccgctctccataccctagctcggatgggatcaccagcttgcgcttttccccctcacacatccccagcagcccctggtcccagcccttgatgacctggcctgtgccaagggagaagacaaagggctggttctggggcaggctgctgtcaaactctgtcccatcttccagcttccccgtgtagtgcatgtgcaggacatcccctttgcgcgatttgatgggacagtggtccacccgcttcttgaccccgatctgcagcttccttttgccctcggcccccgtggccgtggccacggcgctcaggcagatggacagtactgtcaggacccggaaccagctcagcctcatgtctcagtccagtgagaagggggcttggccgaggaccccagcagcggggggagggggtcaggggaggccacagcagccagggacccgcccctttgctcaccc

SEQ ID NO: 160597 - DNA, 1000 bp, Homo Sapiens
tttttttttaaaaaagcaattcaaacctaattcttccctttcttcctcctcccacccaacccgcctgcttctcaagatgagccttggcaacatagtgagatgctgtctttttcttttcttttttttttaaaaagcaattcaaacctaattcttccctttcttcctcctcccacccaacccgcctgcttctcagtggcaacaaactcaagttgctcatcatgctaccttgcacatatctacaagacaccatttacttcctaactgccttgacatctgcatgctacggtgctcagctgtttgacatcaacataaatatattctaaatccactgtaactagactttttgtactttcatactctgaagaaagtcttaataaatactttattattaagcataattattcatctgttggtgactgagaaatgaaaaccacaccttcgaagatttcttttaaaaaatgaaattcctttaactacaacaacgacaacaaagggacaagtacacagaaccaggcacttctgggaaacttgtcttctcatccctttgccctcccttcctccccctttagtaaagctggttgggcacatttgctaggatctgtgggtttcatcacttcaagccttactgcttaaaaaaatgaggtaagaaatttctatcggaaaagtgaaactgacacataaaccaaaccaaggtcttccctggctgctgcggcagccgttattgctctaagttggagtgttctgtttgcttttattatgtattcggagtccttattgccattctggctggcctcgtcgttggccaaggagaaatgatggggaaggagctcggtcgcctgctcccagctgctcagtcccaactttctgcccgcatgcggcccgtcctacccttgctgggagccagctctggttctggggcccccagggcggctctaacagctgggagaggtggtgatggggctgtgcaggtagggcaggctgctgggggccgagtgcacgc

SEQ ID NO: 160598 - DNA, 1000 bp, Homo Sapiens
tttttttttttttttttttttttttttagtcatcatcccctccctgtgtatttctttaccattctcaaaatgccaccatctcattgaacctccatatcatcccattttgcagatagggaaactgaggccctgtgatgtcacacaggggtcagcagcagttccagactagaagctacggagcacaaacatctcagccttgggtgtcaggctcaaaacccagctccttgtccgggaggaggtccccggctccatctggcagcccatagtacaggtcttcctcttccttctcaggttcctccccacctgtgtccgaagcctccttctcctccacctttgtccttgggtaccgctgccagttgttgggcagggctatttcccactgctgcccctcttggggctcatcctccaacgttggggcatcaatcagggcaaagtcttggaagcggtccagcgggcacctgcagccctgaggttcctgttgtggggaacaagcttcctccctgtcatgtggagatgcattggggctgctgccttcactggagtccatgtccaggtcatcttggaaggaagccaagggggcagggccctggggacaggccagggggccgggccagctctgagttaggcgtctttccccttcactctcgtctgagcccttgtggatgaccacggcagcctccatccaggcctgaacgtcgccagggccaccttctcctccatcactggttcccagcttcggctgccccatctcaggggccagcaaggagcggtggtcctcactgtagctcatgactttcatctggatgtggctgaagtcaggcaggctctggtcataggcggcttcctcccacagccttacatagggcggctggggactggggctcttcatctcggcagcaagcccattctccagcaggcccatggcctttggggagaggatgccttgaaagtcagagtcagcagggacgaaggtgatcttggggtagcactggcacatgct

SEQ ID NO: 160599 - DNA, 1000 bp, Homo Sapiens
tttttttttttttttgggtttttactattttgggtttttattttgttgatgttggttaaatcttatctctttttttatacacaatacttcatgtacctatgaaataagacaggtagggaatatgtccagtgcaaacagaggactcacacctgtgcatagacagcaccatccattgattgtcgctgcagtccatggcgttaccaaggctgcgccacccacgtgctgccccaggaggcgctaccaggttctttgggccacaggcctctcctccactgcatgtggcggcagggcagggaggtcgcagggctccatgattgtgggacagctttgagggcacatggggcagaggccctcgaaggtcccctcctcagtaggggatgtcattctgatagtactggatcatgtcgtaggtccggctcctgttgctgaggaagcagctctggatgaccttcatgatgaaatttgcagcctcgcgctcagtcatgttggggctaaacctgtgcttcaagagcttgattgtctggccgcgaaaacagggcaggcccgtgtccaacatgagagtgaccagggagacgaccgcgtccatgtagggccgcacagccaggtagcctcggacacacatctccatgaaccacttgaagggtgtggcctccatcttgccccccatgatcatcaccatctcatccgtcagcttgatgtcgggttcccagccgagattgccgcccggcgagctttcaaacatgaagccaaagtcgatgtggatgatatggcccttcttgtccagcataatgttgccgttgtgtctgtccttgatctgcagcaggaacagcaggaggctgtaggcggccatgcttcggatgaagttgtagcgggcctgctggaaggccagggtggactcatccccgtactggcgtgtgaagtagtcgtacatgccgaagtctgtctggcggcccagctggtcccgggaggtgcagtcggggatgcactcgatcaccccgca

SEQ ID NO: 160600 - DNA, 1000 bp, Homo Sapiens
tttttttttttttttttttttttttttttttttttttttcaaatgtcaaaggtcctgtttattccggcaaaccggaaagaaaaagtgtaaataaaaaaagaaacagatccatgcactcaactcctgggggtgggggtgggggtgggagtgagggatgaggaatgggtgggaagcaaggagggaggggtggaaggacagagagagagagacagagagaggcagagacggaaagaactggagaaccagagccataaaaagaaaaagacatccataaaaaggcagaaagaaagaagtggtgtattaaaagcagagatcaataaaggagaagaggggaaattgaaaaaatagacagaaatacataggcagagaacaaaagcccagcaaaaaggcggggagaaagggcgtgacagagacagagagatcacccttgagggacacaggcagaatgaaaagggcccccagcccccggaggccccccaggcagcagcccgagccacagcattggctcaggggtccccagaggtgctgatgacgtgaaacagggtgacattgtagagcacctggtggccgttgttccaggtatagagggcgcgctcccgggggttgtaatccagcatcgagatgtgggaatactggttgtggaagggcacgtccgtgtactcgtaactggacgtgttggtaaaataggcgaagtagaccttggccccagccaggtgggagttggtcacgtagagcacaccgcagatcatgaaggcctcgccagcgctgcgcttggggtagccggtgtcccaggaccgcatgacctcgagggtgtgcgggtccagccggctgaccacgatgttgcccgcgttctggttggtggtgtacacagcccagagcccgctctcgtccaccatgaagtccatgtcggagaagccgccccaggagtaggggaaggtgttgttgtaaccggcgcccgggaggctcctctgcaccagcacagagcgcgagcggaagtggt

SEQ ID NO: 160601 - DNA, 677 bp, Homo Sapiens
ggggtggacataatcactacttttatttgtcctcgcactgaggatcatactccggtctctcacatggatccctgaggagccagtccacggagcacagccgagaggcagtccaggcttagtcagagccacagaccctgggtgaggctcctgctcttcggctgcagagagctgcctcctggcctctgaagccgatccacctgggccaccctgcggtcacaactccagaagacaggaggcaggaagaggaagtctctactctccttatccacagcgttgtctgtgctgctggcctgtcccttggtaaggtggggtgcgcggtggtaagaggtcccgtttcactgcgtggcgtagcagctgaaacccgtttgtgccttgcccaggggctctttccctgagttctccgagagcctcagtggctgagtggttcacatgtctggcttgagacgatcctggaaacagcagggccacaaggagaaggctggtgacggacgggagcaatcgttgcctcatgtctgccaagagcactgcaagccagaaagcacccagggtgggtgggcaggcagcggggctcctttgatggagtgaggctgggtgtgtgggcccggagcgtgggaagagctgtgctccaggatgacttctcattctcaaaggacaatgtggacacgctactatcccac

SEQ ID NO: 160602 - DNA, 1000 bp, Homo Sapiens
tttttttttttttttttttttttttttttccatctctacattttttttactcaatcgaccctgaatgctacagcattatccagggccgcagaaaacacacataatactttattcctgataaacaattcgatgtccttaagtccgccaatatcaccgtacattctgtgcaatcaagaaatttactcagctgggcacagtggctcacacctgtaattccagcactttgggaggccaaggcgggtggatcacctgaggtcaggcattcgagaacagcctggcccacatggcgaaaccccatctctactaaaaatacaaaaattagcccggtatggaggcatgtgcctgtaatcccagctacttgggaggctgaggcaggagaatggattgaacccaggaggcagaggttgcagtgagccaagattgcaccattgcactccagcctgggcaacagaacaagactccatcaaaaaaaaaaaaaaaaaaaaaagaaagaaagaagaaaagaaaattagccaggtgtggttgcatgcacctgtagtcccagcactttgggaggccaaggcaggaggatcaatcaaggctaggagtttgagactgcagaaagaaaccctgtctctaaaaaaaaggtccaggtaatttcagggtccagctccaccacaagcgcagctccaggggctgttgagttttgcctttatcattccaagtagtccctgctccagaccaagtcccaccatctggcagtcaggtcagtccaaccacagtcatatcagggcccttccaggaattctcgacgcaaactggaggccgatggcgcgggtcttttcgtggacggcggcagcacggtcctcggcttgcgtccgtagttgctcaggcttctggttcagggctgggcggcggcgcccctgcggcgggcggcccgcaccaggctctgctgcagcacggggtagaggcgctggcagccctcgaggcccaggcgtacggcctccgcccagctctctgt

SEQ ID NO: 160603 - DNA, 1000 bp, Homo Sapiens
tacccacagcgcggtggcagccgctgctcaatgaggagacgatcacaccatttcggagataagcagtgccattgtgtctggaggagaagagagaattaaaaataaaatagaattcaacaaaaaatatatatagaaaaaaaagaaaaaaaaaaacgaaacagaaacacaggtgggaaggaactgactttggttggtggcctcactccccggccgagggctacccacgcaggacagtcgcctcgctccggatgccatggacacacacacctccacggcactattcccttttgcacaagcaaacacttacagagagcggctctcaattaaaggcttgtgggggagggtcggggggtctgttcaaggcaaagtcagtgccagcgagggggtgggccggcctcgcccgcctccagcccacgcaggcctgccctggcctcctgggagcgggcggcgatggctggggtgtggggaaagactcccggcgggcaggacatcacgaacgtcacgttcttggggacagaaaaccagtcacggcggcagcaacgatgtcctgtgtatactgtgtagacatttggcggagagaagggcctctgccccgcatgtggggatgcagggcttgggtccagccggcacttgctcgtaacaaggcgtgtgctgagcggacgtcctgtgaggggtggtgggtggcgggacgtctgtccgactggccgtaaggcagacaggctctgcaatcctcagctgcccgtcaggcctgccccgggcatagcatgcaggagggccaggccctgaggcatcccctggccgctgatcccacctccaccaccgcccctaacactatggaaagtcaatgttttgccagaaaatcaaagtcagaagccacctaggtgcgctcagaaaagattttcttcaaatattgacaatagatcactctggaaattcatgtcaatggtagctgccatggcttcccggcgtcttcgctcctgctcccgcttccgggccaact

SEQ ID NO: 160604 - DNA, 1000 bp, Homo Sapiens
ttttttttttttttttttttaaagtcactaagaatcatttattgagcacctgctgtatattcagcattgtgggaggagctgtgaaagacacagaacagtacagggtgtggtccctgccctcgagaggtttacagtctaggtggagaaacgggaaccaggacacatggggagccgagagaaaacagtccaggccagtatgttacaggagctggaaggtgtttggggtcagaccccaatactccaagtacactaagcacttcagtgcctccaggggctcaacgttagtgccaggaaagacaactactcccagccccatatgagcccacgtggcatgccctgtccatagcctctactgccaccatcttaaaatgtctgactccttgttccgctgctaatcaaagtgcaatgaactggggagggatggggtggatgaggaaggtcgctggacgatttgaggggccagtgtctccctcctagaaagatctactcccccatcatatacccctaacacagagataaccccactcaagggggcctgtgccaccacatgggaccctcacccccacagctagaggagggggcggtcgctgcttgagctgcctgaggtagaactagggtgcccttcttcttgtgtgtcccttccccttccagtccattgagctgggggtgggggtgggacaggcacctcagagccacctggagctgagagggtactgaagggaaaggacaagggggagggacagcagcagaggggaattgcagagcccagctggagaagaagggtagctggggctcctcaaaaggtacaggggagccaaagagggaaaaggctcaacactgagacgggctccccagtgcaggtcagaggggccatgagggcaggcggggtggtctgctccaggaccccaccttccccctgccttcacaagacagaggggggtatcaagagccaggagggtaccaggtccccagctcagccctaggctgtgctcacttcagg

SEQ ID NO: 160605 - DNA, 1000 bp, Homo Sapiens
ttttttttttttttttcacacttcacaataaaatttattttgctttggataccatacttatttttcacaaacattctacttatattaacctataattggcttattcatgctattttaatataaattaataaatgttgtaaatgtatgtatgtaatgtaaataaatgttgtaaaggtaataaattaaaacatttcttagtttcaatctcaaatgccataaataccaacaaatattaacccaaataaacaaaaactctttggaatcctccatcatttgtaaggcgtctcaagatatcatgaaaccaggaagtttgaagccactggtgtccccactgaacttgaatactgaggtagatctggtccattactccttggctcagccaggacctcaaatttcagccacactcagggactgagtactgactccttgccaactgcagggacacctgagccaaactacatccacgtgcatccatgttcttcattcatcttcatcccaggtccaggcctgtggatgtgcgctctggaaatcctggggctgggtggaaatgagccatcatctcccaggtccccttagctgttatggtgggacttagccacccttacaaccttggtccctcccagctctctggttccacttcctctatctctgatctgcatatctggttccctctcctctctggtggtcctgtggattcctctctcctcttacatcctggtgaaccctgtaggcctcattccaagtccatatcttctggtgccaactggaatactgggcttaatgtggtcaccctgatgttaaacagcaggtttgctgcccatcaacttctcacactttcttcttggctgggagctgtgtaacaactagttccctatgcctggatcccatcccatagttacaagcaaaggaactactaaaaacacagcctagtgaggaggagaaaactggggctgaggtctgtagtgggtgtgaaagaggcagctggaagatgttctcttgt

SEQ ID NO: 160606 - DNA, 1000 bp, Homo Sapiens
tttttttttttttttttttttttttttttttttttttttttttttttttttttttttttttcagggccagcagcatccgcacctttatccgcactgtaggctgggctgggcagagcgcgcctggccccggggacaccactgtatcactataaaacccagaggaaacaaggaacaagtgcaagtccggggagagggaccactgtcacgcagagaggtcactgttatcaaaacgctcctggtcgtacacttcagccaccaccttgcggccagcaaaccagcggccattgagggcctggatggccttatgagtctcagaggctatggaaaactccacaaagatcttgacaatgatttctgcatcctcctcctcgccttgtttctcttggtagatgatgacgcggttcacggccccgaacttgccacactcctctgtcacctccccttccaggtcatcatcgatgtccttggggtccaccatgttgcgcagaaccatcactgtagactcctgcttgcggagcagcttctgcatcaccatgtgtcgggcgctactgcccgagatgctcatgtgctcctgctcgctcagcatctctggccgctctgactcgggaaacagctcctcttcttccttctccttcttgggctccaggagacccagcgttggagggctggccaggatggggttcaccactcccaccgaggggatggtgaccgggataggaggacgggctggggtcacacctgtgatgactccaggtgcctgggcagccatgacagcctggggcaaagtgcccaggggctgggccagggtcagtgctggggacaccagtccaggtgtgcccagggtacccagcaccgctgctccggccactgcttcctgagctgtgatcttggcagtggctgcagcagctgccacagcagcggcaggtgggaggcctccaggcgtggctggtgtgagtaggggcatgggcggtgtgacagccttgcccacccgcaagtactg

SEQ ID NO: 160607 - DNA, 1000 bp, Homo Sapiens
ttttttttttttttttttgttattaaatttataaatttatttaactttccagatcttcttggaataaatgtcaggtagtagaatttgtacaaaccttggtaatgtcttaggtttagatacgaacttaacaggtatatttaattttctgtattccacaatggagctagaagcaggactcatgaaaatagtaactatatgttttgcatgtatccttcaaagtgaaatccttaacaaatttaacagtatatattaggctgctgatgaaacagctaaacctgtctgccaggtggcttcgaaaatggaattaatttttacatggcattgataagttactatttcaatacaaccaggtggtaattgatacccaataatgtttgaggtttgctttaaataaaaaaaactaacaaaacaaacaaaaaaaacagtgtaatatagtactgtgggatccacaataacattttctttagtttcccttaatatcaggttgtcattaggaaagattccacaagttatttaaaccagaaatgaagtaacatgtttcatatctatttcaagggataatttttcatgacccagtataatgcaactagcaaatttaaacatcttggaatttaagatatagaggtcaaattaagggattttataaaccaaatgggagattttaaagtatcaactgacttcttttatatagaatgttttctaataattgtaaaatactgtaactttaaaaatattattcttgtagcctctaatgattgagtgcttaagtgataactagaaatatattttctgtccctgtgcttcagtttgaaaatggaggttccattatctttgttccaaaaatttgggtttttataggtgtgttggggggggttattctccatattgttgacattttaaaatagttttcaaacaaaccgtttatatttactagaagttagagaaagaaaagccaccttaggagcttacaagggagatcattgtgtatttctgctttttt

SEQ ID NO: 160608 - DNA, 1000 bp, Homo Sapiens
ctttcaaacaagacaggctttatttagatcaccaaaaataacattttacagaaagggaaccataacattacacaacaaagtatagctgtaaaatctcaaataagaaaggcaatgctttctttagatcaccaaaaataatgtttcacagagagggaaccgttagaagcaaatgcatagctgcaaattttcttttgccatcaatatcgattccctctaaaatactttgagactactttgtggtttccgagtacaaactaaacctttttggacagagttgctcggcttcatcaaaaaaataaaaccaatttgcaaaaaaaaatttgtttaatgctaacaaataaagagacaatgtggttcttgctaactaactgcaatgtctactgaaatggcctaacctattccacgaatatttcactgtgaacatagttgctttttccttgccatcacagatggcctgcaaagtaacaagtgtcgtgtcagagcactttcaggcacccagggaatcattcctaacagaataactgcagtatgtgggcaactcaaacaacagagccccaaggtgggcattgtgtttgcgctgtgggtaaagacccaccaccttgttagttattcacctggaacccagagcgccaaactagacagagcagttgctcttacagaaccaacaacattttaataaattgcccgggggttcttggtgctgtaatgtgcctcacaggcagcgacataagccgactctgggaagaagtcatcgtggtattctgctaaaaacctcaaaaagagatcaaagtgcttcaataaagccttcagattcttctcagaaaaggacatctttccaaggatttctggaagtttcacaaacaatcgcagcaaatgttgtgccccataaatgtaagagggtggaggcggctggtcacctggggggtaattgtcaggcacaagcttccaggagaggacctcgtttatttcattagttcttctcccttcaaagccagcaaac

SEQ ID NO: 160609 - DNA, 1000 bp, Homo Sapiens
tttttttttttttttttttttttctaagtgcagaaacatgtatttatttccaggatattttcacataacaaaaccccaacgatgcggcgaggggccacacacggcgggggaggggtgggggggggttgggcctgccaggtgagattttgtctgcatcagtgcaggcgagaggctggggaagggggtgcctcttggcagactggccgggggcaggacctgaagaccctgaagcatggccgtgagacccatgggtgctccatcctggctgccgtccatcgagacaccatggccgcctccgggcacccagcggcattccgtaccagcgaggggactggctcacatcctggggagggctccagggcagcaggcgtcctacagcaacagcatcctgggggtgaacgggtggggaggggtggcagcctggggtgtccaaagttgtggtcagcgagtgcaggaaatgatgaaggaaaagtttctttttggcccaaccgttgtgaatggtgctgtgaaaatgtcttgcctgggagaggtgttccagggggagttggggggtgaggggacaagacaattgtggccgctgccggacccctccataaggcacagatttgacgggtcccctctcataaaaggccactccaggctgggcgcggtggctgacacctattatcccagcactttgggaggccaaggcgggtggatcacttgaggtcaggagttcgagaccagcctggccaacatggtgaaaccccatctgtactaaaaatataaaaattagctgggcgtggtggcaggcaactgtaatcccagctatttgggaggctgaggcaggagaactgcttgaacacgggaggcagaggttgcagtgagccgagatcacaccactgcactccagcctgggcgacagagtgaaactcttgtctcaaaagagaaaaaacaaaacaaaacaaaacacaaaggcctctcctgcagggctccggctgctgggaaaccggctctctgc

SEQ ID NO: 160610 - DNA, 1000 bp, Homo Sapiens
ggtcataaatacattttatttcattagaaatgcataattacagtgtttaagagcatttcccctagaaaagtaggtcagcaataccccatcggaaccgagagctggctttgcaaacacctgcctcatgacactggacagagcacacagcaaagggctcccgtctcatgacactggacagagcacacagcaaagggctcctgctactcccctgggattttttttttcaaattttcttttttgttataaacaccatagcaaattaaaaaaagctgtttaaacagaaaaatatcatagttcttgatttcccgcgcatatgcgacgctctccgcaccgtgcctcccctcgtgctccgacaccaacagcaggactcaaacgaaaggggtctccggctgggggcggcggcggctgctctttcagttcataggatgctgttccccgcggaggcagcggccttcagacgcacttcagcagaacacgtgcagccgctgcctgtgccgaggccgtgagagcagggcgcgtgggggccgggccgtaggcggagccggcgaggggctcctggtgccatgggcaccgctcactgaatctggatggccccgtgctcgagctgcatctccggctgtagcgtgggctgcagggcttcggccgtctgtgccccggccgtgtggtcactcactggcgccagctgcacgtactgaacctggatgtcgctgccctggagtggcgacccatccacgcccgccgccgcggggtccgaggaggccacggcgatcagctgtgcaccctgcagcacctgaccgtcctgccccacgtgatggatctggaggttgccctcgctgtcctgcgtgatctggacttgctccccctgcggcacctgggcgatgtggaggtgtcctacttgcacctgtccgtcttctccgatctggtggatctgcacctgctgtgcgttggccagcgcgtagtgcagggcctgcggctgcggctgtggctgcgggagctcgct

SEQ ID NO: 160611 - DNA, 1000 bp, Homo Sapiens
tttttttttttttttttttttttttttttttagccacctacagatttattaaactttatttcctctgagtctctgggcagtcagcagggatgtaaggcgaagtggcagtagctgaaggggcctgagcagagctggtgctgggaggggccggcatggacaggaagaagaggaggagatttaaatatccagggctgaaagccagttaatagttctccttcatctgtttttgtattttgtgtagcatctcctgcatccgccgcagctcctcatctttctctcggataagcttctcagtttctggatctgtccctggtgggacagcagggatggggaagtcggtaccactttcccgagtcagtttgctaaagggagaaaagggttgataaggcgaggaggaccccagcacccgcttagattgagcccagggcctatagaagaacaaaagtagggcttggtctcacccaaggctaggcttgggatctccccctgccagctttgtcctggcttctggtcatacttgcgattccgttccttcaccaccaggcgggtcatgctctggatgcactgtgcccggtagttctcataatgtgtctcccgtgtcacatccttcaggtcctgcatgtgggtacgtaccagcattgtcctcagcttcacaaagtcgcagtgccctgggttttccacttccacgatgccccaggggtagagtcgaccccgaactcgccgccctctggcctctactacagtgttgctgccaattactgcaaatgggatgctttcctttagggcttggtcctgcaatttgaagtcctcatcctcatcagagtcacagtctgggaattgatagatcttgattccaaaatgctcaatctcctcccggattttgcgtttcttgtggtccacttcgggaggtgtcagtgtgtctgccttagccaggataggcacgatgttgacccgctgatgcagggccttcatgaattcaacatccaatggccggagccca

SEQ ID NO: 160612 - DNA, 1000 bp, Homo Sapiens
ttagacttcataacaaaaaacatttattaagtagccacaatctaacaagccctgctcacctgcctcttctccttcctgtctgggagggggctccttggtgtgcagagccacaaggtgggggtccaagttggggagctcccagttcttccccataggccttgctgtcagtcagccatgggtcccttttggtaccagagacttgtgaccctggactcgaacctcttctgcccaagcactcgcctgctggcaactctggctggagggcttggcccagcttctggccccacagccccctgaggtccatgcagccctgtgccagccaggcctacttgagcacgagcatggcctctgtgccatccttggcggtcaagtagaggccatgtgtgaggtagtactcccgccgcaggaaggcatagaagtaatcagagatgagcaggatctgcccaacgttgaaggtcagtgtgatggcataaaagaaattagagttggcacttcctgcataaatccagaggtgccacaggacagggaagagcagggaacagacgatgatgatgcaggtgaggacaaagatgtttctcaggaatctgtagagatggttccacacggggaagaaggccatgtagagcgccacgtcccccactgtcgggtaggacttaaagatggcgatgacagcgatctggataaacatgaagaagatggggtgctcctttagctttatggctaaggggatggtgtagaagaagacgttgatctgaaacacacatacaaagaagaggctgaagtgctcaaacatctctgcaaagaagtaccagaaaagaccaatgtttggagtgagatctggaacagaaagtataaagccatagactgcggggatgaaatcccaagagctgagaaggaagaaggagaggcaaatgattaccactaggcttcccacatacatcatggcatactcccaagaaaagatccagaaggctttgctcttcattttcacaggtatgta

SEQ ID NO: 160613 - DNA, 820 bp, Homo Sapiens
aagagaaaaggcatacaaatttattaaggtacagggctgaggaccacagaatattaccccaaccccccagtggggtacagaagcttatatactctttctcagaggcaaaagaggagatgggtaatgtagacaattctttgaggaacagtaaatgattattagagagaaggaatggaccaaggagacagaaattaacttgtaaatgattctctttggaatctgaatgagatcaagaggccagctttagcttgtggaaaagtccatctaggtatggttgcattctcgtcttcttttctgcagtagataatgaggtaaccgaaggcaattgtgcttcttttgataagaagctttcttggtcatatcaggaaattccagagaaagtccctccttggcaagtttacttagcgctggtgtacttggtgacggccttggtgccctcggacacggcgtgcttggccaactccccgggcagcagcaggcgcacggccgtctggatctccctggaggtgatggtcgagcgcttgttgtaatgcgccaggcgggaagcctcacccgcgatgcgttcgaagatgtcgttgacgaaggagttcatgattcccatggccttagaggagatgccggtgtcggggtggacctgcttcagcaccttgtacacgtatacggagtagctctccttgcggctgcgcttgcgcttcttgccgtccttcttctgcgccttagtcacggctttcttcgagcccttcttgggcgcgggagcggacttcgctggttccggcatgttgaaggcgaactacgagcctgagacgagcagcagatcgag

SEQ ID NO: 160614 - DNA, 1000 bp, Homo Sapiens
ggctttggggcatttatttcatgtcccttttgtacaggccccagggccaggtgtgggggcaggagaccaggcaggaagtagcaataaataacacggacagacagagctcccctccagacagatgagggtaaaggaggttagagaggagccgtaatgagggcgtgggggtgctggcagggaggggcagctgggaaggagggggaggtcaggcccccaggacctcactgtcacctgcctcactcccctcctgccccagcccccgatacttttgggaggaagggagcccacagccagtgggggccagcgagggtcctgaggggggtcagccacgcaggctgcccccagctccttcacttgacccggatttcagcatactcagctagctcctccgtcagcgtgtagctgtccttggtgggccgtttccccaggtccgagtgagaatagctcaggtccagctctgggggctcaccccgaaggcccagcagcctcctctcagatcccaggcgcctctcgctctcctggggcactcagtgagattccagggtagaaacctctttggactcgtacttctctggtgccccagagatgcggaagtcgctgctgaacaggacgggagggttgtcccctgccgagaagctggggctctctgtcacgttctttttcctgcgtgtctgggtaatgtagcagacgatggcaatcaggatggcaaaggcgaccacggcgcccacaggcccgatcttggcccacatcagtcgatgggctccctggaagggcagctccaggctcttggcgccatagaggttcctcgcggtgcagatgacgcggggcggggcctgggcctgcccccgcagcgtgaggatgctggtgagcacgaggccgctgcgctccgagtacacgaactcccgctcgctctcgttcacggtcacattgcgcgatggcagctcaaaggccacggacggctccgggttggacttcaccacgcacaggcactgcaccgtgt

SEQ ID NO: 160615 - DNA, 1000 bp, Homo Sapiens
accagtaaaatagttttatttgattttaaaatagtcatcaatgtgaaaatttctcaaagcttaagagtaacagtctagagccaaggttgggagtgggggccaggcctcacacagagcccagcttgaggcccctgagccccaccctcctttccagagggagggaggagacagctgagggggccctgaatcagtcctctccctcgtccccaaggccagctgtgccaggcccctggagggcaacagctcatgcggaggactggggggggaagcaaacaggtaggaaacggaaatgaggttaacaattacaccatcacccccaaaaaaaaacaaaataacaaaacttgtgactatgaaaggatggaagatgaatactgataaactcctcagctccccagaaaagcccagtctgggctgggttgggctgattggaggaaaggtcttgagacccaactgcatgttacctctgaagaataaatattctaagaaaaagggaaaaccatgaggcaagctgctgcagtcagtcaacgcagctgacaggcctggcatggcccacaacctgaccccatccacacaggaaacagctgtgcgggtctggatagaggagaggtcaagggcttggactggggaccctgagctgccaaggtgtggggactccttgcagtcctggtgcagcaatggcaggaaggccagcaggggccctagttgagcaggttgccctgctcctgggcctgggtcaggctgtccttgcggtgcaggtggtgaacccccatcctcttggggctgcgctgggggcgactggagctggggagtggccaggccctgccctcggtgtgggaagtgcctggcccctcctctgtgcccctgttaatgggcagcaggctctggcgctcttcctcaggactgataggcaggttcagctcttcttcctccctgggaaagccagagtcaggttctgtgggtagcaaaagctcactctcttcgggtcgggcagaaggtgcct

SEQ ID NO: 160616 - DNA, 1000 bp, Homo Sapiens
gttctgatatgaaatttaatgtcttaggctgaaaaacactaaatttccatttttttgtaggtcagaagtggttgcaaactggatttttagactcttcctgttgggggtctcggacatttgctcttttccacagcggccaattcttcagagccacaaagaactgggcgacgcaggccagaggtgtgggagtccagcccttggttcgaatcccgctctccactgtccatggggttctcagcaagccctctggcctctccaagcacacgcagggttcctcaagcaattccaaactccagagaagacatcccaggtaaaatcggatggcagggacctgggacaccgctgtgacgggcagcccctgggctcgagtccacaactcccacgggagggcagggccccatcctgctcacaccggggtccccagccctcgatcctcacgagtcctcgtccaagaacaaactgtgcacacacgggcggtcagtcctggattcaaggtggcccatcggagctcgaactcaacggcctgacctagggacgcctccagtcccacccctaccttttggaggtgggagaatcaccgtgcaggtcactgacccactgaccacagatcaccactctctcccgcccccgtttcttcctcctgagaccactgctgccttcaaacgcaagtaacccaaacctgctcccaaacccatggcaagactgacccggagcctaacccagccctgccccgagcctgaccctgatgctcgagactagaccccagactggacccggtcccaaagtgggacaacaaagaccacagcggggaccacccaggtcccccagagagaaaacccgcgtcggactccagggagctcatggtaaccccttgtcctggggcagcttcattttactttggcaaggaccgcagtgttcgcttttctcattaaacgaggggctttcaaggatgtgttaaagtacgtgagagacgggcctggtgccggctggtcctgttttc

SEQ ID NO: 160617 - DNA, 902 bp, Homo Sapiens
tttcttaaaatgctgatgtttaatgatctacactacatgattaggctcaagatgtgtggattttctaaaacactgatctgagatctcaaacacatgcaaaataggataacaaacaagtccaaagctgctcagccactgaagagtcctcaggagagtagtgctgatgtccacggaatgtgggagcagcacatggacaagcctgtgagtgggtttcactcagtggaatccctccaagcaggtcttgttcaggaggctgaactgagtcatccagggcctggtgctgatggtgaagaagcaggtgaaagtattgttcagctctgtgctttcttggaaatggcagttgtcaatgtcgtcttcaaatttcccacacctagttctccccagcagtagctccattgagaatacagtcttggactccacctgctccttccaggaattcaagatgtgccccagtctgtaggcatagtagtccttgctctgttggttgaatgtgtggacagcaaactccactgtggcagggaggtaacgagccatgacattgtgttcatcacagtccctttgctcgtggaaatgccaggcatagatcagcaggatctgggagcctaagagaagcagcagcagcgcccaggacagacctcccttccacggcaggcccagcatggtgctgactgtaggcaccgctgactttgctcttcccagcccccgtgcccacaggagttaattgagcacagacccagcccttaatcttatctgctcagacagccctgtgggacaaacttgtctcaccccacactggcaacaggcactcctacaggacaggaaggacaggatcctggattaaagggaggcagctctggatgtggagtcactcatctgccatccttctgccctatactctctag

SEQ ID NO: 160618 - DNA, 1000 bp, Homo Sapiens
atatacaaaggcattttattattaaccaaagaaagggacttagagtcatcagaaattacaactttattttttcataatacatatatttattgccatcagagttctgcaattctcataaaattagagtcagatggaattcagggacacgtgcaagttttggaaatggacacagataacagtatagaactgtacacaaaataattacaatttattaaacacactgttttagtacatcctggatggatgagaatgagcaccatattttttatgaatatatatttttctttttttgttttctacagcaccaaagaaattcaaataggaaaaggagagttgagaattgggaatcaagaatcagccctgtttccatcttagccacaccaacttatatctttatgattttcaaagcttttgccatgtgattctgcccccacaaaggcatcggtatttcctaaatggtacctgtatatgcagcgttgttttctataccatccttattcaaaacttgcatgtggcacaaaatgggttggtggcaccaaggtatattttctgttgatttgatatgttctttgtcttaatcttagccaagaaaacaaacaggaccaacttcaaatccgaacttctgattctgatcaccaaagtcattgatcatgacatcaacaataggtacttgatcaatttttggtgtattgatttcaatgacagtcttttcatagccttttctggacgtacaaccatcatacagtgttttgataaaaggattattgtcataggacatctcctcatcatttgatcccaggaagcgaagtgctttgtcataacttcctgatgacacatcataccaggctgctgactgatgacagtggtaggtgaaattttgccgagcagaggcagtcagaagtttcaggaatgtcatttgcaccatattgatggaatttccttcaacatctaagtatgaaagcagttttcccctcttaaattcactaaaccaacttcctgg

SEQ ID NO: 160619 - DNA, 1000 bp, Homo Sapiens
tttttttttttttttcaaattttcagtagttttattgaaaaatgcctcttttgtttcagaaataaataatataaggcagtgaaattcacaatctgcagttaaaatataaaagcagcaattctatgttcatagtcttgcaaatgttttccaactacttttgataactaagaaatattatattctgaaaaaagttcatactaaatatacaacacaaacatgcaattccctctctgcagaataatctgcaatttggtataaatgttagtgtgtctaaaacaaggaggtttaaggcaatatggaactgtatcccgttgatgcactaacttcatctacatggcttaaggtttgtggttgttaaagagatgtatacgagcattctatgccccggcgtataacagagatagaagaggaagataagtaattgcaatggagttgacgtttccctcctttttggttttaggaggggaattatttgaatcgtggtgtaattgaattgaaaataagtatagcaaaagataaactgcccgctcgaaatacacagcagctctgggttccaggacttaactgcttaacctaagagtttcactgaggctgcccgctgtgctaactaaaggcacacggcatgttctctctttgcagcttttgttaacaaagtattttgcaagcatttcaagggcaaaggcaaaaatgtctacagactgcgtgcttggagctaggcttcctgcagaaacaaggttctctacaatcagaaagggtactcctggatgagcaacgctggaagaaacacctcagaaaagacgtacactgctctatctgacctgtaaatgagaatttcaacacctcccccaagcctcgcggcgcggcgcgtgatctctggttcactgcccgggtccgtggggcagggcgcgccgccagcgccggtggggctcaggaggctcctctgcaggctcgtctgcgccgtagtcctcgtattccgctgtccgctcgggctccaccggca

SEQ ID NO: 160620 - DNA, 923 bp, Homo Sapiens
tttttttttttttttttaacatttatttaaaaaactttattttgctttaaaaaaacaattattcaattcatgaagattaaccaaaatacaaaccccatcaaagtttattacaataatctttcataaaatagcattaaaaaaagttaatattttaatgtaaaaatcacaatgtaaaaataaaaactttagttttagtgactaaaataaaagcagataaataatcttcttcacagggaaaaaatacttgagggaaaaaaacaatggtataacatgtgtaaagcaggaaatttaaatatcagcttagttcctcattgccaacatggcatttatatcccagatgagatttcgtaattgatccataatttgtttcagctgttgattcttctgtttgagttttttatttacttcagcaatttctcgcctctcttcactagcaaaacgaggtgggccagcccgatcatcattctttgagccatcttcttccacatatggaataagttgctcgactggaatgggatccatcccaccacagttttcattgcatttgtcatataccaatctcagcttcctgaagagaactgaaagttggcgaagattatcctgtagctttgttaaccggtcttgatatgttccagtgtggtaagtgacaccatttggcagctgcatgttcctcaggagctggaagatctccatggtgcggtacacgatgtcctgcactgtctcctgcccgatgcggcacagcgacgccgtgttgacttcccgggcggcctgctgagcctggggcccggcgaagggcccgggcgccatccccgacgcggccaacggaggggtggacatggcgcggctgcagcttcaggccggaaggggccagacagcaggtgtcaggggtctgcccggaattgggaggctgtggggcctcagcg

SEQ ID NO: 160621 - DNA, 1000 bp, Homo Sapiens
tttttttttttttttttttttttaacaggcagaaactctttaatcaggctttttttccaactctaaaacaaaatcccattttttccttaaatttagttcctcaggaacagagaactttgcaatgatgatctcaactctgcatcatctggtgactcctgattctgcaggactaagacatttcccaagagttctgctgcatcagccagtgaggacaagagttcttcagtgcggttcagctcaaggacacctaggcttccccagcagggggcttgcttgcaggtctgacaaaccacagagcgttgagcagatggcctgggactcccagacctggcagagggttttattagggcccgcctggcctgcaccgtttcatccaagtaccctgacccagcactcatcttccctggcattctctgttatccaccagctcctctgcacacctcagcgtctacttccacgaacttctaaacatcaaaaggtacaatggccaggggtgcggcaggagagtcgggggcagggcagccttcaaatccaaactattgaatccacacgatggaaagaagagaaagatggggaaattctccagagatcatgagatgcatccaggcagtgttctcatgtgagaggatagggaggccaaaaactaaaattgctatcagcccccgccgctgtctggtacgcgaggaaactttccgaggactttacaagcatagttgcaaaatgctagtaggtctgggactcttcaactttctcttctagggccaagtagactcggtgtaacttattttgtaagaaatgggtatgggtgacaagaggggccaccttccacccctgcagcagagtggtaagactccagcgtgggccctgtgcaagggaccagcccagaggccatgagccacagaaactcacagcacctggtggccacaccctgaaatgcaccctttgctccaagcagccagcgccctatcaacctggcatttaccaaacatctcaacagcag

SEQ ID NO: 160622 - DNA, 1000 bp, Homo Sapiens
tttttttttttttttttttgctgtggttgtaggaaccaccctacagcctagaagactttattaagatcttattgcttatgcagttaaagagacactgattgagctacaggtttcctgtacctggtctcaggtcactctgtgcagagcttccccaggctgttgggagctgggagactgctaggcaggggcaggccccagagtgggaagcatggtacctcctaggagcctcagagtgggtagcgggcttcaagacagccctcagggtgaacagagaggtcaggagtgtcggcttaagccagggcccaggggctacattccctgagatgagtcaagcccagccctctctggggtttccagaacaaaggctaggtgtggggagcagcactgtggagagggcagggagcatgtctctaggcattgctggaactggaggagactgtcagagtggtttgggtaatggttgtataatctgtggcaactgggccttcttgcatgaaagtggaagggtgaggatcccttatggaagagtcatgcaccatggctgggctggactagccagctccagtggctctgctgggtgactaaagtaggcaaggaaagccacttgttgcccacaccccactttcatcaactctgttcatgcaggacaaagcagggagctgcccaacaaggatggggttatttctcaggcctaggtattgatgttaccttaattctttagtctggaagaacttggttgggggtgggggatggtaagcatttccttaaccaaacccacacttcacatctcctaggggtaccccttcatccaccaacctccagagaataacctggctgccctcacttctccagcttttctcacaaggcacttgttacagggctgctgatgggagagggaggaaggcctgggagggggatctggtggtggcgcccaatctacagggtccggaatcagggtggaagttgtcagggactagcggctgccatagtacaggcgcat

SEQ ID NO: 160623 - DNA, 1000 bp, Homo Sapiens
tttttttttttttttttaaattaaataaacttttattttggaatgatactagatttacagagaagttgcagagatagtacaaagagttcctgtatacccttcacccagcctaccccaaggtcaacatcttacatcaccatggtacatctgtcaaaaccaagagactgaaattggtatattaactaaaattcagacttttttcagatttccaattttcccactaatgtcctgtttttgttccaagacccaatccaggatgccacattgcactgaagacactctcccttttcaattctattactggtcacctcagtcaactttcccggggaaagagaatgcatgggaaaagctcttgtccttattattgaactggagaaactgaggcttaaaagtgccgagtgaccaagttcccttagagggcagtgagaacaaggcctgccttactctgttccctttccccagggactcttggttttcagaagcccctctggaatgtcctacctggcctaaccccataccagcagtgcagacaaggaggcactcctactacagtgggtccagcccatggagagactcacttcctgccccaacacctcttcccctagaccctgagggccaggacaatgtcttagtgccttccaacttggcagagtgaggccccatgagacagagagaaagggggaagagggaaatacctttatccaaataaatacccatccaaaattatttgtgataggtgaaaaatggccacaagctctttgtggttcccctcatcaagacatgtagtctgtttctcatcccttgaatctgggtaaagccttgtgatttgctctgaccaaaagaacttagcagaagtgacactgtcctagtcccagttccaggccaagaactcaagaagtctttcagcttctactctcactctctttggaatcctgaagccatcatgtgaataagcctgagctagcctgctggagaggccacatggaggagaaccaagcaa

SEQ ID NO: 160624 - DNA, 1000 bp, Homo Sapiens
tttttttttttttttttttttttttttttttttttttttttttttttttactcgccagtttcattattattaaagaatccatttgaatgtcagctcaacacagcctcctataccgaggcattgtgaaccgcatctccccagcttctccaggcttttccaagaatcagggacactgtagcctgttggtctcagtgtatgacagacacggaggaagcacatctttagctgatacttaaacagagaccctgagcgcacatacacccgcgcacacatgcatggagcttcaccttctctgtcattctgcagtgaccaggagagcaagagctcccacctcccttcaaaacactgtgcccatcccgggcactaaggcctctttaaagcacggcacctccacgagggagggccacagccacatacactccacctggcaggtggacagcgtgagcatgtggaccatagcagggacaaggtgccccggccagccccaacgccctctgccgctgacagggacagaagccctctccagctgcgtgtgctgcagaggccatgcgtagcctccagctgcattctattccactccagtgcctgggccagttagcaccagtgtggaagacagtgagctggctccggacaacagggatggaggaaaggtcccacattcacattcctgatacgtggacaaggtgaggggccgcaatcgctctggcagcattttaaagatggggaagtagcagacacccacgcgtgaaggcaggagagccccaactgtggtggaaatggccccagaatggtagggccaagcctagctccagacaccccagagccctggagaagccaagactgagggagaaagcctgagggaggagcgccccagtccccagggaccggcctggtgcagagctgcagctgatgttcccctctgtgcagccccaccctctgcctcgctgagctccctgctgcgagggcctcgggtgcaagggggaggcaggtctctatctca

SEQ ID NO: 160625 - DNA, 602 bp, Homo Sapiens
ttttttttttttttttttttttttttttttttttttttttttttttttttttttttttttttttttttttttttttttttttttttttttttttttttttttttttttttttttttttttttttttactcaaagactttcttttattagtacatgggctgggattgatgggaagggacagatgtagttggcaaccatggttagcatcggatgcccatcccaatggccatgaatgtgccaaaggtgccgccactctgcatcatggttttcccaatgccgcccatcagctctcgaccccgcattccgatcctgagacaggaaaaggtgccgaagagcgccccggccgccatgcccacggcgcaacccatcacgaagcccattttgacacggtcgaagcagcttggctgggactgtccgtagggacccacggccaccggcatctgcgggggataggaaagtgtgggcccaggcgctggcccaagagtcgggcggggacggaagcggtaggctgggaagtgggcccaagggctcaggggaagtaagggaaggaaaatcagtgggtagcccgactccaccaccctcttcgcgttccggccccgcgtc

SEQ ID NO: 160626 - DNA, 1000 bp, Homo Sapiens
tttttttttttttttttttttttttttttttttttcatttttaaaatagatgttttattctgctagttccataaaaacaatgtaaacacaggcgttctgtacatcttgctggtgaattcacataatgcttagttccctgatcctttgacctccttgtcttctccggttattttctgtttggacccctggccacaggagtggagtggggttggggcttaggagagagcaatgtggctttttggtatgatttgttttattgcttgcccgctcagcacgctcctgttactcctaacaaagtttgagatttaagcccttaaacctgtaggtttcaccatcagtttttctttttttttttttttttttttgcataggcattactagggacataaatgggagactggcatagaaagtggtgaggagccgaagccaaggaattgctttaaacacaagatgaaaatactctgttctgtccaaagcatcacctaatggtgtgaggcatctcacttagctgtggagaagtccttggaattagatctcagaaagacagctttaagacagtaaaaccttttggcaatgggctaattgccttaaaagaagagttctacctgaaagaccttgcaggtggagaaattgtcctacaaagattcttggatatgttagtggagataactgacatgggtagctgtgggtcaaccaggaactgtcaacaacctgatctctgcaaaaccaggatggccagttaatggtttattcagttctctgatggtcacaaatgtaattttatttagccttgtggaggttctgcaacaaatgtaattttaaaggaattaggagccagaaagataaatgcaactccttcaactacgtgacagggcagactggtgaatctgggttcccagagtgtggagcaagtgccctgcatcagagaatggcccagggggaacgtgcatgatgctgaaccccgcaggacagaattacttcaatcgcctgctcctgacta

SEQ ID NO: 160627 - DNA, 1000 bp, Homo Sapiens
tttttttccgagaatctttctttttataaaacacagggcgggggcacgcgaaggcagctcgggcgcggcggacggcgcggctcacacgaagatctggatgcggtcgcggatgggctggcggcagatggggcaggcgctgagcgcggagccgcagggggcgcatgcgccgtggccgcactggaacacgaggcggatgtggctgtcgatgcagatggggcaggtgatgcgttcctccatctgccggtagcggctctgcagctcctccaccagctggcgcggcgggccgggggcgggggcggcgctcgccacctcagagccgtctgggcgcagtttcttgctgacgaccacctggcacctgatgcacttcttcatcctgcgcgcgcactcctcacacacggtgcggtgctggcacggcgagaacagcaccagcagcgccagctcggagcacaccaggcactcagcggcctcgggccccggcgcggcgcccacgtgcaggttcgtcacggtgttgggggtcccgagcgtttgcctggggcccggggccgcgcccccgcccgcctgccgctcccggaagcgctgggcgcagccctgaagggccttgagcacgcgaccctcggcggccaggtccagcgggctccgaccgcggtggttggtgtagctcacgtcggcgccctccagcgccaggaagcaggcgaccgccgcgcccaccgtcagctccgcgctgccggggaggcccgaggcctgtagcctggacagcagctgcaagggccctgggtcccccccggccccatcagccaccaggggcagcagctgatgacgctgcagcgccacgtgcagggctgtgtccccctcctcgtcctcggcgttgacactgcacccagcgtccaccagtagcggcaccagccccacgtgggcctgttgcacggcgagatgcagcggggactgcagcttccggttgcgcacgttcacgtcacagcggccctcccggatgaggatctgg

SEQ ID NO: 160628 - DNA, 1000 bp, Homo Sapiens
ttttttttttttttttgagtcagagtctcactctgtcaactagaagtgcagtggtgctatctcggctcactgccacctccacctcccagggtcaagcaattctcctacctcagcctcctaagaagctgggattacaggcacccaccaccatgcccgggtaatttttgtatttttagtgatggggttttgccatgttggccaggctggtctcgaactcctggcctcaagtgatccatctccttggcctcccaaaatgttgggaccacaggcatgagccactgcgcccggccaccaacagattttttaattcagaatttgacagcaaataagtgttacatcttttaaaacaaatagcttcaaagaaatatattaatgggaaaatattaaacatatcatttttattaaagtatatcaacacctagaaacaataaagggtacatgatgaatatgtataaaaataagtaactcaaagctttacttgaaatagaaaagtctaactataagttattttttgtgtgcatcaattgaaacaaaccataagtttgttgattataatgtcattttatgcattgcaagaatatacaacttcaaagtcttctggtttaaattcctaaataactacagggtaactaaatatgttcaggatccttcaggcagaaaaatcaactatttagagtcacctggaacaaataaataagtaatcatgccacatttctgttgtttttaaatttatcatggttttgcttataaaggtattgactcattaggttaactctgtaagattataagatgatattctgatttatacttgctacatttatgactacttggagaaacaacacttgaaggggaccttctatatacatttgaacaatctgagttacaaataatcatgctgacaaattcaggtttccccactaccactgaaattatcagagtctaagctgaaaaaaaaatccaagtattgtattcatacattttaatcaaggttcaataggga

SEQ ID NO: 160629 - DNA, 1000 bp, Homo Sapiens
tttttttttttttttttaaacttttaacaaacttttattaacaaacctcgcgtagagccaactctaacccgactaacagcaaaaacagcattgctaacaagatcaaggatggaggtgcagacccaataaagaccgtctcttaaaaaaaggactgggaaaaatatatatatatatatctgcatgagtacttcttaaaaaactaaaactttccagtgttgcaggaaaaaatatcccaaagtgatttcagtcggttaaaaaaaacagtacttggcagtctgtgctgccttaaaaaccccaactggacataaccctaggagaaaatcaccccaccccataaagacaaaattcccttttctcctcttccttgttcaaattccactgcttattccaccaacacccaaggaataacaagacccagcttacttctctcggtctcttatctgataaagctcacagcaatcttaacctctactacaatcaggaaattgagccctaatttctgggccagattctggaaagttgcaaaacatccttatgctgcgaggggcctgaggactccttcaaagatcaagggggcagtggaactggcagagactggcatgcctgccctgcaaggctgagacaaggggacctttctaagcaaaaacaccccaacatctgtcactgaaagtctaaccaggcaaaaccaaggagcagcaggcgccaaactagggctgtgcctgaaaggtgcacatctcccctgtttcaccataaaggcaagggagataaagagagccaactgagtatttgacctcatctgtcttctgcatattttaggccgaagccatgttgcagagaaagacatttggtcaaagggtagcctttgttgtttgtggttggatacagctgccattcctggacagcctggttcatggctgctttctggaagcttttcccccttatgcagagtacttaagaattaataggaaaattttcagtggaacttcgtaactggcaaata

SEQ ID NO: 160630 - DNA, 1000 bp, Homo Sapiens
tatagtataaggaaaagctacaaacctcaaggttgttttatttaaaccaaataatctgagcaagacatatatacattaaaaacaaatgaacacattaaaatttcactattttacaatctaaattctagcaacatatacaaatactgagtgactacagtacatgccgaggtaagataagtacattctgggagaatatcactgacgctcaaaccatttttatttccaatatgtatttcaatacatgtttgtttccacttttcccagtgccacacacacacacacaaaaacaaaacaaaacaaaaaaaaacagtcacaagttggattacattagaattggtgccacagttgactttaaaagcattttaataaccacccaactcttagattttgcagtttagggacttcaagttcagaaccaaaaagcagagaatcgtttcatgtgacatgatgtttctatagacctcttgctctctaggtgacaatgcagagccagggcaaaggtgtttaagctttgtcaccttccacagctttgtggccacattcatatttagataagctcggactctgctcccctcttctggagatggggagaggcaagtgtgtatgtgttgtcatacttactgcattaattcttcactcgaaccgtttacatcagcgaataaacccattgttcaatgcaaagtgcaaacagtgaaacatgaacttaaataaactggactagacccatcacatccaacaggatctatttagatttacagcatttaataaagtataagtcagaattcacaatatcttaaactgtgctgtttcctaagatcaagtaacagccaagtcagtgtaattttatgaaacctgtaatggccacatttgttgtgtctccgatgtatttctataattgcattaacaggaaaaaacttaatccaatataccagtgactttgagtcttaaatgttgcaagcaaaggataaaaattcaagggaattttgtcagatatggttac

SEQ ID NO: 160631 - DNA, 1000 bp, Homo Sapiens
gacaaattattcaactgtttatcatacataagaccgcatgactataatacaaaggggggttcttttttcatttaacgttacaatatacacagcaagtccggactagatcttacaatctgaacacaggtatttaaccttttccatgctgtttatgtttacaatgcacagaagtcctgtaaccaaactgtgtagtaaagcacacaaaactggactgtaacataacacagtatgcagaagcattggattttatgattttctttacgtaaatatcggtttaaaaactgctttagttttttggtgcttgctaagatgtggcaaccagcacagaaaaaaaaaatgacctgacccatatgatatcttaaccttatattcctaaacagcagtaactactgaattccttttgatattgctatactcaagatgatatccttttattcactgtaaacctttatgaactaccaagttcaaaaaaatcatccacaggcttgacagttaattacaaaataaatatggatttcctgataaacaacaaaaagtttttgtagtttataaaaacgagtatttccaagtttccattcacatttacatagtgtttagcctttcttttctcactgtttacatataaaaacctgcttttgttcagaaaaaaaattgacctagtcagccacatggaattgaccaatagaatgaaacgcggtgttctgctgagtcatcttaaacaggttatcggcagaggtagattactgcttcttttctaggcttcttttgatcctggacaggtaaattacttatcttcattctcccaattcaaccgctcaaaagtgtcacaccccaaaattggtcaatttaaaatgggaacacaaatttagcaactgccagactgtgttacattaaggcagcgtaatctcaacacgaggcacctgttaaataccagcctgtctgctcaggtcacgcatgagagttctgctttgcttgcactcatactctggacctgttggtg

SEQ ID NO: 160632 - DNA, 1000 bp, Homo Sapiens
aatgaataaatgaataaatgaatgtgtgaatggattatatcataagtgtaataggtgacagcctgctgaaacattttaggggcattccttgtacaaaacttacacataaattaaaaaatcaatttagctttctacaacggtggatgccaacccaaacacatttccagggagaatatttcatttatatgtagatcttcttcatcttgcaaattgacttctgaggtacatgacagtgaatgtcattccagccccattcttctgaagaacggaaatttattatcgcacaacgctcatcaaggttattgggttcacctgagtgccagaatgtgacattttcattgtatggtgtctggtcaacccattgccaatgtcgccgaccccctggatctgacagccccagaaaataagaagaatttcttttcagattctgaatgatgaaatcctgttcttccctggtgttgatcaccaccagatcagcccccatcacagaacagttcttttgactcttagtccaagattgcatcccagtagaaataaagtagcaactagactgaaatgaagtccaaggggttgggcagcagctccaatcttctatgtcctttccttccatgacgcaggtcaggcttggatgatactgttgatactctcgtaacttggacagcctcttgacagttttgctatacataaaattgtgaggcaccacagaactcacagtgaaacagacactgaggagcaagatggatacgactgccatggaccagaccttcaactggaaccaccagagtcctttctctcggtcttgaggctcttcttcaggcaccattgtgtgtgcgcacaccctttggacttcctctatcaggtgggtgcagaagctcttgtatcactttctccaaagatgttactttcggggtgtggttctttcaaacaagccaagcccttagatccttcttcgcggcctgaggcaggagggcaccgcacaccatgcagggtcagacagagg

SEQ ID NO: 160633 - DNA, 1000 bp, Homo Sapiens
tttttttttttttttttttttggttgtctctaatatttatttgtctggttataaaattaatatgtgaggagcattggatttggtgagaacgttttgaaccctagctgtcacgtgccacctgcgggatctagaccagtgacttctcagaactgccatttcctcatctggtagacaggatggtaagccctgtcttgctcactccacgtatggcagtgcagatgaaatgagatcacagaggggaagcaattggcaggctggaaagtgacgaatggagggccacttgcagccttggtctgatggaattgggggcaaggccacacatcttcctcaagcttggccagatggggcctcactggggcccttccagaatcgggcatcggctgtggccagctgtgtgaggatctcctccaactcgggtccatcctctgggaaacgctcagagaaggatcggatgaggccagcagctgacgcctcgtattccagaagctgcacgtctgagccttcaaggcgagtgttgggctgaacaatgagcttccgagattccttacgcagcagcaccgtgtccctgagggtgaggaagcactcggggggcgcatcagtgactgttgcatacccctcgtacagggcccgccctccggccacatcccctgtggacttcagcacctgaagtctccgcaggaagcgctctagagcaggcttgcccacagaccggatcttgctgcggtcgaggcggacccgggcatcttccatggtacaattcccagagaaataggtggtgattccctccttccccagtccgaggtgtcgaagccttggctccagagagaacataagctccccgcaggtctgccagaggcccctgacttcttctgggtgctgctgagcagcctcactccctaggatcacccgttccagcttttccttgggcaagttgggaacaaacttggtgtcaccaaaggacttgtagttgcccatgttggagtaaacacccgcggcatag

SEQ ID NO: 160634 - DNA, 1000 bp, Homo Sapiens
ttagaaaaaaaaacttctttaatgggaaattttacgattgaaatgatgtttcatcttatagaccacaaacaaatgtttttagacattgaaaagtggttaaagaccaactgcgcccagtcccccaagtgccattttctgagtgcagaatggagggtgacgtcttgagctgatgctgtgtccccagcatcaggttttctgttttccctcttctccctttattccttccttgtccattgccctcaaccttctttttctgtttgctctggcctggttcagtataacatatccatgaactctagtatgggcctggtccaggagctgtcctgccatggctagctcacggcttgacagcaatacttcttctccttctccgcccagcatagacttggtcacctttgtctcctttttctcccttgtgtcctcgagggccaggtggcccaggatgacctggtggcccagcagggcccctgtcacctttgggtcctggagtgcccatctctcctttttgcccagggggtccttgaatggctccataagtttggaagaagtccatgaggtccgcagtcacgttgctgtaggcagagaagaccttgctgatgccgggtggcccctgtggcccaggctggcctggtgggccctggacagtgtaggccatcccttgcagtaggccctgacgctgcatgctctctgacaccctcacagccagctcattgtaatccagatctccagcaaagtcagctcccaatagtccgccattgccagcatacatgccgccttctgctgctgccccatagcctccgcctgggccgatgtcagtgccatagggacccctgtctcctgcagcttcaccaaaggcaccgcctgcacccagggagcctgcaccacctcctcctgtgctcatggaagagctgtaggagctgccccgcctgacagatgagctgtgtgaggaggagctgctaccccgactgtgggaggcatccgtggacaggaggcggctgtc

SEQ ID NO: 160635 - DNA, 1000 bp, Homo Sapiens
ttttttttttttttttttccgacgtctgcgtctgtagttttattccgtatctggctgggggagggtggtctccgaggtggatggagtgagggtggaggggacagagatggtccctgctcccacctccccgagcccacctgggaagctgcgtggccgggctgctggagacatcccgagccctgggggagacagaggtgtgggtgtttgggcttcatcttccaggtacaaggagatacatttcatcaagcagttcctgatttcatggagttctttgagggctcggctgggaggtccctctccggggggctccaagtgccggacctggtggtttctggaaggatcaaggacaagtcctgggagtttcaggcttcggcagtaacagtgtgttaattgcacttgttcgattttctggcagaagccaggagagacggggacagcgtgcttctcttcggtgaccatcccaggcgcccagaggtgaccagacttctgtgtggtctgggacagtgcagggctcaggcaggaaggaccactgtggtgaaaggccactgacaattctggtgaggagtagggtggcaggggttcagccagggagaggaggtggctgccttttctcagggccctgctctcaccttccaaaggtctagggtacacagaactcatggattttggtctcgcagccccaggggccacacagaaaaaggggttcaactggaagtttgcagcatctgggaaaggccaattctggcagaactggaagattccagaccaggggagaggcgtccagggagagaagagtcctgcttgggttgatcataagcaaagtggacatcgttccgaagaggcagagagctcactatgttatcgataaaaaaattcttggccgggcacagtggctcacgcctgtaatcccagcactttgggaggctgaggctggtggatcacaaggtcaggagatcaagaccatcctggctaacacggtgaaaccctgtctctactaaaa

SEQ ID NO: 160636 - DNA, 1000 bp, Homo Sapiens
tttttttttttttttttttgcataagaagagccattttattaggtgaggcacatgggatgttacacacgcctggtgggaaaggagagggggcaggttcctcggagagaaggcaactgtgtcatcttccagcacatgggccagccatctgtgagcactgggaagctgggccagagggaatggattgagcagcaagaaatagttctgttgggggaagacccagctcagcagaggccagccccttcctggaaggcttagaccttgatgacaaactgtagtccgtggatcagcatgttaacaatgtcatgcaccagggtgatgtccaagcctctgagaacctcattgaccagagggcacacgttgccctgaaccaactcaggcaggactttattcaagatccctgtgaggctgtccagaagaccttgaatggggagggggccaagtccatcaagcagagaaatttgcaggcttccaggggaatgggtgcagtcaccaaggaccaggtggatcctctcctgcttatctctcacagctaagatttctgcagtgatgtccagcttcacagccagcctcaacagacttgcaccgaccaggggcgtattcacttggagctttatgccgagagggatggtgacatagagacggtggccatcagggctctgcacaaggccaagttccagcagctgggggtcagtgacctttatgtcaatgatgttgttcaggccaggaatcactgacgtcacttttccaagcagtcccccaaggaggccaccagaagtacctcctccaggcttcaggatgtccaggagcggaaggttttccagaatgcccaacaggcccccagacagcaggccattgctgagggcatttgtcaagcttcctgcaagacctgtgggactcaagggcagggctggattcacattcaagggcagggtctggtccaggggcacgggcaggcctccaaactgggccatggtctgggctaacagcccgtagaagaca

SEQ ID NO: 160637 - DNA, 1000 bp, Homo Sapiens
cagctaaaacgtttatttctcactcaaaacttatttcccctcaaccctatacccaaagaagaaataaaatcacagatacataacagaagtatttgaggtaccctctcatatatgcaaacaaatgcagactaggcctcaggcagagactaaaggacatctcttggggtgtcctgaagtgatttggacccctgagggcagacacctaagtaggaatcccagtgggaagcaaagccataaggaagcccaggattccttgtgatcaggaagtgggccaggaaggtctgttccagctcacatctcatctgcatgcagcacggaccggatgcgcccactgggtcttggcttccctcccatcttctcaagcagtgtccttgttgagccatttgcatccttggctccaggtggctccctcagtctggactctaccacttgggtctccagattttctgttacgtccttgtgggtcaggatatttctggaagtcactccgtgaggctggtaatcctcagacccagcttctggtcgactctggaatggactgaagctgggcaggatgatgagagccagggaaaaaagaagaatcaaaacacaagtgctggtctgggcagctttgttggaagtttgagcaattagcgtctgcagctggcggagctgagctaccaaggagatgttgtgcctctccagctcctggacttttttctgtaattcttggttctgtgcagaacaggctgccaccctgctctccagcccatcaatgtactccttcttccgccgccgactgtcctgagctgactgcttgttacggattttcctcctgaccttcttgaggaccctctcctctgccttggtgaggggcaggtgagagggcagggaaaccccttcctgccccagcagacgcttctcctcatcggtcaggaacagggtttgacagggcagcagggttgtacagggcactggggctacggtgcctgctctgggcaggatgtgggcatgagcatca

SEQ ID NO: 160638 - DNA, 1000 bp, Homo Sapiens
ttttttttttttttagcctgaaggtaattttacacaatattttaattaatttgtcctacgatttaattctttaaaactttttaaattttattataaaataacacttccaggatacggacttgctgtgggaggaatatgtaatcaggccactcaaaaatgcctgcacttgaggctgagcatttaaaaatgaatgttcatatgtaacaaaaattaaatgatgtattttttgtattaaaattaaagaaatatgttggataatcattataataaagaatatgctctaagaatggggataaaagctgttgggcgccccttggtaccaccatttcatagaagatcatagttgtaaacaagcagaaggatgatgcaatctctgacataattaaaaccgggtaaaccacaataagtgtgttccagcaatttgtcaagttatttgtccaggtctatcatagctactgagcaaatgggttggcatgaatagttatgtccttaatgtgtacatcattaagaggtcggtatgtcttctcatttactggcaacttctccaactcatctagagtttccagaccatctattacctttccaaatacggtgtatttcatgtccaaatgtggctgtttgccataggtgatgaagaactgagatccattggtgttcgggccattattagccatagatacaacacctctaacattgtgcttaagatattcactgtattcatcctcaaacttcttgccccaaatactgttgcctcctcttccagttcctgttggatctcctgtttgaaccatgaaacccttgatattcctatgaaatatacagccattgtagtaattactggcacaaagagccaagaaattctcacatgttttgggtgtcctctcacagaagacttcaattttaatatcacctacatctgtatgcagtgtcacagacatttttcctcttagtggtttcaggaaggactacgtgatttctcagtcttacagcgagctcaaaa

SEQ ID NO: 160639 - DNA, 1000 bp, Homo Sapiens
ttttttttttttttttttttttggcattcagagagcacgtttatttacaaagcgctttacaaacatcagcttatgcctccccacagccccctgcgaggtaggtcagtagtcatatctacagtttacagatggggaaattgaggcacggaatgggggtgtggcctgccccattttaaagagaccttcccacccacccaaccaaaaataacaaaagaaacaaaaaagcactggtcctacctcttcctctgaactccagagggtatgaccagccctgctctaacactgcccctccccacaacgggcagcctgaccaggagccacaggggcctcaaccccaggggctgttgttcagccttgcagattgtcactggcccaagctgagcaggacaggccagtgaggcctgaagattaaaggaagaggggggcgaggtgacttcattctgcaacagtgggtcaggcagggaaggagccccccatggggcacagcagtaataggcagatcctggttcagggaagctcagagcacatatcagggaagcaagtggggagggatagtgagcaaaatatctcaggggctgcagggggcagtggggaggagggcgctgcagttcccctggggaggacagtcagtgtgccccactggctattcagaattgagacctgcttccccaggaccttcaggggctgggccagatggaatcctaaatgccaagtcccagtacatcctctacccacatgcagagggggcaggctgagtgggaaccttggcctgggatgctctctgcagggcctcactcatccctgccaaaagccaggatggtgccaaggggcttggcctgagtcccccagagccagccgtcctgagcctttgtcactctgccaggcagcaccaggcctctcagcacaggcctgcaggaccctatggaggtggggctgggctgcagacttgctaagctcctccttggcccaccacccgcccatgggacaagcgaaaggccct

SEQ ID NO: 160640 - DNA, 1000 bp, Homo Sapiens
tatagggatcacttttatttcaaacaattaaatacaaaccaatattttaccccttcatagatgaaatcacatcttttcaggatatgagtataaagtaacaagcctagggcagagcttgtactgacaaagtcctgaaactacaatgagaggaaacacattgctctacttcgggataagtcatgaccgagactcaatttcagagacgctctatgaacagaggtgcttgaagccacagtggcagaagggaaagatggggaagtgtgccgaagagcctccaggcatgacagacagtcccctgaccaagcacaagtaacaggccctttgggtctctgcttctcactggaaaatgatgaagcctagatctgatgactcctagtgccaacatttaacaaagttcgaaagttatgcaggacttcacacatgtacggaatggctgtatcacagaatattatgcgttagaaagttcacggtcactatacctagctctaaaatttttcagagaaacagcagactaataagtgaatcttaaataaaggaataacattttaatgaaataaatgaaacagagcagggaaaccaaagagccaattaggggaagaatcctgaaaaagtatggcttcacacagcagcagcattgaagaaaacactatcgatttttcccagagaaaaaaactccaaaaatgtccaataaccaagtgcacagagttatggtcaataagactttgaacatgcatcacacatacataagtacataaagaaaattttcatttatttttccctcagatatacttcaaaataacatgtagacacagaatcacaaatatatacaaaacaaagtatcgcctggttatttcaagaagagttttccctcaattttcttagctgctgtgcataaaattcaaagctttcagggggttcaatgaaagggacaggctctccagcatacttcagcaaagatgcgtaacgctttagaaacagatcatccaattttgtattcttt

SEQ ID NO: 160641 - DNA, 1000 bp, Homo Sapiens
ttttttttttttttttttttttttttttttttttttttttttttttttttttttttttttttttcccacctatgccctttccagggcagtttaattggtatcatttgtaaaaggtcttttccatcacccccaaagcctttgcattccctttccaagaaggtggctgtttactggttttggccccatgtgcaacagtaggccttggtatgatgctgccataacactcccatgtgacactccaggtgacatccaagtgcaagtctatgttcagctctggacagcaggggggaaggtgaggagagtcaggtctgtaaattgaagctgggcagggccctggctggctggagatgtgtgggcaaggtgagcaggccccatgtgcaccccagctccagtgcccactgatgtggctgaagcccaggttggttgtggtcaaattagaggtcctgagagagaagcccttaggccaaagaagtgtgtgctgggaagcaggccagggcagaggcccagggaagatctcagcaggggcagtgtgagcatgagcgagtgtgtgcacctgtgacagtgcagacagcccaagatcagagatacaatgtgcaggggggcctttggtgagtgtgtagctgtgcccctcccttctgagatacaggcccagcccccgcctccggaggctaagggggcacacctgggggtaggaggagtctgggaaggaaactcagctggaaatggtttaggcctcagagcccacatcctgtgggaggggctgtcaaggggcctgctgtcccggtcctgtcgcagtcctcaaagatgctagagtgacagtcctctaggggtagagatggtcgtcctcccaggagaaggtggcccggagacttggaggtgggatcaatcctgccagtcctggatcaggaggcctctgtcgggcgccgccccccttcctcctccatcagcaacaggcggcgccggccagcctcatagtcagcctcatccacactgaccagca

SEQ ID NO: 160642 - DNA, 1000 bp, Homo Sapiens
ttttttttttttttttttgatttgtgaaataggtttagcaaaaatatattgagaataaaaatcagaaactggtaaagaaaagccaaatgaaaaaaatatacaaagttatcccccaaatgttgataagaacctagcgagttcagaagataggcccaggtgagaagtaggcccaacccggccaggcctcgaaagtgctccgcgtaaactacacgttgaaagtggacgtgttattggcatttcattcaaatccatgaggagaaaaaactacgggaggaaatcttacaacaccattgctgccaccacctgcagggccagcttctcactaggatggaaaagaagcgtttctgaggaacaattcacattagtacaaaaaaatgatacagccatttccaaagagcagagtaatgatcacaatggcagtttcgaggaatccagggtcagtcctcacacgggcctcacccagcctctcccgagtggcgacggcgctgagagccagaaagggggcaacgcgaagacgagtttctagcgacccttgggaaaagcctacgctacacatttcagaggagattaaaacattccatatgccaattaactttaacctaaaaaaatagagtgggagggaaccttgacattcggagaaattcaagtgtggcggtaacgctgaggagtgaggctgtttgtccaggaacgctgagctgggctcagacggtcatcagtgcagacgcagcggacgctgctgaggatggctcagtggtggggaggcgctccctcccgaggaggcctgtacgtctgtgtcctggcggctcgagctgggtcctccgggccagttcatgctcgccctctcccgcaggcagggccggccgccctgcaccgcccctggatccggccaagcggccgcctggcgctatttgccctctgtgactctccgccagcccctccgccgccgcctcttccccttcggcttccctggctctggggggggcttctcagtcttggtgct

SEQ ID NO: 160643 - DNA, 1000 bp, Homo Sapiens
ttttttttttttttttttagcaatatatatatataatttatttacattcacgcccgataaaacccctatgtgccccggcggccgggcaaggctgtgtacataaggccaagagtaagtgcgtgaatgcacttaagacaaagtcaggacacgagcttcacatgacaggccccgcgtggggcaccagccagccctggggacgggcacgccacgccacacacacactcaccactgtacagcctgggactcccattgcatattcacaggccccgccgggcagggcacctcaaggctgggggaggggcaggggcagggaggagccgtggggtgtccctgggtgggtggagagggcagcatgtgagaggcaaatgtgcaccaacactgggcgtgagacgtgagcagcctcaggtgtacagcatgagatgtgtgtggttggggggtgtctgcgtgacccgggaggggggtgtgtgtgagatgagcacacgaggcatgcgtggcacgtgctcgtgtggtggtcgtgtgcctgaatccaggggctaccccctgtccggctgtggccctcggtcctgcaggcttggagcagggcccctcagacgtgcccctacccagcaggcacagaaatgtttgcataaggtccagctcaggcaggagctctggggccctggcccaggcccagtgtgtgcgtgcatggccgtgtgtatgcggggcccctggagagggacgggaggagaggtagcatcacacgcacatacacacacacagatgggctgggcctggcccaggctccaggcactgtccctcctgggccctggggccgagtgtgagtggcagtgccagcctggctaggcaggccatggagaggtgggagttcgggcagggtctgaaggaccagcattaagggacagcttcggccgggagggggcctgtccgagcagctctccccggtgtggggaagggcccctgtccggcttctgcctgtccttggtgggtgccaaagctggtg

SEQ ID NO: 160644 - DNA, 1000 bp, Homo Sapiens
aaccgtcaatctttaccaatttattttatacaaaacagtagcaatgtagaatatgggaatcgtcttccgctgccacgcacgcaagttgtgaacattccaagccaatgtatacaatttggaggggaaggctaaacaatagcatcaaccacgctactgaacataggaatttttcatttaaaaagattaaaaattagatagcaatgtcttcttaatattgctctcgtcattgaagactgaggaaaaataaaaagtgactttataagttttttaaaaaaagaggcaatggggaaaaaaacaagaggctgctacaacactgccatacagtcaaaccatcatacttcaatatttgcatactcgatagcagcattatttttactgaaccgtgtgcaactacatgtagaaacacatcaaagcaaaatatcatggcagttatcaatcaagatccaaaaaggaaaaaaacaaacaaaaaaataactctaggatgaacacactataagaacatttatggagaaagaatcagtatctacattcttggactgttccattctgccccaataaaagtgtcaattcaactgtcagctgtggatttttggcggatttgagtttttccagttcttatgatactgcatgcttggaacaaagggggtcataataaatccttctacacaatgaacttcataggcagacagctgaaaataaatttactacttgtaaacacacacaaaaaaaaaaatacaagattttttgtatctttaaacaatcagtgcttccaaaagcccattatcttctatatcgacctctctcccctcggtctctgtctcgatcacataatcgctctctttctctttctctatcacgtcctctatctcgctctctgtctcgtctgttatctctagggcggtctcgctctcgttcccggtctctttcacggggtctacttctccggccactgacaacagcttgtgtgcgacgaaggaaatcatccaccctcatatcataa

SEQ ID NO: 160645 - DNA, 1000 bp, Homo Sapiens
ttttgaggtgcagatagcttgctttattttgttgttactatctcaaggaggtccaacaattataactaacaattgaatttatacttgcatgaaaagaactacatcaaattgacattttgggcaattagtaatattgtttaaaatttaacaacagctttattttgttgttgttctttactttttgctgtggctcattgcttaggtgcccaggtttttcaggtgcaattaaaatttagaactaccacacaaaggcattggctgcactctgggacctccaagagttggcactgctctggcataggaatacttgaatagcttggttaaatgaagggatggccaggagatgttacttttccaagctattcaggcactccttatgtcagagacagcgtaaaatgagcgaacaaagtgttggccgttacactttgctctggtaatatttgtcatgataattttgtgtgacatcatcagagaaaatgtaagacgttaaagtgttgcttacaggagggtaaatgcaaacatcaccaatgccttacatttctgattcagtaggtattggtgcacatatcaagtgatatgcacagcatcattctcttttaggtggacaggacatcttcaatggggattttctcaacccactgaggcatacttagacatcaacagtatgttgaggcacaaagattgattaaatgttgagcagggtattcgttccataagaaactttctcctaccaacagttagtttcaaaacttacattgtaaaatgtcataaaataaatggtacaaaactttataaccgttaatccggctatatacagtatgtacatgtcactagcaaatgtattatattcttaggtcaacaattatgaaaagattgaaatgaatatttttgaactttgactcatttaggttgatacaaaactacttttttttctttaaatatttacagttcagaaagattagtccgtgtgaaacgtttgcgaaaagttaagaatgagtgt

SEQ ID NO: 160646 - DNA, 1000 bp, Homo Sapiens
tttttttttttttttttttagtgttataaaaaaaatttactgagatgatggactaaggcatttacgagcattatctgacacctgggagagggtgaggctcatataagcgcacaataaattacaagtattattattgtccccttctgtggtcaaccacctgttgtttctgccattacatcatcttctggagaaagctccctagttttccttgagaacaacttttcctccattgcatataatccctgtgaaactacctattactggccaaggaatggtagcaggacctcagatagcccaacagatacttgctcctcagaatctgaaccttgagcagagtcatccaaaactgaggggaaaacacggagaaattaacaacaacaaaacggctgtagttcatgtgtcgccatcaaagaactcagacaagattggccattagctcctgtagctagttcctgtcttttccaaaacctgttttttttttggctttttggtagatgctgtggctctcttatggcctccaataaacataagtgaggcagagttggtttctattgtttgcaaccaacgaacttaatggattctgtattagaaagaactggtatatttctttaagcaaagactaggactctatggggctcaacaaactctgtaatcgcctttccactcccctggacaaaataaatatattgtctactgctgaaacgcaaattatccccaaaccaagtagctttaaacaataaacgtttactatctcacagttcatgtgtgtctgacgttccagagcagcttctctgagtggttctggcttagggtctcccatagaggtcacaagcgagatcagctaggattgcggtcatgtgaatgcttggctggaattgaaggaccagctttcaagattgcacactcccatggctattggtgggaggcctccatcccttgtcatgtggagcactccataaggctgcttgagtattttcatgacctggaagctggcttcccc

SEQ ID NO: 160647 - DNA, 1000 bp, Homo Sapiens
tttttttttttttttcgcattcaactcagaaggctatttattgaaagaatacaatgatgttacaaggatgcatttcacgtagccctaaaaggctgggtatccataagtgcatggttcatggctgttgggactaagaaagccttctggtcaatgagccacacatatgtcctgggctccctccctgtcaatgaagatgtgatgagtttcagagtggtggctggatctaggccaagcaccaaacacaaaccagtactctcctttgggtcttctggaactaaggttttataaacttccgtaacagtgggggcagcactcagttggttacaattcatgccattcctgaaagtagtccactatggggatccccaaacaaccagtagcataatgagttcctgacaggcatcctagccaatcagtagggagggtctgagtagaattacccattgtcaaactatgtatcagataatagaagcacagccttggcattgtgtgtgagctaatcatggtgcaccataaacaaggtgttttggatggtcagcatctcagaagggcagatctgccattgaatattccattttgcatcacagaggagagactaattgagctacacatactacatttcagcccccatgcacaattttttccctgcaaagaatgaagaatacttgggtgctgctgcatgccatccatgatgagagaaaggcaatgaatcctgctatgtggcatgcaaagaatccagtaggaaaggttcaccatcaatacgaccaatatcttgccccatgattcatatttagggctgggaaaatttatctatctttgggaggcagctcttgtgtaaaaggaatcaatgtccagttgtgcccaaattggtctgcatggtcaatgtcaacacaccaacaaaggttctggaagttcctttaggatagcccatgggagtcattaggggatggagcaggccactgaagcttagctgatgctttactaatagaaaagcattata

SEQ ID NO: 160648 - DNA, 1000 bp, Homo Sapiens
ttttttttttttttttttttttaaagtgacccagttttattttggttttggaggccagacagggcattgctccacgggttcgggctgtacaaccttcccctccttgaggtgggaggcccagcaaccacagggcccaggcagcggggtgggaggctcaggagatggtggctctggggacccgatcccgaggagagagggggcagcaggcagaggcctgcaatggctcagattgggggaagagggcggcgagggggagaggacacgatccaagaaccagagtccgaaagctgaagctggtccggtctctttcactttacggccgaggctggggtcagagaagtgaagccaaactgtcctcccgcaggaggcaaggcctggagggacgccagggtcccagtccggtgccgggccctgcgcacacagccgccgcctccaccctcgcggagggcgcgcgcggggcccagtcgctgggtgcagggtccggcgggcagtcgggccctttctcctctccggcacgccgggcgggcgccggccgccctcagcagctcacggagccggcgggcggcgcggaccccaagtccgagaagcagtcgaactcgctctggcccaggaagagctcgggcagctcgcgcacgcggtgcagcccgagctccagctccagcgacgtcagcgcctcctcgtcgatgagttcggcgtccatgccgcccagggcgtgcgcgggcggcggcggggctgcggcgcttggcgccggctgcgggcccggggggcctcccggagcgttggggggcgcggccgcgcggccggggtacggcgtcgccacaggctgcaggtgcgcgatgcccgcggccggcggaggcacggccggaaagggctggaaggaggacggcggcccgaaggccccgtacgccagggccccgggttggcggggcggcggcggccccagcggagccccccgcggcctcagcccactgtccaggcccgggcccgcgtacggcggcag

SEQ ID NO: 160649 - DNA, 1000 bp, Homo Sapiens
ttttttttttaggtggagaatatactgatgtttattgtatgattctttcagattttctgtgtgtatcaaatttttaataacaaaactttggggataaaaagaaaagaagcatgaaaagacaaaaaataaatcacacaacaatgtgaatatgggtaacactactaaactgtacacttaaaaatggttaagaagcgtaaattttttttctttttttttttgagatgcagtttcactcttgttgcccaggcgagactccctctcaaaaaaaaacaaaacaaaaacaaatcaaatcaatcggtcagtcacagatgcctgagccccactctgtggaatcagaatttgtttgggacatacccggtggactggccactgctgtttttttcgaggctctccaggtgatttagaggccagccaggattggaaagcctgttgtaaaacccctgaaaggtgactagccgtggccacagcctccaaggccacccccgggactgtgcatcctgctaacgctcacctcagcaggtcgtgcttcttggtgcggttgtgggcactaagtgccttcagctcagcctgccgtttgcgaagctcagcaaggacctcatcctcggagtcctctgcggggcggtcctcagactccaaaaggccctgggcaattagctcctccttgatgcggctctccagggacttagtatgcggcacactgaagggcttgttctgattgcgaggggaggtgcttgccccgtcagcccctgattctttcccagacatgtcaggaataggagaatcctccataggggaaataatattttcctccaccagggcctgcaggaggcgctgcgtcagggcaccaaaggggcatccatcttccggctgttcatgctgggcctcagacttcttcagcagggcatccacatctttagtgtccagttcggtcagtggccccatgaggcctttcttcttgtcagccacagccgctgcccgggccccatccttctgctcctcc

SEQ ID NO: 160650 - DNA, 1000 bp, Homo Sapiens
aaaagatacatttgcatactttatttttgatggatttatttttaaatagctaaaaacataaagcaaattctttggagcccatggcaattactttttcccctgtccacttgagtgaaatgccatagagctaaagagaaaaactaaaccatttcttagattgaataaaagatcattaattgttgacacatatctaaatcatttcagtatatttagaaggcaaagaagaaagggagaaggaaagaaaagagagaagaaaagaaaaaagggggattcatctttaaaatttccatccagataaattatattacccttcggaatacagggcaattaaagattgaggtgctcaggattcggggatcttaaaagttcacagcaagcatcagatgtcactagacaactggcagtctaatgctcacacccctgaactagaagaggttccacaggatccctggccaatgccagggatctttaggtcagcagtcatgtcaagatgctctgattctccacaaacccagcttctttcccaaactgcagggaggtcggtctgcagtgacttacctagtattttgttgtatccctggctcacagtgtctccctggtctaggatcttcgaatcgaaatcccatgaagcacatattgcagtgctctctgactctcacccctgaaatagagctggtgtggggctgaggatgtgggaaggagacagcacacccagcaccccccagggcaattttcagtatgctcctcaacctctgagatggtgtgaaaagcacagtaaatgtactgcccctcacatttctctacagaggaaaaagagagggagggcaatggctggggggtgtgatcagatttcaagcagaaaaagaccgtgccacttaaaaaaaattcaccacctagattctgaaaagaaagaatttccagttaagaagtatctactgagaccactgggcatggggtgggttggggtggggtgggcagtagggctaggttggaggtggga

SEQ ID NO: 160651 - DNA, 1000 bp, Homo Sapiens
ttttttttttttttttggatacataatctttcactgtatttgaggctatcttgagtctctggttgagatctgggtcactaaggcttctgggggatcatgtcttcaacaagccttccaatgaatgtccaaagaaaaacatataatttccttttatttttttttttaccaaagttcttatgaattggaaaataatttgtttcaaagacggtgatgaaaggaaaaaaaaagtttaactttccaaaggtaatgctttcatgaagagttagaaatagcagttttagtaattagttgtaggaattctggttaagacttcaacattttaccttacttaaaagatttgctttatgcaacatttaatgcccagttttgcatggctctaaaaatctttaaaatgcaaaagcttttccagtgactggaagccaacacgacaagaatgaaatggtatgacctgtgaattagcctggtttataaaaaaataccagttcagagaccataaacaaaataaagaaactaagcaatccttaaattggatttagccttgggcaattagcagaaaaattcactcataaaaggatccattttacagatattgttttttaaaatgtcaggaactggttttataagagtaaaaaagttaaaattaattgcatcttccataaagaatatgatggaaataattatatacgaaaaatgagacaataaaagtccatttataaagtgccttaatgtaccaaaaaaggaggtcagatgtcctttatttacaaatcatatttaatcccatttacagaaaggcaaatattacactggagaggcagcataatagagtataaagaactctcaacttcgagtcagaagatctgaatctttttggctttgccactaattttctctgtgactttgagcaaatgagagtttttctgggcttcggttttctcatctgtaaaatgagaggtagaactacactgcttctaaagccagtccttgcttagatgtaaaattc

SEQ ID NO: 160652 - DNA, 1000 bp, Homo Sapiens
acacagacatagatcaatagtttatttatccacattatcttttaatccttaattcatacacataaatactgtggtactgtggatgtaatatcagtgcagattattaattacctggctttttaaagttattatataacattttcagattttattaatctcacttttaatgactaaatgagtgaacaaacaatatcaagtgaatgggaaatcttttttccaaatgatgttaataactcctcactcattttcttatttattcattatgtgctgggcagtctcctcagttgtcctttggttttgggaatgtcctcactcaatacttccctttcacattcagtcctgattcacaagcaggcctgtgcatgttatattgcagggtcaagctgaaaaggcaaggtttcttcaactggcttgagagctatgaggtaggctgtttcttctttcgctttgtcctattgtgggttctctggtgcccaataaggtgtgagctctgggtgaaggcctttccacatttgttgcatgcatatgggcgctccccggtgtgagtcctctgatgtctgatgaggtgggagctctggcggaaggcttttccacagtcctgacacttgtagggcttagcgccagtgtgagtcctcaggtgctgggagatggctgagcgatcattgaaggtcctcccacactcctgacattcaaatggtctctctccagaatgaactctctgatgctgtgtgagggaagagctctgaacaaatcctttcccacagtcttgacacacatagggcctctctccggtatggattttcttatgcacagaaaagtatcttgggttccggaatattttaccacattcactgcatcggcaaacttggctccccttgtgaattcttataaacgtaatctgtttagtactccgactgaaggttttcctacaaccattgccttccttggccttttgcctttcacagctcttctgatgaatttttacacgtgaattatgttt

SEQ ID NO: 160653 - DNA, 1000 bp, Homo Sapiens
tttttttttttttttttttttttttttttttttttttttttttttttttttttttttttttgagcagacaaatctttattcctgaggctaaaatatgcaccagttccctccctgtaccgcgccactgccagcctgactgcatgcaggccctgtcccagacctggagcgctgaacttggagtcccaggacctccttccctgagttgtgtgtgtgtacatggaggggactcctgggtagcacctggaggcggcctaggggtgaggggcttctcaagggtgccctgcacctccagaggtgcagtcttgggcaggatgtagcatgttcagagtctggtgaccgaaacagggctgtcggggacaggcctcgggtgttggagggcaaaggtgacagcatcatggacagaggcaaagagatgcttcttggtgatggatgcatcgaagaagtgcccagcctcaagctggctgaccacagggctgtggcaggccgccatgtacacctccacctcaatctcccggaagtcatggaaaatattcttcaggctcttgaggcacacagtgtccacaaaggagagggcacccaggtccaggatgaggctgtggaagtctggctgaggcaggcccagggccttcagtgtggacccatctggggccttggagtcttcttgaccattggctgttgcatcttccatcttatctcctgagctcaccatcatcttgcagtcctcaacgttgttgctcctcatgtcttcaaggctggtgttgacattaatggaaactgaggcgcccttgggggaggcagcctgtttccgaagcttctcctctttctgcagttgcttcagcttcagctgctcctgcttcttgagcagtttcttcttctgggagatgaggaagtcgacatccacaccacacctctgcttcagcgcatcactgtagaactcagcattggcaaagtacacggtggccgaggagcggaagaccttcaccccccggacttccttggc

SEQ ID NO: 160654 - DNA, 1000 bp, Homo Sapiens
ttttttttttttttttaacaagtctttaattaaaaaactcaacaaaaatatataattgagcattttacataatgcatacattcttaatatctgcaggtaagataaacaacagaaggcaaaagcagatatgctgtattgcttctttggcaactcaccaatatcatcccctgcagaaacagagtttttttttttttttttaaatccatggtcttaaaataattgtcccttagtataaacaaaatatttagcaataatacagtagacggattcttcaaattcacaacaatttataatactttataccacaagggtaaactagtaagctgctttctaaaattaaggcagcagcagtgtttagagggggagtaaaaaaaaaaaaaaagacatcctttttctagttatatcctggctctgccttctttgttgttgtttttaaataacgtcacattcaagctctacgtcttggatgacattcctaaggataataaaatccttttccctgtacataaactgtgtttcacttccagatcagtctgacactctccaacaaaaccaaatacatttcgtatgaggcaacacaatttttttttttttttgagatggagtctcgctctgttgtccaggttggagtgcagtggtgtgatcttggcttactgcaacctccacctcctgggttcaagcaattctcctgcctcagcctcccaagtagctaggactacaggtgtgcaccaccacgcctggctaattttttttttttttgtatttttagtagagacagggtttcatcatgtttgccaggctagtctcaaactgctgacctcaggtgatttgcccgcctcacccaattcaactttcgtaagtcagtatttaccatctaactcagtgtcccagaatttaaaatttccttgcactttacagcaaagatacatattgtggctctactgaagcaatatatacatgtcagaactaaaaatcagaaaagcaaaagggtccattcaac

SEQ ID NO: 160655 - DNA, 1000 bp, Homo Sapiens
gatgagagtttaaagttcagaggacacaggaaatatttatttgtttcatgtattttacatttgttactagtatgtgctgggcactatcctgttttacaaacattcactcactaacaaccctatgagatgagttccagtaatatcaccattttacagaatgagacaactgaagcccagagaggtgaagtaacatgtccaaggtaacacagctttgtgtattcgagcagtctaataacagagtcttcgtgattaaatgacaccgtgcagcctctctgccctgtacatatttctgtcttgcttttccatatggtgttgtgccttctttgcttcatgtttgttttccagactagactgaacttttgaagggttttctgttccgctatgtctaggtacctgacataaaggaagagctggacatgactactgaatgttagtgctatgattttaggaattaatcacattgaatttgagttgttttttgtttgtgttggctcactagcatgggcttgtggaatgggactctgagttacatatttctatatcctcagcctctaacacaatataaaggagaacacctcccatttgtttatttattcattaactcactgattcattcattcagtgaaaatgtattaggggcaggcaccatgctagttgccaggaacgagcaaagtagaccaactttctgcctctgtggttaaatccaacctcacaagagtatgatatagaaaaatgatgttgatattctttaaattggacacacttgtctgttctacaaacagtactactagattactttgcattgcaacatatcagttccctccctaccacactgtgtggtgaaataacattgcaaacagctattttattcctattttaccttacctaagggcattggttacccatattggtcagatctaatattcaaagctcaggaaaagctttttggtgcagagctgatggaagaatgatcaggcttccacactgcgaggcggggctg

SEQ ID NO: 160656 - DNA, 1000 bp, Homo Sapiens
ttttttttttttttttgagatattcactttattgcagtggtctgaaactgaacccacaataactacaaggtatgcttgtaaataccttatttttaacaaaaagtgaaaatgatttccctgttatttactaacaaatagaccagacatttgcatcagacagtgagcataaacttctctgatcacctctcaagagacatctcccatttctcttttgactctcctcaagatttcctgtaagaccaaactttatcttccatatgtctcacaggtcagtgttcataataaccatcagttatacaacagcaatttaatgaatctcagagtgaagacaaattgccggtttctgagtagagggccaggataggtcacctggatactcattgaaactaatgattctcaacttctcctgccttcaactcaccagaggaatattagacatccacttgttagtggttctctatgggggatagtagaggaaagccaaatttgggcattaatagaacaaatcttatgttaaatcctcgtattatttttcttgagataatatgactacagctcagatataaccatatccaatttttaactacttcaaaccaagtaattccatattattctcactactcctatctaattgtggtatcaattggctctaaaaatattaaacacatatatattacttgagacctctagactataaaatacttcaaaagtctagtccttaaaacgtagggcaaaaaatacctcaattttggccgggcgcggtggctcacgcctgtaaacccagcactttgggaggccgaggcaggtggatcaggaggtcaggagtttgagaccatcctggccaacacagtgaaaccccgtctctactacagatacaaaaaattagccaggcatggtggcaggtgcctgtaatcccagctattcaggaggctgaggcaggagaatcacttgatcccaggagatggaggttgcagtgaaccgagatcatgctgttgcactc

SEQ ID NO: 160657 - DNA, 1000 bp, Homo Sapiens
aacagaaacaggctttatttcaaccagacaagtgaattcttcaattaacatcaacttcttcaagacttgaagatatggaaattaaagacggtgctcagaaggcagagaaaggaagattcatcatggagtaattgttctgtccttcaaaaatccctttcaacaataagctcaatacacaagatcatgggatctcatgcatcccaatatttgtacatgaccctcatttgaaagttacccatcagtcttaatgaaatctttcaaaaagaaaaaatatatagatcagtataaattatttttaattttagaaactgagattgaagtacagtttttagtttaaaatattaaaaatgaaaaaacctttaacattattaaagatgtgttgttacaaagttcctagatatatacatgtacaaaacaaatagatattactatctgacacctcaacccatgacttaccctaaatctcctgatatgaacaattaatctactgggaggcttttcccaataagtttcaaatttcttgcacaaagatttgctgccattcatattctgtgcatggatgaggacatttaatcacagactatttcaacttaatataacctagcataaaataaatccaatgaaacactacatttataagcgataggacaaacttgcatataatttgcaacttttgccagactcattaaattcattaacacattcagtcttctcttcacgggcattttcaagagctttagatcttgtgcttaactttgtattgagctggtcagcaccttcattgatatgaacaattatgtcaaagaaaggttacaggtagggggagggacatcatctgaggacagaaacagagggaacgactcttttttcagaagacaactaaaacagaaaaacaagacaaaaaagggtacaaaacaaataacaaaagtgttcacagtaaaacatgccagatttgtagtttcatttgaaaccaacagcaaatcatgaaacgtcatgaaaa

SEQ ID NO: 160658 - DNA, 1000 bp, Homo Sapiens
aaggagatagattctagctgataaaaatcagtaagacttgaggaatgattagatatggggaaaagtaaagaagagaggtgtcaatgacatgttggtttcctgcatttatatacatatatacatggaaatgccagtaacacatcttgtacaatagatatcaagttgttaacagaagttatctgtggaaagggaagatgaattttacataattaaaagcagacttttaaaaccacacagatatgtacaatgtttaaatattttacaatcagcaggtatacattgccttcatacttaaactcacgtgcaatttgcctccctgaaaaggataggaattatcccaaagaacagacacaagaaaagtacatgacatatttaaagaatatcaagtggtctaatgtttgcagaataagaaggaaagatgtatactggaacagagatgaggagaggattgaagctatttcagaatatggccagatcataaaggtccttctatctgaggctaaagaaatcattccttaaagagtaggaaatggggaagcaagtgaagttttcaagcaagagggcgaaaaatatcaagtttaaatttcagaaagattactcaagaggcagtataaagactgaaccaaaaggagacagaagacaggctgggagatcactcaggcaagaacttaaggcaaaatcaggggcaacagatagagaagggaagaaatttgagattcatttcagaagttgacaggacttggtgattaagctaatccaacagagaaaaggaaaagtcaaagatgcttccatagtttctagtttaggaaatcagtgatgacatcaattgagctaatgcaagaacaggtgaagtgagaagattaacaattcctgtgctgaagataatgaagttcaaatacctctggaggcagggcaagttacccaacaagaagtcaggctatttaagtttgaatttcaacaacagggtcgagaatgggagcacatgaacactattactcag

SEQ ID NO: 160659 - DNA, 1000 bp, Homo Sapiens
ttttttttttttttttccaatttaaaatggtagaatttattttaatataatgatatatatgtgtccacatatactattttaaaaataagcatgtaaattataatcattataaaacataagttagtcctaatttaatattatcagagtaaaagagcacatatagaagtcagtctaactttgttgcacttgtcttttaaagttagaatacataaaagatttagcacgttgtattttatcttatttcagttttcatgttatcatcaactataaatacccttaggaatgtaccaccttataacttacattgaaatagccaatatttcttagtagttattaaagtaccattaaatcacctaaaacaaataatctaaaaaaatactagtttaaattaaaaccctgaggaattaaaatttgttttacacaatagttttggttaagtgcaatttcatgtacatactactttgtttaaggatgtacttggtaaggcatagtaaaaataaaatctacgtaagtaacaatctaatactatatttaatttgttgctacaaagttgttttgtttctctaaaaagtagtttttgcatatcattctggacctcttcacccatctgctggcttatttgctttatatacaacagttaaaatttgtgcactaagctgagctgccttcacaattgtggttcagacaaaatgcacccaaagaactacatgttaagagagttcatgtccatgctcaaccatggcttgcacaaattgcttgaagacacgatccatgtaagtggactgtcttggccagattccctccagaaaaccaatatggcctccataagaagtaaggaccaaagcaacattaggattttgcttagcagtttctattggaatagcatgactgggtgagaaaacatcatccacagaatttagacacaatactggaattcctactgacttcagtctaggactcggactggcatcagtataataatcatcaattgtttggtatc

SEQ ID NO: 160660 - DNA, 1000 bp, Homo Sapiens
aaataataatctagaatttattttttctagaagagacttagacaaatccaatatccatcaaggtaacacgagtctatctctgagatggaaagtgtcttcctctccctgaatagagactttaaggatcactagtgaatctgggaataactggagagatactcccaattcatctagaatgactactaacaatggcactatatttcctttgagttctgcagtttagggcatagttagaaaagatttaagatgtcctttcccaacattctttccaatccattagcgtagaataactccagttcctggatgttccagtattgtagcttcaaaaaatggtagaagtactggcaggaaaagtcagggtggattccagtgaatttaagcccctgctatagaatctcttctgtgagcataataatggtgtctgggtatctgcatcacgccgagcctcctgctttagttggtggaatttgtgctgcgtccagccatatactccacagttgagtagaccctgagatgttgccgttagagcctggagaacataaagggccatgtgaagcttggtgtcctgtggcttagtcagctttatgatcattagaatgacagctgggccccagcagcaaaagaaggccactgggtagaagcgcacccgttggtccacaatgtgaatcactgcccactgttcactccccagaaagccagttgacttcacaaacttcttatacaatgtctgggctcggataagtaagaccataatggtaaggaggctgagtacaaagctgcccaggaaaatggcgataccataaaaataaagtgtgctacagacagatgtgttggcagaaggtggaagttcagccatggctgatggtggtgagtgcatcaagatacacttgtggctctgactgaagttttggaaacattcactagtatttcccagacagaatacaggtgtcatcaatagcagaggtatcaggcttgagaaaacaaaggccatttgacaaac

SEQ ID NO: 160661 - DNA, 1000 bp, Homo Sapiens
ttttttttttttttttgccatacaggttcattttattgagtggaaagcttacaaaaggtccactggccccttccctccccacgtgacactcattccttccaatgcaaactctggtgtatccacactcacttctgcgtcaccggtttcccccaacaaggcacaaagggcgggtgcttccaaaggatcccttgctcctggcagcgggactttcagtgctgggtgtcttgtgcaaatggtggctgaaagcaggactgttagttcactcagacactgggatcttccttactcctgaagaggggcttggctccaggcccacagtactcgttgtagatgagcttgaagaggaagaggtggaagagggtgattagggaggccacgctgaaccagaagaggaagggcagcccggggtcctgctgggccatgtgctcatcatgggccaggatggccttgaggtgcagcgtgtgccgcaggtcctgcaggtgtgtgaggtcggtggagatgtagagcagtggcgtgatgggctgtgtcaccatgaccgagaaggtgtggcccgtgggcgccgaggtcagctccactggctcgtccaggcagcctgccttgcaggcatagatcttgacaggctggccacgggactccacggacacgtgtaggtagggcttgccctcggcatccgccagcacggccaggttgatatggtcgttcttgtagcggatgccatgcaatgcatagctgttgtgcagcacgtcggggtcggcctggaactggaggtggttctctgtgaactgcagccccccaaagctgagcaccatcccctgcaggatgcctggggcacccaccttcaccagccccttgcagccacgcttctggagggtcagcctccacaggtcagagagctgcaggatctgctggacggaggacagccgccccggccacaggttctcggcgtgcatggtggcgtgcccgctgaagcagtgatcttcatagttgagcgtcgactcca

SEQ ID NO: 160662 - DNA, 1000 bp, Homo Sapiens
ctgagacagagtcttgctgttgttggcctgggctggagtgcaatggcgcaatatcggctcactgcaacctccgcctcctgggttcaagcgattttcctgcctcagcctcccgagtagctggcattaccagtgctcaccatcacacccaactaatttttgtatttttagtagagacggggtttcaccatgttggtcaggttggtctcgaactcctgacttcaggtgatccacctgccacggcctttgaaagtgctgggattacagatgtgagccaacacacccaccactttttctattatctttgagggaagttgaataattatcccccaaatatgtcttgtttagcagccccaagttcccatagattggatttgtctgaatgggagggtatatctgtactctgatggtcccagagaatgtggtagaaagtggtgcaggtgtcctactagtgatggtggggggcaaatgaacataccaccccactggcttcctaacggggtgcagggtctaccaggcagaactcctggttgcccagggcagggctggccatgctaccagggagtctgggaggctgatctgctgctcctgggaggaaagcctgatggggagggagggccttgcctcctctacgtcttccaggacccaaaagctcagacaccccccatccccgaacacacacacagacacacacactcttcctcagagtaaacagaaatactttgtgtccactgccctgccctccttccaggaaccagcccccgccaacaccctacagactccctcacgcaaagctcctatctccttgcctatgcttctagaacatcttgggcttccattaataatgacagtgataatttattgagcccttagcactatgctaagcacttcccatgcattatttcacctaatccttccctatattatcccccatccatttcattagtaaggaaactgaggcctagagaggttaagggggccaggccacacaactagaacagaa

SEQ ID NO: 160663 - DNA, 1000 bp, Homo Sapiens
ttttttttttttttttttagaaaacaatttttatttaaaaaatcataaaaagtactggaatgaaaatacaggtaaagcatttgaaaattatttttctggcttagactgtttactggctcgattctagctctgtcctggtaaaggcctccagaaccttcacctactattatcaagtctggcctcatagggagggacttttactgtactgaaaggaagccagctgaagccgagatctgaagcgctcagcttccagttcccggaagaaaacatcatcatcattctgtgttatcatgtcctgcagctgctgaatttccttctccatcttagatctcagctccctcttcaccttatgtaatgtctgggcctgagatttctctctggctttaagttcttgatgttcctgtgatatggcttctgccagcaatgaaaactggtccttatagtagttctccatggagtccagttcatcctggtggcgtctcctttgttcatctcgcttttctttggcatagtttcttaggtctcgtaatctttgcttttgaatgtttaaaccttcttcaaacagtttcttaaatatcatttcttcccgggtcctcattctcatcatttttgcacacaactgaactctataatcatcataatattttcgagcacgaacgatttgctgtcgattttcttttatctttgattgggtcaacctttgcctacgaatgcagtccttgaagtcttgcagtctcttgttatgttcatattctttcttgacaagggtagtaaggaggtcatgccttcttagggcttcttctatttcatcttggagtttcttctttgatcgattttctctacatgcttctttcttaagctgttcaacctgtgcaatttgctgtttccacattttgcttagtgttgggccagaaacataaagaaacggaaactgctccagcataaggggcaggagactgtgttcacttactttcattggaactgctttatttggctttgg

SEQ ID NO: 160664 - DNA, 1000 bp, Homo Sapiens
tttttttttttttttagaatcttttaaaatatgctttattaatgtcaattttaaaaaatatttgaccattacaaggaatttttatatacccccactaattaagacaagaattttgtacttgttgatgctctatttacacagttttcattggaaaactgctcttcattgctttactgtgatgctgacattgcttttgtgatgctgaatgctgagtacaagttcctctcccatttcaacctggatgggattatctaaaacaactgcagcttgtttccagtgggaggcttcacttgaagtatccaacctaatctcttcatcaaggtacatatgataccaaaatggaatagcagtcagtcttccagatttacaaacgtatacctttacttctctgttagaggtgttcaaatacggagtcattaaatctagtcttaagagttccactggcttgcttaaaggtatacagggcaatgaggataggtccaaaaatacacgtataggtacctgaaactggttaataaaaggtgctatatttaatccaagagtacgttctgttccttgaacagcattctcctctaggagtgtctgtgattccacaagcaacccaaacatcagcacatactgaggaaagatcttgcctccagattgtagtaaacacctggatattgcagctttttccattatttcctgctgaatgagcccagatggctcaatgacatccaatataattatgctccataacttgtctgattttggcctttgtaacatagcagattcatcctccacatgtctcagccaaaactcaagtgtttctttaggaaagtgattggcttcagatatgaggtccagagcaatacgatgctggtctttctccacagaactgtatggtttaacctgcccaagtgtgccagcaataacaggcagaacagagaagccttcggacacatctaacacgtagaaaggttcaaggatgttctgtacagtattactctgtccagttcca

SEQ ID NO: 160665 - DNA, 1000 bp, Homo Sapiens
ttttttttttttttttttttttttattaactaattttattttattttttacaaaaataaacaatttaaccaacaagaagtacaaaagattctggatattcaaactcgaggaagggggaaagcctggttttggctgctttgaggctttcattgaaagcaaatgaggcagaaaggccccggccccacccccgccccaggtcctggctcaaaccacacctgctccctgaccccagtcttggctcatgctgaggtgtgcacctctgcccctgacccctgggctggcctgggagtgtcccctgtcgggaggtcagagatagcctccccaggtacagaatcacccacatcctggagcatctcccgccaagtctcctgtccagacctaagctgagagaacactccacgatggattgtccccacgcagcccccaccgcctgctgtggcatgtgcagcagcagcagcaggggctttagctacattctcacactattgaacacagtgatggggctgcccacggaaccgtcccagggaggggcacagcccccagtggggagactagcctgagcttgcttacagcccacagggttggagaggcagtcatacccccatgattcctggactaggagccagcagtcccatagctaggctggtaaactcacattttaacatttggcattattgcacgtttgtcctggtcacatctgtctgtctgggatgttagctttgtctgcaggggttcccaggtgacatgcagtgctgccagtgcaagtcactccctccacaggcaagcccagctgctgaggatagtcagctggtcagccgagccctcagataggtcagccagaggccttcacatatgtggtcttgttgggatcagggaccacttggctccatccagtcttgaaaaagaccagctgccgacctgtccaggtggtctggttggtgaccacaaaggcccgacactgggcatggctctcacagacatccacagcctcagccaggtt

SEQ ID NO: 160666 - DNA, 1000 bp, Homo Sapiens
tttttttttttttttaagtgagtcttttttatgaaacaaggaaatctactaagacttattttgacactggagtgtcatgcccccatcctcaatctaacatgctactgcgttgttagagggtaaaaaggccgtcttcgtcttcccttccatgctgcacgtcattgaggacatttttactatctccaatgtagtctagccttgtgtgtttctgcgaacaataggtttccatgagtttccctctcaggagaaacgccacaaacaatgcgaagagcacaaatcccaaggagggggcgatgatcatcagtagttgggagatgggcatttcattcttcattgacatgggtattccatccatctgtcctgtttttgttgttttgttctgctcaggaactgctgtatcagatgctccaggctgaggagaagacacagaatcactcgttttccacattgacacgtgggatgttgatgggagatcccaaactttggactctttggatgtcagcaggacagtgtcagcagaagtagactcagcactactccaggaatcactggggaggacagtttctgattctgcagtgaggatgggcccttccttagaaggctcgggagtcagaagacctgtggcttcctccggaagggtgcttggggttagtgaaaggcacgtgtttgctgttgtgaagacggcaatggttgtcatctggagtggtgttccggttgtgagatcgggtgtggtcacgactgttgttggaagtgcagctggggttgttgtcatttgtcgggtggtggtggggcttgttgttgttgttctgcgtgtggtggtggttgctgttctgtgcgtggttgttgaggctctctgtagattcaggcgcacgtttatctttacatcgttgaaccagccaggcacttctatgcggcagcagtacacaccgctgtcactttcactggggtttaagatggtcaaggagacatcacctctcgggatagtcccctgaagtctata

SEQ ID NO: 160667 - DNA, 1000 bp, Homo Sapiens
cacatttgcaatgtctatttcccctcatatttccatacctattatgtcactcaacacaaaattccatgattctgtgcaactccagatgaaaaacacattttagaatttgttacaccagctactatttgaaataaatggaccatcaactattctagaaatctctttatgtcattgctgattttctctgcaacggcatccaacctgtccctcatttatccttattccaaccctatgaagtagacaggaaaaccagagctaagagatttttttctatatcacacaactcataggtggcaggtccaggtctaccctttagatacctcggagtgctgccacctagcagccaacatgaattattcaccagcaagtgggagtcacacctacaactcagaacccactgctgcatttgggatttgcaacctgtgcagagaaacctccccacatctcccaaccctccagaaaagccccagatgagaaaggagtctccacgtgcatataaatgattctttatgcccttcccccatgcaatgggggatggagcagggggaactccccgccctcatgcagggaacgggaggtcaatgtatactagtcttattgccagatgccctgtggccatggggtggggaataggggtctacagcccctttcttctggcattggtcccccttcaccaagtcaccgtggtggagctggggggctggaggccctaggagctgaggtaaagacggttctctccagggaaggaaagctgctctccccgcctgcccaccggccgtctctggatgagtgggaggagctgccagcgggtactgaaatgtcatccaggtgtctctacccagtgggcagtgaggccagacaatgtctccagcttgaggctacccacacagatcctcggtgacgggggcagcatgccccaaacaccttgtccagctggtacctccagcagccatgagagttcttctctgactgatgcattgactcaagatccctgctcctg

SEQ ID NO: 160668 - DNA, 1000 bp, Homo Sapiens
gcagtcaaatgcatttattttgtagcttaagcaagacaggtggtgaacaaattcataatgaaaatgccacccagaggttaacagcttgccatgcatgcaactgtgtgcgcaaaatcaagttgttttaataccagtgtgcagctttgattcctccatgaaattaaagctgtgttgctcacttgtttacataactcaggccaccctgaatatctgctagtggggaatttacaacccactgaccatctcagctcaaagccagatgactatcacctacacatctgccaaggtaatagcatggcaaatagtatttttcttgttctgtagccaatggcacagatacaccaacacagagatacccagaaggcacctcctctcattcagctgacaagcttcctaacatttcttggggacaagagtaccatacatgtactacgaattggtacttattctgaggcaggggatggctgtctccaggttagagcatgggtggttggaagttctcagaagagctgtttcagcacaacccaccagaaacattggccaccatgactgtgtaagatgagtctcctgacattctggtagacaaccagatcccctgactaaagcttggctcaattagggttaagtggaaggtacagagatttgagagagcctacaagagatacgaggcagtaccctagtttatactgttttatgtatagctcagcctcatctgaaggcaaagtcataaattcacaaaatattagaggtgggatggatcactctagacctgtcaacctacagttaaaaatggggcagcccagagaggtaaagcaactcaccaaaggtagagcatagtagtggcagggccagattagaacatggtaggctaatcctcacccaagaatgctgacaataggtatttggccaaatttttcaacaagcaaaacgagctagtataaatcagaggtgtccaatcttttagcttccctgtgccacactggaagaagagttgtcttgg

SEQ ID NO: 160669 - DNA, 574 bp, Homo Sapiens
ttttttttttttttttttttttttttttttttaagtcacaggcgcatttattattgtctggaacatcaaggcctttcctcccctggcagtggcacaagggagggccaactctcaggaggcggccacgctgccaccagcagcaggcccatggggtggcagggtcatgggcggcagaaacagcgccttcagcttgcctgacaggctggcgatctcaggatcctgggcttcgtaggacttgaccaagcgagcaaacttaaggacaccttccccgtcgcagctgaagccataggctttgataacctcctgctggatctgcgtggccacgggcagcacgaattgcagcatcttacccatgtcgttgcaggcgttatcccgagcctcgtccatgcgcactgcattctccggggcggagaacgcctggatcacctccgcgaggaccacctttgcttgctcagcgctcaaggccgccggttgggtcgaggcggacgccatagggcgtctgaagctctaggttcagcggaggtaaatggaaaactcacgaataaagagccacgtcctacaaccgttcccaacg

SEQ ID NO: 160670 - DNA, 1000 bp, Homo Sapiens
attgagaggaagtcttgctctgtcacccaggatggagtgcagtggtgccatcttgactcactgcaacctccacctcccgggcccaagtgattctcatgtctaagcctcccgagtagctgggaccacaggcgtgagccacagcgtctggccccttttcaaatttttcttgtattctccaggatttagggtgactctagttcttagatctttctaaaaatacaatctcaaaattcatcaaaaactggaaactcattgtttctttcatattcaatttgctttgtcagaaattccttacttcttttgtcaattaagttgctagagaatagattgaattcaggaataaaataattctcaagtttttctgtcctgaggcactgaagaaagtatgtcacgcagttatcaaagcagaggcccaggtctttgcggtcccactgactgtcttgagggttctgggtacatacgtgaaagaaggcagttttcacatgataagaagagaatttatccagatgttttttgtctttaaacctttctttcagctgttctaaaaggtatttcattagttttaaacaatctttcctgcaacatttctcttctttgttttcacagcacgttttagattttccatgattgttcaaaatttccttttcgatgtgagagaaggatagccgccatgtttcttcttggaaaccatttccttcctttgcatgcttgggtacaaggtaaaatggctttagtcgtagttgcttcctaacttttgctgaaagccagttttgaatgcgcaggccttcttgggtgctagcaggccagctactttttgattccaaagccagggttatatccacagatattttttcactaataagaagtgttacagcagggctccctcctcttttcctcttcatgatgacatctgtatctttaatgtcgttaatttcttccttaatgattttcctaaactttgacagcatcttagaagctgataatatttcaccttctaaaa

SEQ ID NO: 160671 - DNA, 774 bp, Homo Sapiens
tttttttttttttttttttcgcagtgcataaaatattttattcacattttaactccactggagtcacagatgaagtatcatcttctattccaagaatgaagtcttcaggtactgtctcaggtgctatctgagctaactggtcatcataagaacgtagggtccataatttctctaattcatagatttctctggtttctggaagcatcaaatgaatcaccatgctgccaaaatccacgcacagccagtcatcagtgtccttcccttctatcttaacatgagggtcacgtttacatttcaggtgtttgtacattttcacaacgtagaaggccatggcatgtaagtgtcgggtagaagttccactaacaatcacaaagtaatctgtatatctcatttctggaggaacctggatcacacaaatgtctcttgcattttcttgcctcagaagtgaaaccatcatatcgatgtcaaacttgggaccagtatgatctgccgcgtccgattctgggcgtccctcgttgaccgtcccctccgcccgctcctccagcccaggctcgctgtgcaggccgcggacaaagtttggggtctggcaagcccggcagaacgctgctcctacgggaagccgctgcacggccagcagccgaagcccgggctcggctccaaccgcggaccccgccaccgaggaaaccgccctgcgccacattagtggggcgagcagccgcgccacacggccgcccggccccatagcagcagccttgcgtcggcgtcgcgggtggg

SEQ ID NO: 160672 - DNA, 1000 bp, Homo Sapiens
agagacggagtctcactctgtcgccagggctggagtgcagtggcgcaatctcagctcactgcaatctccacctcctgggttcaagtgattctcctgcctcagcctcccaagtagctgtgattacaggcgcccgccactaagcccagctaattttttgtatttttagtagagacgggttttgaccatgttggccaggctggtctcgaattcctgacctcgtgattcacccgcctcagcctcccaaagtgctggaattacaggcgtgagctaccacgcctggcccaccattttgatattttatacaataatattatgtccagaaaattactcacactgaaatctctcaaaatgtatttatgaaggttaattcagtttttccaaggcaaactcttttaaaccaaatgaaatgattcccaccacaacattatagacactaaaacataacacaagcataaagataaaatatggaacttcagggacacagaacaaatctgaaatatgtttaattatagacaactattgacttagaaatggaagggagagaaaagaactggccctggagatagtttacttggtgcttctgatacccacgtgcagcagcaagtcagcaaacaagccccgagagaggctggaggctggcccagaggcttgtggctggggtcttttatcatcagccaaatccagctttgttcaatgagggtcagaggactccagaacctatcttaaattgtgtgagtgttcctctggaaggtttcaagtccaaagtcttttttttttttttttttttttttgagacagtcttgctcagttgcccaggctggagtgcagtggcacaatctcggctcactgcaacctccgcctcccgggttcacgccattctcctgcctcagcctcccaagtagctaggactacagatgcccgccatgacacccagcaaatttttttttatatttttagtagagacggggtttcaccatgttagccaggatggtctcgatct

SEQ ID NO: 160673 - DNA, 1000 bp, Homo Sapiens
ttttttttttttttttttttttttttttttttttttttttttttttttttttttttttttttttttttttttttttttttttttttttttttactttcattagtgttttcaatagtgtgggcgcaggctcagaaggtggagaggctggcctcagaggacacccaggcttggggctaagtcccagtgtccatatgaagctgtttctggccttgtccgtttttgttgtcccaggctctgtgcccctcactcagtcaagaacttgtctttgtgttgcttcttggggacatgctcagggcagaagtcagagcggaggaggcgggaaaagtagattatgatcatcacgtccagcatgagcaggatacccagcaggaaggtgcccagggtcctctggttcacataacgcaagaagaaatgggtgaggtaggcctgaggggccaggcggaagagaaagtacatgaccaggttcacatacttgttaacccggtagaggagatgatcctgggcattactgattttcatcatcatgcgaatggtgaggaagatgttgctgacttccaccagtagtgttaagacacccccaccgacaaagctgctccaaaagatgccggagaagaaggcacccatggccatgacgtgatggacaaggtattcccaagaggctcgcgtctgtccgctagccacgatgtccaccgtatcgtggatgaaataccccgcagagaagcaaacgagcaaatagccagaaagtgaccacgccgtctcaatctccactaacatgtcaggagtctgccatacacacagcagtgcccagatccccgacacaatggagtgagcgaaggagacgagcaggttgtgccagcgccaggtgcgcagggggtcggcgcgcacgtgcacgggtaggggcaggcgacagagcgcgcgccggagcgcccggaaggtcagcgtggcgcccaggagcagcggcagggcggggtgcagcagtcggggcatgctggccctccct

SEQ ID NO: 160674 - DNA, 1000 bp, Homo Sapiens
ttttttttttttttttcttttctttctttattctttttggtctttaaagtgacaaaaaagaggaaaaggaacacgctcttacaaaacagagcaagtttcttttccttgtactgttgaagcccggtttcccaggggccgcccttggcctcctccacacagcactggtcactcgtagcagcatctgcaggccaggtgccaggtgcccagcgggccccacgctctgggatgaacttggagtgggagacggtgggtgggtcccccagctctcaagtgcacagagaccccgcacccaagggctggggaagaatcccacacgtgcaattgggtttttctgaagcctgcgggagaccaagctgagtctgcgagacagctgcctccaggacactgcgaggcagggaacagctgcccacaccagccgctgggcgaggccggggcgccaggcctggttcctccatgggaccccagcatgcgggcagcaggtgaggccggggcggcaggcccagttcctccatggaaccccagcgcgcgaggcagcagcagccagcagccagcaagtcacgagtcccgactgcctcgtgagccagggcagccatgcgctgagtggtgggaagaaatacactcagcgggaggagccgctgggctcagggccatcccctccctggacacactgccggtccccggggggcctcacaccaggccgaccaccgtgcccagtgggctctgcacgcagccggccagaaggctcacagggtccccgaacagagatcggaagctccaggacagcaggtgcgccctcatcgtcggtgacctggtcagggaaccagttacgtttcaaactgggttaagagctccctgatttccggggccacgtgtcttgcggcatttgcagcctcggttatagctttccgatacatccccttcttcttacgattaaatctcagtttgaaaaattcagagaaaggggagagttttgaaatagacaagaacgacgtagtcggag

SEQ ID NO: 160675 - DNA, 1000 bp, Homo Sapiens
ttttatctggcttacaattattaaagcatttattttcaggtaccaaaagccatatcccattccactttttaagtttcttttgatcactgacaggcattaacagatgtagcaacgtggtctcctatagagaaaattacacttatctaaaaatctgattccattaattgatcaagtataaaaatctacgaaaacaatatgttctgcacatcacatctgtacttttttttttttaaatatattttttgagacggagtctcactctgttgcccaggctggagtgcagtggcatgatcttggctcactgcaacctccgcctcccgggctcaagggattctcctgcctcagcctcagctggtattataggcacttgctaccatgcttggctaatttttgtatttctagcggagacgaggtttcaccatgttggccaggctggtcttgaactcctgacctcaagtgatccacccgcctcagcctcccaaagtgctgggattacaggtgtgagccactgtgcccggccacatctgtacttttaagggtacagctttacagtacataggaatttgagaaccacttcacaggaagagggaaacagcccaatatttatttatgtatacacataatcccaagtgtgtgctggggccaccaggcccttcctgggggaacaaggactgtcgtgcatgtgagtgacgacattaatagcatttacatactgtacagatgcaacctttgatgatacatatatttgataaaaatgagaaaacagatttgttgtagagtacctgtccacttttatagcatgagaacagtacaatcaactatttattttgcagttactcatttcagtgattgagaatttctgtgctgtgcagagagacggcctgtaattggtctcatcatccacttgattctaacatgatctctgcccaaagttccatttcttgggctttgatatttataatggcgcctgctcttcatcttgtcttacgctttccgagca

SEQ ID NO: 160676 - DNA, 1000 bp, Homo Sapiens
ttttttttttttttttttttcacaagggataaatagaactttattttaaataaacatttgcactctgtacacagccccagcagaagcagggctcagtcgtcagctgtcttgcgcacatcaaagctgccacagggtcctcgcagcagctctgccagtagcgcaagcagctgcccgtgctcctcctgtacgctggggggaagtgcagccagctcgctgcgcaggctccgctccaccatgcggcccagggcccgccgcagctccttcagcagccgcacggtacgcgagtcaccctccagccgcagcaggtcactgtcgctcagtgagatggtggcccggcgcccgtcatcacggatgtgcacgtccccgtcggtcagcagcagcacagctagcgggtgcacctgagaggagtcccggacgaagacgctgccattggacttgactgccatgaaatacgtcagccatcggctccgtaaccgtgtggcctccctgttaatggtcgacttgtgcagcaggatgttgcctgatttggtcctatatgtgacgctgttgggcttgaacttcccctgccgggtgaccttgccctgcctcacctggatgaggttggggtagaggccggccatcagcacgcccttcaccagctcctcctcctcactgtactcgttgcactgggcggaggccagggtgcagtccgagggcttccccaccaggaaggcctcataaatgttctctgagaactgcttgatgagtccgtggatgaagcgcaggctgggtgcgtacagcaggttttcctccaggtaattctcccgggagctgcggtcctgccaacgcagcacctcctcccagccggcgacagcccgcacaaaggccaggtggtcactgccgctgtcatggctcaacagtgctttcaccttgtccacctctgcccggttctgtaggctgctgctgaaggggtcccgggtgaggcaggaaacgaccaccagtagtgggtgcaggcaacgga

SEQ ID NO: 160677 - DNA, 1000 bp, Homo Sapiens
ttttttttttttttttttttaactttcagtgttttatttttgactgcagctgtttacagaaatatagttgcgagtatacaaatgttccaatagaagcaaaatatctttttaatatttaacaagttatcacagatagctaaaaacatagatgcaaatgaaattcccccagagaacaaactgaaaatatctggtatcagtgctctgaaatcccaactatgaaagccatatacacaaaaatgtaacccttatatcattgcaggacaatggaagaaggcagttcagtggttgatcagtgtgctcaagcaaataaaattaaataaaaattaaaaatggcagaatggtagctaaaccacttgagaacaggttaatgaaattattggtactatacttaaaacattaagtaaaagaagtgaatgaaactcatttaaagttgtcaaaaaattagcaactacttggagcttatcaattaaaaggaaacaaggtaagcagacacattcattagatcaaaagaaattagatcaagttcactggaatcagtctgtaactactcaagtcacaatgacttcagtgcaggagttttttactggacacagaagtctgattccaagcccactcttcaacagctgagattttgtgtgcgtgtatgtatgtgtgtgtgtgtagacgttgtcctgaggttcatcagctaaaataatataataagcaatccctacaaaatatttcaaaccaggcaaatgacttctggaagagagagaaaggaaggggagagggagggagaatatgagtaagcaagcagggtcatatggttaaacatggaattttttaaaggagttattacaagtgggagtcaaatagaactgtggtagaatgctttgggtacaggaatatgttatgcaataaagtgaggaagagaaaaagggaataagaagggaggaatgtaactagagcagctcccaacagtttgcctatgtatttgccagcaccaaaatttgtagagtaa

SEQ ID NO: 160678 - DNA, 829 bp, Homo Sapiens
ttttttttttttttttttacaattctccgcagattttattaattataactttttttttcagacgtcctgccatcttctcattcagacttttcttagcaaaggtagtccatggcaagtaatgaattcccagtaactaggtctgtaacagaagtaaattctgtttttatgtttataaactcaaaaagtaacatgaagtgcaaacacctttagttccttcccctcggtaaccttcttttgatgaaccagtgtgcagcaaaccaggatgagttggatttgggtgggatccacacagtcattttcaggcagatgagacttcctaagttctatgtatagattcatattatcagttattttatgcattcatttctcctctgtcttcatgtctctcccttggcaaagttacttggaactggtgtacttggtgacggccttggtgccctccgacacggcgtgcttggccagctcccccggaagcagcaggcgcacggccgtctggatctccctggaggtgatggtcgagcgcttgttgtaatgcgccaggcgggaagcctcgcctgcgatgcgctcgaagatgtcgttgacgaaggaattcatgatccccattgccttggaagagatgccggtgtcgggatggacctgcttcagcaccttgtacacatacactgaatagctctccttgcggctgcgcttgcgcttcttcccgtccttcttctgagccttagtcaccgccttcttggagcccttctttggggcaggagcagacttggtaggttcaggcatcgtagcgttaatagttagaacactgttgcaaacacctgagaaaataatc

SEQ ID NO: 160679 - DNA, 1000 bp, Homo Sapiens
ttttttttttttttttttttttttttttttttttttttttttttttttttatgtttgatgtatttatggcagcaactatatacaaatcaattcctttaatttacaacaaatatcttccattgttcagctgggttagcacaggcagatcagagatggtttcttgtgtgttttacaaataatctacacaagtccttgagatcatacttacagctttagcaaaaatacccatgatttcaggaaactggtgagtgagaatggctatcattgctgtagaagagcaaaatcctgctgtgaaatggatgaacaaaggaagctccttttttgggtaaacagaaacatgatgaaaggtaggtaatagctctctatcagccgtctctgtgcagctgggataagggtaaaatagatgtcctttctctaacgggtatggaatcattctaaaagtgccttcccatgtacactgtaacagattaagagcaccttctattcgtttccagtgctgaagatgaaagaaagcataggcaattgcttcactatcaccccgtttcagaatgtgttctggaggtaaaattaaacttttcatctctaataaatattttggaacatgaggattaaattccacagctctatgaattgcttccacggcattaatttctgctgtgcttaatcctcttctggaggctgtttctggagagaatttttctgaaacagtccttgtcttcaacagtgctgctgtgtaacagattgctgctgactttggaaggcttatatcatcatattttgctaggactgcctgaacatctggataggcctgtaattctaaaagtgattctaagagattttcatggatgttcaacatggtaagaggaggaaattctttcatcaaatctctcattatttttactgcttctcttattcttcctaattttcttgcacacattgccaatcttcttttaatatataccagtacattggtatctctcctcagttgagcttcatgctg

SEQ ID NO: 160680 - DNA, 899 bp, Homo Sapiens
tttttttttttttttttttttctgcagacaagtaaaccttttattttaaaccacaaatagtcagcaggtggccacaactatccatgtttcattaaaatcacataaaacctaggtacaaaagcaccactgattattgctctagaaaaactgcatgaaaaattcaaatatgcacagtaaaaacaccacagtatgcacaggactaaattttaaagcaagtgcatggaatgctgaatcaatcttacacacagcttccaatatttaactgatatttattttacttgaggatgatgtaaatttccaaaaagcatgactatgagacgataaaatgtccatccttatatattttcgtatgccaactagtagagtcctaaaaaattagcatttacaaaatacttggtaaaaatagcttttaaaagttgtcccaagagatacataaaatcaaccccaatttttcatgacaattcattctccctcgttatctacagattcagttttctgtgccttcctttccagcttcctgcttttcctccttcttccctttagcacctctgctaatctttgctccaggttctttcttagcagatgtttttcttggtttgggttcaggttttggtggagcaggtttcgctgacaatctggcagaccgtcttgtgggctcctgtttagttactttggatccatctttgccctctgtattctctggagactttctcttcggcataatgactatgtcggtgaagcaaaaagtaaagcaacggactggaactgctggcgccgccgctggatgctgcctctgccgctgcagctgctcacgcgcagggcacgacgtagcccggcctcttcgacctgcacctccgcggctccctctgggggccctctgctcgcctccctgctgctcc

SEQ ID NO: 160681 - DNA, 1000 bp, Homo Sapiens
ttttttttttttttttttttaaattatatattacatgtttattaagagcacaacttttatgtaaaatttacatttaatgaaaaaaatcaaaaatatttacaaaatcttggaagacagatgtgcattgttctaattacaatccaaagtagtaaataacaatcctttaaaactcacatttattagagttgtgtttacaaattcttggttaaagaggcagctacaaagtttatcactatatataagcaagaaccagcttgctaggtacatttcccattgaaaatctactggtctcttttacaccattagtggatttttaaatggaaaaaaaaaatcaatataaactcatatggcttcaaaattgtaacctgtacccaatacttggtatgaagactgtggtaactaagaaagtgcagaagtttaaccatttcactaatttgtacatttttaggtaatacttgattaaaaacaaacacggtaagaacagtgtctgaattccaataataaaatattggctgccctaaaagcagtttgattgcaaagcaaattacagttagaattccagtaagggactgtaattggcatttaaaagagcacaatataagagttagaaattctaatttagctcactatttagtaaagattagcattttagcaaattatcttatgtgctgctttagtcaaatgtaaattcagacttgggctaacattgaatatataaaaaagcatatactgtgttatatattgctaaagagtagattttctgctgtatttagtacagcaagatgttacataaatgtctagtaatagaggttttattttctgtgaagcttaacggaacaattagtggttttatataaattatcatatataacacaatttatcacttctactaggcaaataaaggacactcatatttattattataaatgaaattcccatttgtaaattatgaaaccttatccgaaatattttatttcttcaattaatcaagatttgctac

SEQ ID NO: 160682 - DNA, 1000 bp, Homo Sapiens
tttttttttttttttttttttttttttttatcagaaaacatttacagtatgtaccactctttacttaatccttcctctgagtttagaattttggggtgtttccaattttccagaatattaaataatgttgcaatatacatatttgcataaaggtttctctcatattcttatttacttccctagtacagattcttggaaatggatttgtttgatcaaagggcagaagtatttctgaagtttctgatgcatattacttaaaaaacatactaaatggaagggtggtatacttgcatgtgcagtgaggactgcaaattttttacaaataaacaccaaatgcagaaagcaccatcatttcaatattgccctcaagtctacacagttgatataatatttagatagatggccatgtcttgataatggaaaacattttgtccttattcaaatgattccaggctggaagatcactgaatagcttccacacagtatcttggatagttgcatgactactctgatgaggcagatgatcacttgaagcccactgagggttatgagaatggaaaataaaatgatgttccactccacaacatgtgcaggttccaggcactgaatccatatgctagaatctgtaaggaaacgtccagcagtgccttcaaaagcatactcccagccatcaagggtgcggcaatatggcccttggacaagacccaaggcagagatgaccaggcagtatccagaaaaagcaattccgagggaagaaaagataattgacagcagtgtcacatattttttgctgcagttttcactctggcaacatttatagttgttattattctccagtaccagaagaactgttgttactataagcatcatgatgcctgagaaacagattccttcaaaataccacacgtagttggtgagtttattgctggatgcataggaagtttgcccattcgggaaatacaataatatgttcacgattatactccaaagtgcaagcgga

SEQ ID NO: 160683 - DNA, 1000 bp, Homo Sapiens
gcattgacactaactgagaggcagcaaaggcggtgacactcccccaggctctgtgggcccagccctacccctgaagcacagttaactggttctggggtaggaactgggggccggagggacagggttctggttctggctcaaccttggctgctggtgagatccagggcctgggaaagaggggctgaggcctgaactgggcctaaggagagtgcagctcagttcgcacacaacagcacccagccctgtccccttgctgcctctacccagccctgggcagttccctcaacagagctctgcagccccaagtggcagctgctggctcaaagctgggactacatgaaagtctgaaaagagaatgagaaggaggtggcgcaagagcctggacgcacgtgtgggaggccgttttgtgcagcgccattgtgctccccgggcgggcatgtgctcgcgctccgtggctctgttggtgcccagcgtgcgggggtgtgctggtggccctgtgggcctgtagggcaacccatgccaactgcggaaaagtaaccagcaccatacaccccccccaacacaaaactggtcatttattttttttgttgtcattgttattaggaagcaaaaaaatgtacagttacaagaatcattttccaaacagaggttaaatatgagctgaaaagtgtaaaaaaggaagaggaacatcactttacaaatcattaaattaaacaaataaacaaacagaacccaaagaaccaaccccccatgctgagttctctccttgtgcaactctgcaaaatgagaacagaaaatgaagtgggccgtggaggtgggggccctggggaggggcgggagctgggagccaggaacaggcaggagggggctgctggggcatggacgctggctttctgccccgtgtgcctggtggtttctggtacctggtcgtcgtacctggtggctctacccaggctgggggtcgaggggaggggcccccagaggcccctgccagcctgtg

SEQ ID NO: 160684 - DNA, 1000 bp, Homo Sapiens
ttttttttttttttttcaaaattttatagtttattgaatcatagcaagtatatttcctacaggatcttcatctgtgttttcctttcagaactgttaagttttaaaatgcagatggcttcagtttcttcttctgacgcctttatacaatctgtccagcttttgaatataattttccatactttgagaagagctcaaatgatggtaatacagtctggaaatccttgtcacagatccatttcttaggattttcacttcggaattgttctttgtaagaaataggaccatacttgcttgataaatgcattgatgggatgtacttttcatttttatggtatgaagaaaatggcaaaaacatattgtcatttacattttgcagccattcctctcttctgagctcctctctggccaactttaactcatcgattggttctgccacccgcaacgttggctccaaaggcctgtagcgttgttctaatacttcggtgatatctcggaagggcccctgacattgctttctattaataggtggtagaatttcagaccgaggaaaagaacgggcgcttgtacaagctagccaatcagtaaggctggtggagtccttctgcttaactttaggtcttcggtgtgttaaaggctttgccttttgtaattgcagctcccatggatcaggctcttttctgaagggtgaattgtatattcctggaatctgctttgtgctgaggaggtaatgcatctttcgggcttggtaatctcttttcttctcttccctttcgaggttagccttcttctcttctctttctttcatttctgcaaactcctccagtgccttcctaattgcatcattggtctctgaaacgactttcaggtactctttcaaataataataattaaagaggtacttccgaaccctatagcctcgccatcgtctctgaatcctgacagccattgcattgtagagattcatcatcatagtataatatgctacctgcacagttagttg

SEQ ID NO: 160685 - DNA, 963 bp, Homo Sapiens
tttttttttttttttttttttttttttttttttttttttttttttttttttttttagtagaaatataaaagtttattgttaaattcatacattataaaagtgatcttttaaaaaaaatccaatattcacttaaagtagacataatacaaattaggctaccacccatcatatattttttgtatgcttcttatgaaaaatgtctactgttgtttcatgacatggtcttaaatcaaaatcacaatatccaagggaaaaacgactctgtggtttcttaaaataatcaagtccccttccaatcttaatcatccatccattgttgaacctaatttctcggtcatgtattgaagaagagtattgaacttccaacagcactccgtgactcctgagtgactcttctatttcttgcaggcctctactttgctgcacttgctcaatgccttcatccagagaggtgagaaggtgaatagtttttactttacatggtctcttaataagcatctcacaaaatcgaagaaagttatacagctgatgagtatgtctaatataaggatcttctatccaaacttctgtaactgtctcattaaggtattcgcgaaaaagtgactcataactgaaacctgttgcattctcttctattttaatttgcttgtgatattttccatcttctttttcttggtccaagtacttctttatgttttccgctctgtccatgtatttggaaattttttctctgagattacatctcttagtattatctttggtacctttcagaacctgcaggagcagatcaatcccctcttggtaacacaccagagcctgcggataccgcgactccgaatctagttctactgcccgctttagcacagtggctgcagctgtgctctgcgggtcctgcctcagcccggacttcgccataattctggaagttctcctccgcctcaacccaggatgaagttgagcggg

SEQ ID NO: 160686 - DNA, 1000 bp, Homo Sapiens
gtgagacggagtcttcctctgtcacccaggctggagtgcagtggcacaattttagctcactgcaacctccacctcccaggttcaagcaattctcctgcctcagcctcccaagtagctgggattacaggtgtgcgccaccatgcccgtctaatttttgtgttttcagtagagacggggattcaccacgttggccaggctggtctccaactcctgacctcaagtgatccgcccacctcggcctcccaaagtgctaggattacaggtgtgagccaccatgctcagccaacataatttcaatgcatgggaaaacagaggaaatttatttagttatcaatcctttcctgggtagggttagccttatcagccggaaaacacttacttttagataaataaaaatagattaggatatttctaaacttcaaaaaagacacatgcccatttttgctgagacctcaaaagctgcaagtgcatttgcttttcctttcttctttaaatgaagtattatatagcataagccagatggttgccttgtctttaacttcatttgcaaatttattagtgactccaccccccgaaaaaaagagagagagaaccccatcacagaaaatttgcatttcattaaaaatttaaggcaaaaagtaaaagtaagttccatacataggtcaaacaaaggtgaagtcagaaggctttgccccctcccctcctacagggcaggaggtacaatctggggctgaggccactccactgcctggcatcaaatcccactcttctgctttcagctcctgtggccaccacagtcctctgtgggatcgcaggagatgcttagtaatccaaggcaagattagttgtggtaaaaatggcccataaaataaaagcacatttttccacttacagaacctaaaactcattttagtaagagttcacagcaaaattttaatgtgagaagagtttgaaactgaatttatattattcttaaaaaatgtcacccagactcagtgac

SEQ ID NO: 160687 - DNA, 1000 bp, Homo Sapiens
ttttttttttttttttgtttttttaaaagtttttattatttatgtagagatggcgggggggtctcacagtgttgctcaggctggtctcgaactcctggcctcaagtgatcatcccacctcagcctctcaaagtgttgggattacaggtgtgagccactgctcccagcccagagtaaacattttataaatggtagctattattctgtggatggagggagcaacaggaaggttggtacatgtggggagagggtaacaggaaaggagtaggtctttttttacaccatcctctcccctgttctgggcagccctcccaccccccagcacacacactttgcatgtaggtaccaagcacttgtctctttggaggctgaagcctggtggtgtagtgggaagggcacaggctctgaaatgaggcttggatttcaatcttacttgtcttttatgagctttcaaaacctcatccttgttcctgaggtccagtttaccaaaggtgatctgacctcatccacctgcttacacagagctacaagaagaaattctgagttatgaatgctcctaacaatggtagaagcttactgggtgtttaatcttcacctgtgtaaacagtagcaaatgattctaaagaaaatgaaagtccttgctggagaaaggacaggctcgggtgtgtcgcttccagacttgaggagtgggacagcactgaaacaggacaggaaggctgttgtttcccagtcagccctcactcacagaggctcaggcggatagagagcaagtctgaccacagatagccattatgtgaacctgagcatggatatggttaagctgggcagctgggctctggtgctggtgacttagggccttgagggatccttctcccactctgaaggcaggaagaaggcatctgaggaagatttgctggctgctggcatcttggaggctctgcctgggacaggagtcataggcaggggggccacagtagctcgagctcggttggtctgcaact

SEQ ID NO: 160688 - DNA, 1000 bp, Homo Sapiens
tttttttttttttttttttaagaaaagttctatgaacaatacagggtggtacacagaaaatatggaagtgaacctaatcacacatatcataattgctattaaacaggttaaatatacacccacatctgagtgtttgttttaggctttgttttactgagatgaatgaaagagcattcatcttgagaatccaggtttggcatttttcattgacttagcatagtgttttcacccaaataataacctgccactatattccaagtcaaatgtatcacaaagaagcaaaggactatcatggacttatccaatggagagagttacattccagttgctcagactgcaattgtgggaaatcaatcaatgctaaaaaagcattcccacccttacctcaaggttcatgctcacagtactaatggccacttttatttctccatctgacagctcctttagatctttcaacattgtctgttcaatacttaaaccctgagcactgaactgggtctcctgtaggacgttgatgatgtcctctcttggaggcaagttaggaaatttttcttccaggatagaaagaatttcctcctgcttctctgagatcttctctgattccatggtcatccacttgaaaagaatgctacctctgaggcgatgagccagttgctcggtgatgagctcaggagcctcttggagaatctcctttagcacgagagaagaggaagactctcggaactcaacgttggcatcgctctgctcaaccggattaatgactttgacaactgctgattctaaagttttgtcttcactcgccagcacactgctgccaacaagtgttatcgataacttcccttcatcatttagctgatgcaggttaatttcatcccggaatatgtggaatgattcggaaatatttagctcttctaaaataaacctcgtctcggtgaagtagttgaattcagttcttggtatgttcagcactggtaaacacagaacccctggtggactgacc

SEQ ID NO: 160689 - DNA, 1000 bp, Homo Sapiens
ataacccagaaaataaaacaccacgtttattccagagaagtttgtatttgggccttaagcttttgaaaataaagtttagagacatagcatatgaataccactgtaatacacatgaaatattctatcagaccctaaaaattaacataaacttttaactttctcatagtcaacaaaatagtggctggttgccaattttattagataagttggttacagcattttaattatcattttacgtctatctaggtgtagctgaaattcaaaatgcacatcaaagtaaaactatatcacaactcaatgccatactaaatgtactggcctctgcaatagaattctagtcagacttcattttttactcccttcttatgacccaagtggctttaacaggaatgcaggacttagtgctgatcatcacacaacataccactttctttttagaacctctacaaaattttgaggggagatggtggcattagccctgtggaacagatcttgatcacctcaataacactggcccattatctgtccagcagaacccattgtgaaatagtacaaggtgcacagcccttcactgattacaggcaagtgttacagtagcctagccataaggaaggggagttacatcatagtacaaaatacagtataaaagcgttatttaacattccacactgaagattactctgatgccttcaaacagtcgtttggatgttagccacttaaacaaatacatcactaaggtaaacaatataaacataccaaaaccctgtatggttaaatacaatttccatggtacaaaaatcaaagcctggagatgtttttacagattgctttttacacaatgtcttaaattgccaaatatttacaacattaaagaggaaatacattgtgatgcagagtaaaattctgaaatgattattataaaacctcaatctatctacgtgaggcactcctgaagcaagtggcattagccatgaggtcctttggtacaaggcccattgct

SEQ ID NO: 160690 - DNA, 1000 bp, Homo Sapiens
ttttttttccagtttgacttttcaacattttattcttatatttgtacagctatattttacaacgcggtaatgcagtttagacacagccaaaccctgtctccggagtagttataacacaagcatgacgcagaatgggatgagacaaacattcccaaagagagtttagttagtaacaacttcaagtccctgtgtctgcctacacttcaaaaagggatggtgcacgctcgcccatcattgaaaacttccgtgaaaaaaggcaccgtgaggacacgttgtacgggtatatacaaactgaaaactagaacaaaattacacatttttccttctgcagatttttttgttctttttgttttttttaatacacactttgtaaattgtaaaccttcacttgcaaaaaaatacaaatacactgaggcattttagacaaaatattttcttacttatacagatgcaatacttaaaatattctcttaagtgctctttctcaataaagattctcagatccgtgtctgcctgcagatacaaaatcgagcctttaacgcagttttatatttttaatatatctttgttaggtttatatatatttattttatatatatatatatttatatatttacaactctgccatatattccttcacctttggttaaaaaaattaaagccctctctttgacaacatactgaagtcttgtcttttaaaagaatgcacatttacatacaaaagaaacatctgttcccacaaaacatatacattcctcattttgcagactaaagtcaagtcagaacttttgcatactcccctgctttgacatataaaatgattttgctttttgctgacatggttcaccttacacataggagaagaagcaatatgattttcttaatgttttatggcagtgggggagggggagctgctgcggctcccagtcccccaggccccgacccccaccacccccaacccccagctatgatttgcactagtggatgaaagaggcactac

SEQ ID NO: 160691 - DNA, 1000 bp, Homo Sapiens
ttttgcgtggttggtttttattaattatctggataacagcaaaaaaactgaaaataaagagagagagagatctgggtgttggtggttgcatttgttaaggaattgaagcagttcttgcccaggcaacctgcccccagccagaagactcaggggcaggccaagaacacaggcctccccctttcttcagctctctgaagtttccattgttcattgctctttggtggctgatagccttatctgcagctcacagtcggccaatcccagaggattagtgggtccggtttctgtataaattagggggcaggggtgctgtagaggcttcttatcgatgattgacgccgaggcccaggctgttgtcctcacaggagcaggcacctagcctctcctccagcagcagcacctggtcgctgagagattcgatccggtcaccccggccccacagctcagccacctgttctggctgcagctcttcaggcggcacgggcagcaccgctctgacccaggccccagcctgaccggcccactgctccagccgctccaggcgccctcgcagctcgtgaatctcctgcttcagagcgcgctcatctttttccgcctcccgaacggccacgctgagtatgctggcactggttgggggctctggggacccctccatgcaggtgcgcccgtccacgcctagcactaggtcatgggggcagccgcaggtgaagctgcctgccgtattaaaacaatggtgcgagcagagggtgatgctggtcctacattcatccacgtccacatgacagtgcttccctccccagccgggggcgcactcgcactggtcaggcctaacgcagacgcctccgttcaggcaaggcttggcgcagatggcttcacaggtgagcgcccccgggtgccgcttcttccagccctggcagcacactgcatgggtctgctgaacctcccgcctcacctcccgccacataacgcggtacatggtcctgtaagtgctgcagatgcg

SEQ ID NO: 160692 - DNA, 1000 bp, Homo Sapiens
tttatatgtaactttctaaataatttttaattctaaatttaaaaaaataccttccaataaggagcttggaaaagaatacaaaataatggaccttgaggaacataatattctagaaacaaaaggcagcgcctcccttgctagagctcactgtattaaactccaggtacctgacaaatttaagatctgtatcctggctggaatctagcagtctcttcaaaaattagttctttgagcttttccttaggcaagtcatccaattccatgtcgaacttgaatggtgcttcggcgatgggctcgtcactcgggtcgtaatactgctccagatatgggtgggccagagcctgttctacttcaatcctcttgtgtgggttgaatgtcaacattttgtccaataagtccagagctttggagtcagcatttgggaacagcctgttccatggcaccttatttttgtgtggaagagaaagcaaatagttcctagcttttaaatttattatacaattcaggtcttcttgtgatggggatccaagaatacccaaaatgtggttcagctggtcaagataatgcttccctggaaagatgggcctgttagaaagcatttctgccagaatgcagcctacagaccaaatatcaatggacttggtgtagcccttggaattcaacataatttctggagccctgtaccaacgtgtggccacatattctgtcaggaaccctgtgtgatcatggtctggatctgcaacacgggccaggccaaagtcacagatcttgagatcacaggtggtgttgagcagcaggttggaaggcttgaggtcacggtgcagaacgttagctgaatggatatattttaaccctctgaggatctggtagagaaaatagcagatatggtcattgctgaggtgttgtgtcttcaagagcttgtaaagatctgtttccatgaggtcctgtactatatatacatctttcatttgctcgatggttggtgctcgaataatgtcat

SEQ ID NO: 160693 - DNA, 1000 bp, Homo Sapiens; identical to SEQ ID NO: 157694

SEQ ID NO: 160694 - DNA, 1000 bp, Homo Sapiens
tttttttttttttttttcatacaaacattatgtatctttatttaaatttgcaaatgaaaacaacacatatttcatgttagttttaataagagattccctatcctctgccccagtaaaacctaaccaagccagcctgacaggttatatcaatacagggagctggagtgggagccaagggtggtgttagataggggtggggtacagatcaagggggcctgggagactcagtgactggaagtctctgcccctcactcttggtgagtagctaatttcagcagctggcttcataaggaggagtcaggggtgggtggaggctcctcccaattccagatccacttcctcttctccttctgtctcctggacacttaggtcttactgagatggttttcccacagtaaagagaggtgggggcagagtactaagggtcaggagtgtgactctttcccatgactcaggcctctgtgctagaggtgacccttataggaaggagagaccccaaatcctttagccaatgagtggtggggtcatcataccagagagccagcttgactctgggcaggcatcatcacaggcacagcacccatgcggctcaagccagaggaagaaaccccaccagggatgggggatattggttgagggtgggccccatctgtcgtgggcagtcttggtgagggcagggcctggctggagagactgggcgtgggggtcaatgcaccaggcctgggagggccatggggtggccggagggctcgtgcggaggtgacagaggaaagggtcccattcttggagattgtgtctgagctcttgggccagggcagggttcggggagcaatggcatcctccttgatatcattggctggctcctccagggccttgccccggcggtggtacaagaggaccagcccagccagcaaccccagtccaaccagggtacccacaacagctccagcaaccactgcagctccaggccctgtgctcacttccagcgtcacattacatt

SEQ ID NO: 160695 - DNA, 1000 bp, Homo Sapiens
ttttttttttttttttgtttcaagatttattgagtgggtgagaggacaatggtccatagcacagaaaaagtcaacaggaacaaattcttggttttcagaagtcacaccaggaggaggcgggaggacacggaggatggccactggatggcctggcctagatggaagaaaacctgtcttcctgggccatggcactctgtggcactggcagggcagagccagctgaagggtcttcaactctggatcccaagtccccagagccacagggcttttcctctgcccacccacgctgagggaaaagtcgaataatgttgtgctgagacaataggggcaagaaggtccggccatgagtcacagggtgacatcactcgtcactcttggtctgtgatcaacccccaaacaatcatgaggaggcccctccaggggagctgggaccccaggtcattgtcctgagaggctcagtgcctgcacctcttggggtttcctctaacagtttccagacccaaggcagcatccctcaaggatactgaggtctagcatgttcccaacatgacaactcccatgcctctgcacacagtggactatctgcaacagataagatgccatgagtgagcacccagcttgtccctgctcgcagcagggatggcaggcaacaggaaagggcttagcacagtagttaccagacagtaaacactcctaagcaaacacactatttcctcataaaagagaaaatagttaactctacagaggaagacagcggatggtctatggcagggtgagggtggccaacactgatcaatgtgtagttaatcagcaaaagattgaaaggagatcaaaaccaggtttacagcagtgtgccatggctgagtggcagtgactctgctggtcatcaaggggaatttaagcaacacacacagcctggttcccaacagcagggagcaggaagtgaaagctctaatcatgatataacacacacggcagcccccaatcccctggaggcccc

SEQ ID NO: 160696 - DNA, 1000 bp, Homo Sapiens
tgcagaagggaaccttgtatttcacaggcctcattttgatggcaaaaagacagtgtaataataacataataataataaaaatataatactgaaaaggattgttcagggggagttggggtctcccgatcctgccatggctcggtggtggctcaggtggctgcttaaggctgaaaggtgggtctgagatgaacctgcagaataatccaagccgagcctcacctgctgggtccagggctaaagcctttgagaatgctcccatggatcctggaactaggtctactgtggcagcaaggcacaggctgggggcctcaggggtcctggaggtcaggcaggtcagccagcagcattggggagtccatctggatctcacgctgcagggactcaatatcggcagggttcatgccatggccttcgagccagtcagcaagcagggaggctgagagagaggctgaatctgcctggccatcctgtggcccatcagccacgcccatgtcgaaagactggtttaagaattcctccaggtcaaagccaacaccgtagccagccccactgccctttggtgtgcctgagaacacagggggcagggggtcctccacctgtgacttagatagctgctgggtcacaaggttgacatcaggtgactctgacatggaagactgaggggctcccccggcgtctgggggcggcaggccaggtgggaagtaaggcaaaactcctggggtgctggagccaggcagcccagggggtggcacaagtgactgggcagccaggaggctggtggaggtggcaatctggggtggcgcggggacagggatgggcccaggagggccagtggggtggggtgcagggccagggggtgggcaggcaggctggggtacagggccagaggtagagcccgcagattgtggttgcgggccagtgggctgggctacagggccaggaggaggactggtaggttggactggggttggggttggcgttggcgctggggcaggggccg

SEQ ID NO: 160697 - DNA, 1000 bp, Homo Sapiens; identical to SEQ ID NO: 158113

SEQ ID NO: 160698 - DNA, 1000 bp, Homo Sapiens
tttttttttttttttttttttttttttttttttttttttttttttttttttttttttttttttctttacacagatttaagccaataatttttagcaaaatgatacaaaactgtcttaaccaagtagaagattggtagttacagtggaatcgtcagggagtacagggcggccaccactggagggagctgaggccctggaaaaggagtctgattctctgcaattctctctctgcttttcttcccagccccgttacaaccgagttcacgtggggggccgcagtgcagccccagcggtggcagctcttggagtctgtccgtttagtatgtttcccccacgagcgtcgctgggtgagtggcctggagagctcccggtgttaacatttcgatcctagaccgggggacgtgtcactagtaaagccattggtaacagagtagatcagccatgcattgtctgcccttcacagcaataaggagagttctcatcggtgcacgacagactgaagaccactggaagccacccgaccaggaatccagtgctgccttccgatgggagacgagcagctacttgccgtggtgttcgaaaggaatgctattctgtgaggtggacatgcgagaggtatcttgtcggcctgtgaggtcggacgaggagatgttgacgggggccccgcggtgcagccgcatactcactttccgctctctctccatgccggagacgggccggggggaggtgttagccgtgtgtgaggtaggggtgaggggtgtggggggagccacttcctgcgtcccccgcaggcggccggaggctgtggaagggaggccgcgggtagccgggttccgcgagtgtctcagccgctcctctcggtccctgcgctcccgctcggcgtcatcggcggcccggctggcaccaaatttgagcatgttccagtcgaacacgtagtcataggagaagccctggcgatggaacagattccggaaaagctgccgcaggtacgagtagtcag

SEQ ID NO: 160699 - DNA, 1000 bp, Homo Sapiens
ttcagaagattcttttattaaaactgggtaacatcaataaggggacagtacaaaaaaaagtttggtccatgaaaaaaacaattcagttaataaaaacagttatcaacagggacactgtgggaagtactgagcttccttctcatggttccagccaggaggcggccagggctcagctgccccaaggttgtccagtgtcaacctttcaagggagggaaaatggcaggaaggggaagacggggagaaaattctgctgtccccagtgtagaacagggagggatttgggggtgggggtgtgctcgcaggagcctgaggagggggtggggaagcaggggctttgtcagttctgtgggtttagagcccatgctgaacggaattccccctttgtgcccagctgtctcccacccttgctgtgttgagtctgcgagcctgggatatgctaactcgggggtgatacaacctggaagaagaatgtgaggctctcctggaaagatgcaaaaaccatctcagatccaaggggccaagatcacaaggtcctgctgctacctgaggggtctgaagctttgagggcaggggctggggagtcacaatcctgtgaggcagggagagggaagagtcacaaacccaactcagcgctattctccagccctaggcgctttcactcctcagtgccctagaagtcaccagtaggtgtcaactgggcagacaagggacaggaagacagggatggcccagggctttttacccgtttggttttaggcccgtttctccattaagggatgcagaggcagggtggagtgagtgaatgaatgagtcacatctccaaacagcaggaaggaacagcctctgctggcaatgacagttccccagatgagatccctggggctctgaaagggaaaggcaagattcccccacccaaatgcccgggattagggcagatctgagggaatcacaaagggcagccacagggagtgtctgggagggagcaataaagaacaaaact

SEQ ID NO: 160700 - DNA, 1000 bp, Homo Sapiens
tttttttcgaagtgaagaatgacaatcccattctttgcaagacttattgatgaaaataactggcaatcagaaccctaaagaaacacacccagtcacactcatacaagccatgaaataataaaacacagtcaaggttctctccatgtcaaaccaccagcatccccacctgaatgccccggaagtctgacggttaacctgtgcaggccctggtcaggcctgtggtccccaagggctgccggcagcaaaggcaccacggaagctgcaggggacaggggaggccgctgcttcttgcatttttgtctgaaaggtccctgtggagtcgacgagggaattctcactgaagcagctataaaagaaagcggagggcacggcgcctccctgaagcaccagcagctgttctgtagacggttgttgggccacacgcaaaggacttggttcctgtccccagcttagtggtccgtcagaggaaaggtctcttcctgcctggctggccacagcatggccgcctcttccatgacgggcacctgtgtaggccagcctctctctcctgccgcccctgctgggacggcagcccggacgtcacctgcacagccacaggtgcgggtgctggctcagcctctctgtgagctcatcctcctcgggctcctccagaatatccctgaacaggagctccacagtcatctggtaggtggcctctggggtcccagcaaggggctgcaggtggctgcgggggtcccacttgtgaaggaagttctccagaatcagggccagaaacaggttgacccagatgacagacgacaccagccaccacaatacaaaatagatcttggaccacgggcctgagtagcgccgatatgcatccagaaacacctgccagttgttcaccaccatcaagttccacagagtgaccagggcagccgcaaagtcatcgaagttgttggcccagtactccagctgctcgaagctcccacagggcgccgagccattggcaggggccagg

SEQ ID NO: 160701 - DNA, 1000 bp, Homo Sapiens
tttttttttttttttttttttttccagagtccttgattcaactgtttactaatcagaaaggtcggtatagtcggtcctttttctactgctggcaagtgatttttgtatattttattacaaataaaacaatattgcttgacagcatcatctgtcatcttacaaatatacaactacacagtcctaaagtaatagtatgtctctagaactgagcttttcttaaaaacaaacaataactatactattattaagtcctgcaccctaaatctatacagcagctttaatcaatgtggaaatgaaattatgatttattaatttacataaaattactttatacattaaagaataatttttcaaattgttaaaaaaacaaagtctgaagctgtcattattgggattcgtgggacgtggtttgctcttctatcacctgcttcacaatttctgccagttttagtcgatctactttatctgtgaatccacgaccattccagctgaagctctgcagagtatctcttaggagtttgcattcccggttatacttccaagcctcctgcattacttcattcagtttctcatcttcattctctcctttaccagcctgggggagaatacactgagcaatcacatctcggagtttttccaaggcaacattggaatcctcggctccattctcatggtcgtggatatagacactgtcctttggcttggtgccaagtaacttcctcttccgcagaatggggttgttcactgagtgcaggggtttgaggctgactttcagatcctggattctcatgttggccaactgttccgcgtgagcctgctggattcctgcaaccactgccttgtccatcatcagctgagcagaaggcagcacattatccagggcctcggtggaattgagccaggggtggtccagcactccctcgatggtgagtctctcctccggtttgaccttcaggagcttcctcacaacatctttggccatctctgagatctgactcca

SEQ ID NO: 160702 - DNA, 1000 bp, Homo Sapiens
acaaaccaaacttttattctgagaaactggctgtacaatatctaaaaagaaagtgacatgaaggaagcaatctacaacttccttccgcttagcgagcatgcatgtgtgtacgtgcacgtgtgtacatgtctgcatgtgtgggaatccgggggctggcaggtggagcatcacggagcaggctgaggggagccggagttgggctgggagccattggcttttggagtccctggagctggagggggactgtccccagcctcctgcttccccccacaaagggcactgccgctgagtggggacggggacgatgccgggggaggaactggagaaggatgggaggtggggcctcctttgccctcccctgttgggggaagtgagaccacgatgtacttctggacactcccaggaccagagggagcagtgctggggggtgcggtggtggcggtggagaccaacttgacgatgggctgcacgctggggacggtggtggtgacgggcgaagtggtggtggaacctgagccgggggccgaggtgctgagggacaggacctgctgggtggatggggcgctggaggacgatgacattacaataaacttggttggaggaggggaaggctgtggtggggcagccgctcgtgcagacaccagtgtctggacaggaagtgcgatggagccaggaaccttcagcaagccaggggtgcgagggccaggctgtggggcctgcgagagggtcagcgtgggccggggctgcgtgatggtcagagtggtcctgttgacctgctgagcctgcagagcagcctgggcccgagccttgaccacctgggagcagaggaggggcccaagggacccgaattctgcccgataggcgtcctgattgtcaggcggtgggcgcagctttgccagaacaggagcacagtgtttcagcaggaggctctgcacatggtctgctccaatccggtcaatgttgctcagcacagggccgtccagcacactgcggatccgct

SEQ ID NO: 160703 - DNA, 1000 bp, Homo Sapiens
ttttttttaccaggaatgctataaacattttatttattttttaagaaagtagcttcagaaaaagaggaaaatatctagatcatttatttatacatatatatattttttaataaaaacctttacattatcttcatgcataaagacccaggtgtggccatattgcctgagatagccctaacaccagctatctcatgccattacctggggctccctatagctgtcagcagtgtagcaaaggccctctgcctgcccctaacgcccaactccatgcctgcctcagtcatggtttgtttttgcttctggaaggggtagatggagggtgggaaatgctttggagctaacatgggatgaacagggagggttacccaacctgccattttttatccaaactctgcaggcaaatccagacagagtctcagcaagactgaaaaccagggaccaaaccaaactctgggagcttcccacagacatgtcacatgtgaccaagggttcctgcacatagtagtagcaaaggtatggtgttcatggaactctaaaggcaggaacaaaaacagccctgaagatcaatccctccgtgacaggcattcacttctgccctaagtgtgtcagaaagatcccattttgtttcctaactcaggccaaccctcctttgcctccaaaattcagtgttaactaaccaattacttaagagacggatccctcttccttctgtggatagttcatctgttaaggatccattatcacctgtctcactcctcctaaggagtcctagtataaaagggccagggtaggagtagggaagctggttggcatggagggtcacaagatccagaatggctagggatggaaaaagaataccctggttctttgggggattctgccaaaggagctttattgaccatttttttaaaggaaaaacactgaatgatcttgaggatggtaaactgtctcctcttctgggttccagaagcccttatgctacgttcagtattaagaaaag

SEQ ID NO: 160704 - DNA, 1000 bp, Homo Sapiens
tttttttttttttttttgacatgtttccaactggaatcgtttaatgtgtctacttcttccacgcataattataaaagaataagaatcgacaaaaatattttctttccataatatgtagaggtggtttgtttcttttttttttttttcttttctttttacttttttttttgcccgcccctggcagagctcttggcggggagggaaggggagagggaaatataaccctgaggtggggatggttcagctcccaaccccggaacccctggtgtgtacgggtcaggcagacacatgtggctgggcggctgggctggggaggggacagccgccactgaccagcagagcgtggaagttcggtgcgtttcagtgcctgcctgaaagcttggggacaggagggctgtccacaggtggtgccccccgcgggccctggccgcttctcctgtggggcccgcatgaccctctgctcgggcttgggaagaaatggagcctaccaggtgctgggttgcaaccccgctgcccggtgtggaccccaagtctagatttaggcaccccttgctttctgtcttttattttttatttattttgagacagagtttcgctcttgttgcccaggctggagtgcaatggtgcgatcttggctcaccgcaacctccacctcccgggttcaagcgattctcctgcctcagcctcccgagtagctgggattataggcacgcgccaccacacccggctaattttttgtatttttagtagagacggggtttccccatgttggccaggctggtcttgaactcccaacctcaggtgatccgcccgcctcagcctcccaaagtgctgggattacagacgtgagccaccgcgcccggcctgtcttttaaataattatgaaaaatatccccccaaacaaaacacaaacatcaagttggggaggctggccgggggggacaggcaattgcatgcttgggtgctggggacggtggctggccgggccaggggactgaga

SEQ ID NO: 160705 - DNA, 1000 bp, Homo Sapiens
attttttaaaatcaacacatcatctttttttgctacctaaatgccccaggggacaaaggtacacctcccaaatatagtaaaagttcaatatgaagaaggccttcaaatcagtttctttctaacgaaatacgtcaaggtagaagaaaaatagtacaaaactcagagaaagctcagctcccagtatggagagcatcatttttcagtgaagagtccgtgataagctgtgaaattcagatgagaattcaaacattttcagacattcagagagtcagagcaacccaagaactaaactcattatatgcattttctcaagaaaaccctcccaggagtttcctgggcctacagaaatggtgtgccaaccatcttcaacaatgcagagcaactttttgtttatgattcttgtcctttcttgctaccatcttgcacagtgtcagaatcatccttagaaacagtaatagaggccaatctcccagaacatccttcacaaatttcttcattcttagaaattatcttttgcttcagatgaatgttctcttccgtcaggatctgtatggtgtgcttatacttttcttcagtttcagcaaacttggtttgaagcattttctccagatttcccactatagctttctctttctggagttccaactgggtatagtagaggtttgtgttcagtgactctaggataagggcttgtgcatgcaattcttcctgcatgacctgcataagaagaagctgttgcaggacatcatgccaatgtctatttatttggtctcttctccagggcacctctttggtttttctcagctcttctaattgcaaggtgtcactttgatgttgtttcaagagctcctccttctcttgaatgaagttctcaaagacagcactgcaggattcatttattttcttatcttcttctcctgactccatttcgaattttttggtcatcttttttttttgctgtagcaggatattttctcgctcgaacttctcatccttcttc

SEQ ID NO: 160706 - DNA, 1000 bp, Homo Sapiens
ttatatatcataaataagacagctgttgatgcaagacacactctttcacaatctttccatatgcacccaagcattcttgtatcagaataagctgtttaccagccaaccgtatgtggctgaatgattaaaatgaccatctatactttacatagtaaagcatcttccaaaattttaatgtacacagtgacaaaaaggaaaaacaaacaaaaaaaacagtaattctgaacacatgaagagtgattaagcagcttcataatcaaatcaggcttcattacttgcaacaagggcaactctttccattccccactaaatactaaagtttcaatcttattaacattaaaagaaaactcaagttgaaaccaagtaactaacatgctattcagctttttagatctaaaaaagtaactcttcccatgaggtaaggcaactgagtaatctgattgtattagattgcattaaaataattatacttaacttttaatacactaattaaaaggtattacttttttggaaatacaacaataatgagttcagaaaccacaagttatagtactggggaaaaacattagcagtgctgtcactttactatttgcatactttctgtaaaaagtgagcctaagaatgatggatgacctgtatcttaaactcaagtaaacgtatccttaaacataaaaccaataacctcccatatactcctaagtccttaagtacaatttctgcacatcatttatgaaaagatgattgagaggtaataaggccatccaatgtagacaactaaagggttttcttcaatttaaggaaaataagaacatgtttcattttcaattatcacagtataaaactgatggtcccaaagctgcatgactctaatgtcattcttgaaaacaggacttccttctcattttaggtgaaatcagtaagaagctcttctgacatatcacttacacacttctctatgggtatgcatgaaatatccatctagattccatatgaattgaga

SEQ ID NO: 160707 - DNA, 1000 bp, Homo Sapiens
tttttttttttttttttattttttttttttttttttttttttttttttttttttttttttttttttaaaaaaaaccattaagacatttatttatataaatgaacaaagtatacagataaatcacataaaagcaaatcagaaaaactttgatttctctcctatgtttactaaattagcaacaacatataaaacccctactcaaatggtaacactgtaaaatgttacaactctttgggaatgcaataaggcaaacataagtcataaagttcttcatattatttcactaaataatccccctcccaggaatttatcataataaaatttaaaactacttaagtattcagcaatagagaaatactctaaataaattaagagtataaagtaatataattaaaataatcattatcacaactacatacatatagataatatcaaatgaaaaagtcaatttaaaagtataggtgccttaagactatgtgaacaacaaaaaggaaaatagtaatataaaaatttaaattctaaagttactacattaagatggtagaggtaacagtaattttcccatttggcaaaacttcagttttaaacataaaagaaaaagagtggctatcgttttttaaaaatggtcaacaatctctactcctctattagtaaactctgtgtcaatttttaaggtgaaaaatacagcagaaatacctctgatgtgttctaaaacctaagtatttctctatttggactttaatttgcaatggaagaggacatattgtaacctgtaccagtccaacaggcagatgtagccactgccacctttggttgacacacactgtggggcactagatatgaacaggtaaaactgtaaattttcattttatgactttgtgtgtttgatattttatgttaatgcatcatggtattaacactctttttccttacagttttgtctcatactaagaattgttttagtgttttcatttaaaatatgttgccaatatgttgaaaa

SEQ ID NO: 160708 - DNA, 1000 bp, Homo Sapiens
tttaacagacaaactgcttgtcagtattaggacctgatttcacatacaggtttaatacacttcctcaaaagtcatgccatcaaggtgaaggatgaacatcttccactactgaatgaggctggatgtcattattctgagaagtagggttctcctccacatggattactttatctgaggttcctgcaggagaaacttcattatttgtctcctcttcactaggtgataaggtttcaggcagttcatttgacattagaacttgcaaaggttctgttccattttcaacaaccacttgaatccccaaaactttaagaatatcacatttgcaaatggggcatgtcccatggggtaaaatccaggggtcaatgcaattcttgtggaaaaaatgtttacaagtcagaatacgaactatgtcattaggcttatagcgttcaaagcaaattacgcagctatccccatttggatttatttcttcatccccctcttttactactcgaagttggagttgtccaaatgtgttctgaagatctgttgttaatcgctgccatctccggttctgaatccttgctaaacaaagtctatgaatgtgataaaagatgaaatatgctaaggtagcagttgtgacaatcacaaaagagaccaaatagtgattcatccagatgatgtgctttctccccacctcaaccacggctgtaatgagaactcccttcttaattaaatggaaaatttccgtgccttttaagttaccaatcataaccacaacgacatcttcaaatgcctgatgaaacatggggaacacctggttgccagtacctggaacgttatagatgatcactccactggctcccttctcagttgccactttaattttctgtgtgaaggtacaacctccccgttcaataagtgcaagccaggtctctgagtactttgatcggctgaaaatggtattgggattacatgcattttggatttttccctctggtggcactataactcctgccac

SEQ ID NO: 160709 - DNA, 1000 bp, Homo Sapiens
ttttttttttttttttttttttttttttttttttttttttttttttttttttttttttttttttccacaacatcccctttttattgatattaatcacagttatgaggtcttgtccatcagaaagcacaatttgcattatgtagaactacatacaaagacataaaaataaaacatacatacaccaaccaccacaccagttaatctcaaccaatcaaacctctgaatgtgtcttcaattttgatcatcagtgcttcggaagaacgtacatagacccagcccaaggttggcctttggggtctgatagcattcacagagcaggagattcacccttggaagcaattgaatgtgtaaactctgagagcagacactgacaatgcaatgcctgcatacctgactcctgggctgccttccttctcagcagagcccactgaaagtctcacgtgtgcctttaaccaatgaggatggcaggccttatctgtgtttgaagtggacaggtcattgctacccctgttggagaagctatgtaagaaggagtaggctggcttctggtctagttcgactcattctttatagggacatttcagaatgatgagttggctaaaatttactttaaaggggaaatgtaaaattacctcttcttttcctatccccttcttcctttcccatcctgagccctctggcaaggcctgttgcagctcaagagtttttgtcagattataagttaccaaatggtcaacagggaaggacccacagcagattccaaaactctttcattcacttgagttaactgaaatggctccttctttgagtaattgaagagtttgagttctagcagtttgctggtgtctccaagtctcttagaaacatgatggctataaacttatcaaaataaatgcctaagaaatttggaaagcgcgacaaatggccttgctcctggaatccattgacagcagaggcctccgaacaaacccacactctgtctgtctcttctttccacagg

SEQ ID NO: 160710 - DNA, 1000 bp, Homo Sapiens
tttttttttttttttttttttttttttttttttttttttttttctatgttcaaacatgttcttgccctcaaggagtttacatacaagaaaccaggttaaaattatgtgaaaggggcagacaggccaggaatacgggggaaattaagcaatttaactttttatttaaaagagatggggtctctctgttgcccagattggtctagaactcctgagctcaagtgattctcctgactccctaagtgttgggattacaagcataagccaccacgcccagctgcaatttaattttaaatcagagttcaaaacaatagaatttatgccactgtgtgtgcctgccaaacgaactgaacagacagtaactgctctaatagttcagaggagggaaagatcacctcaggctgggggcgagggatgggcttaaggaggggcactatttgagctgagtctggaaaaacagccagaattacaggaagcagagaggctaccagaaagtgggtgtagaccagactgaaaggaggcagcattctcctccttgggccctgggagctcctggggagtaagacttgagtctcccccatctctgcaaccccactgcaggtacatagtagtggcagtttgtgacatgaacgggcaaacagccagggcagatgcagctaacgggtagcccccagtgctttttgcacctctccaagattgggtgactaccagtcccctgaccccttcacctacccaatcctttcctgtcctcggttcttttccactgtctccaccctgggaagtggcatcaacacaggagggcattgtgctccttcaatgtggtctattcatacacatatagcccctttccactgctcagtgtcggtgatgtgactcagaagggccacattttcgctgggtcccatctaaaggcctgacactgcagtgaagggcatgctaagtctaggcacaggtcctggcagcaggaaggagacagagcctctcccaggcacacatccccttc

SEQ ID NO: 160711 - DNA, 1000 bp, Homo Sapiens
cacattatttcaaaactttatcggtagaatgactctgcacactaatttcactaagagtacataaacataggaaaatagtcctcaaaagatgcatttatgggcctatatttttcaacataaagtgctagcagatgtgtaagaagagctgggaatgtcttgagctgtaagtcctgagacctccacaccatggctggtcctggaggagttcagcattctgattttttcttaggttcaggatgatcatccaaggtggctggatgctcatttggaccacctggtgtctcacctgtgacagctaaaaggatgactttcagccacttctgcttcagttcctcactgtctgcagcaaagctgtgcacggacttagactgggtcagtttgaaactgtgtggcaggtctgcgctccttggcatttcatccaccacatagcccagaagtggaatggtggcctgggctctgacgtcctggggggcaccatacatgtacagcacaagagggtcttgcttggggatcacacaccaagctttctgccaaggttttgacttctccatatactgaagaaagctgcacaccacactgtttccagatacttctgctgattcaatctctaaaattccttttcttttcttttcttcactgtctgtgaatccacttatgatttgataacagtctttacaaactttgctcaatttaccaccatcatattcaagttgagctttgtagtcggagcatttccaacaaaccacatatccacatgctcgacaatgatgcctccttcgtgtcagtgcattgaaaggttctttacatttcatacacattgtcacttcattatctcggatccatcttggggctcttttccctagctcagcagtagaaacctctgagtgaatgtcattatcctttgcaattgcatttctgaaggtttcatgcctttgatgaaaagcatcgatggtttcttgaagggccttgatccattcttctttgtcttgcgcagaactgg

SEQ ID NO: 160712 - DNA, 1000 bp, Homo Sapiens
tttttggacagtatttttttttaattttgtatctacgcattttctaaatttccttcaataatcatagattacattggtaataaagaaacataaacatttcttaagggttgcttaaaatgagcgttgcctgtaaagtgatccttctccaccttaggtgaaaaataagctctgcttttccttcccttgcctcatgctccatcccctgtccccatgtgaagaggctgccccacggcttcctcgtccttctttcttcatccactatctagtcccagcagccgccctcttagctgtcagtccatccccatctcctccagctcctccatgctccaacagcactttagagaaggcagagggccagcacgtggctttcttgccttccctgagcaaacagcccgagagagaagctggtgttgatagagagaggctctcttattgcaaattagataagcccaaatgtaaaagcatattcacatttatcaaacatctcatagatgtggcacctatgggatttcaaaaaacccttcatagatttttgcctcccaaacccacacagcagccccatgaggtagacgtcagtttcgttcccttctacgtgtgggaactggaggaatgtggcacggagaatgcagagttgagtccacggtgaggcctccagtccgtccttcccttgaagatgcttgacccgcagccgcgatgggcagaaccacccgcgtgacaggcagcagaattgacaggtcggaacaagggaggccccaggacacagcagacacagcgctgcgctgctgcgagcctggctatttctgacttgccctagttaggggctccttcccaggatcgttttataatcacaaggttgtttgatgtacaatgtgacatccataggacgctactgaaaaaagccttggtttttttcatactttttctgccttgcagaaaggtgaggtgaagctttcaaacagcctgtggttgtagctttctttctattatttatggccatgtg

SEQ ID NO: 160713 - DNA, 1000 bp, Homo Sapiens; identical to SEQ ID NO: 158135

SEQ ID NO: 160714 - DNA, 1000 bp, Homo Sapiens
aacagaaacatgttgcccttttatttgcgttcctcagaatactgtacaaagggagtaaaaatcctattcacactttgcttagaaagattttaaggtgaaagttccctatgatacacagggtgggagatgcagggtcaggagggagaaaacaggcccagtgacctctcctgttcccttggacccctggaaaaggacacagggacccacaccttttcaaaattaacactgcccctagtccaactggggaggggagaaggctccagcccaggctcaggctcccggcctcactttcttctctgcaggctgagacagtgcctacaggccacgtcttgccccttcctctgtgctgcttgagcagggatcctacaggactctcaccacagaccccacatggggtggcctcacaacgccacatgtggctgccacatgagaggccctgcccagtgccagtctgcatgaggaagttaaggggtgagggcctgcagaggaccacagcacccatcgtttctgtcacagcttccccatacccccgcaggagtcagggccaagttggacctgtgcttacaatgactcacgggccttttccccacctgtctacccaacagccaacccaggagttaaacccacagcagcctccctcccctattactatcacattctgtgggtaaattaaccctccaagcctgcttccctccctgcccacatcccaaaggagattgggtctagcttctgtccctacccctccctcccttacaccagtcctctgctgctatgtggccccattcttctaagtctcgactcactagctctcctacagctccccaacctccaccaggccaggatggcagcagccctggccccctcacctctggaaccaagccatctacactctaccccatctttccccaacctgaccctccccactcccaaccaggacccacggtgggttgcagagaagctgccaaaagcctgggacttggattagacagctccctaccca

SEQ ID NO: 160715 - DNA, 1000 bp, Homo Sapiens
ctgccatactggggaccagaagagttcccagcctctacttcctggccctgacacaggcagaaagggcctaggaatatgttcactttatgttgtgcatttgtatggatgcacacatttctaagactaattaactccagtgcatgtgaatcagctaacacattatttttttaaagcccacgtaagtggcttcacttagctgtagctattcttttgggctgttaattctagtagaactcttatttgtcctatgggttctgcagaatagaacagatttgctcaactcctcagtgtctgagagcagcacctaggagttatctgggatccaccaaagacactccgcggggcctggcccttgttcagaataaacagaaacctgcgtccctttgatctccttgacagggtaggtttgcagaagtcaggcaggctggtaaaaacatccttagtaagaccaacagtctgtcttttttttttttttttttgatgtagaaacagcatcaagctgtttctctctaccgtctttgatagaaataaaaataaaaataaaaagttgaattgcagaaaagctaagaggtttttagtttttgttttttgttttccttccaccagtcaattattggaaaggatttagtgagtctggtttattttagcttcaatctgggtttgtacacaagcaaaaagcaaatgttgaattttcaggtagaccttcatgcagacatgcaaaaccaactgtctcggtggtgaggagccatggggagctctccgaagggctttccaggcagtgggctaatgggcaaaatgactactcagtggccctgctgaccgatggtacggatgtgccaaggatatctatcagcccatctgagaatatgaaacaaagtgctgagattctactacctaaagtaacaaagaaaccgtaagcaacacgactgacagccagaagggaacactggagttgtggcgtgtaatgctgtcctggattagcacccccaaatctcgccaa

SEQ ID NO: 160716 - DNA, 1000 bp, Homo Sapiens
tttttttgagagtttttatcattttttttttgtttcattttgttttgaacactaagatttattttcaaacagcacacagaccgtctgcggggcagagccaggctaggctggtgtctgggccccacccacagcagctgccaggaaaagaggacccttgcccgggtggcgcggccgaagcttcaggcaagcatggtggctcggcagcccccagccccgccctgcggccaggcacacatgcgggcacaggcaggggcgccagaaactcaactagaggacacagcagcttcaggaacactggtgaattccgccggacttgccgggacgcggctctttggaaaacgacctaatctttgggagaacgcccctctgcctgggggtctcctcttgatttccctttgctcttcaaaagatgaaaaacgaaaacaaaacaaaaaaaagaaccacacatttttcgggaggaggtgttcttcacacgcccggaggctgcctgggccccgccgtcatgggaccctctcagtgaagttctcggggaagacgccacggcacttctccagctccttgtgctggttccagtcgctctccttcacgcccatgagccagccttcatcctgctcttcagggttctggaaggggatcaccagcaccacatcaccagccttgagctgcagctcgtctgtgtcagtggccgtgtagtcgtgctgggcctgtaccttgaacatgaaacctgggggcaggtccaagcgcccggccccactgccgccctccacggtgccattcacagttgctgggaaggtctccaccacgacagcaggaagagagctctgagatggggacttggggagggtggccccgggcgtggccccgccggccggctctggctcgtggttgactctgatctcgggggtggcggcaggggagccatctggaggcgaagggctcttgttcccttttgcaggcgcgttgtcactgggctgggccttgaccgtgaaggtgttgctcc

SEQ ID NO: 160717 - DNA, 1000 bp, Homo Sapiens
ttttttttttttttttttttttttttttttttttttttttttttttttttttttttttttatgtagcataaatggtttaatcataaatgtctcccttaggcatgataaacattttaacacccacgcgagtcagtgtatgattgggctagctcctgtttgtgtgagtcacatgcaattcctttcaccagccaacctgaaaaaagacctttctcttactatgtcatcagaaaccagacagacccgggtccctgcaaaatctcaagtgagcattttccccacaggaaaacagaatcttccactgcagctagagaaactccgaggaagagggacttgatgctttagacatcaaaatgagaaggggagggaggaaagaaaggggggagtctgtgaggcacaacagagaattcccccaaactgacatgaccgtgaccctctgctcagagggcactatcgacagcccacaggtgccagacccatgtcccaagggagaaggaacatcagccatcatctctctgcatgagctcagtgtcaggtagtagctgtggcgggacgctgtccagcctaaaaaacgtgaccattccaattcatcttcagctgccaagtgtatttagtccctgaacctggatccaaggcatctccctgtaggaaacatcagaccggggcagagattgacaaagcaacccacaacagcagctgccaacggccgctgtgcccacctcatcagcagctctgcaggggcctcactccaccctcaccaaacacgaggagccagcactcctggcccccattccactggacaggaaggcgtgagaactgagggacctgcctgaggcccccacagctgaggcgcagcggagccctgcctcccagcacagactaaaatcccagcaacacaggcccaccggcacctccagcctgccttgcgggatgatcttcaggcgaatatacaaaatacaaaagaaactactactgtattttgttgccctgtcccttcaacttg

SEQ ID NO: 160718 - DNA, 1000 bp, Homo Sapiens; identical to SEQ ID NO: 159245

SEQ ID NO: 160719 - DNA, 1000 bp, Homo Sapiens
tcaatgtgaaaataaacatttattataaaaattagttttgacattttaaagtgaatgcagacaaggtgttttccagttcaaaaggtccattgtaagctagagaagtaaattccaaggctggcaataactgactcatattcttcacaagtggcctagacaataaggaaccattcacctcaaattcacagagccatgaatcacctctgcttccccatgaccttttccatatccttcctactctgtcttccaaccatgacacagaactgaaacatactttaaaaatctcatccttggctaggcacggtggctcacatctgtaatcccatcactttgggaggccaaggcaggcggatcaagaggtcaggagtttgagaccagcccgaccaacatggtgaaaccctgtctctactaaaaacacaaaaattagccaggcatggtggcacgcacccgtaatcccagctactcaggagactgaggcaggagaatggcttgaacccgggaggcggaggttacagtgagccaagatcataccactgcactccagcctgggtgacagagcgagactccgtctttaaaaaaacaaaacaaaacaaaacaaaaaacaacaaactcatctttactgaaccatttcataagctctactttatttgtctagttggatttcatttcttctggaaaatttattgtttattggcatgtgacccttgactgatggcttcattagcattttgtttttctttttggatccttaatagaaaactcaattctgttagggatttccaaataggatagggcaaagtcgcacttagtatatcctccacagaaagaaagaagcaaaatcaagccaagagggccctttacttgtcctcttgctaagttaataaatagactggtggatggtggtagatggagaaacaaaaatgtaagggcagagaagggtccaaatggggaggaagaaagcaatgacagccaggctgtccggctcattcctgttcattca

SEQ ID NO: 160720 - DNA, 1000 bp, Homo Sapiens
tttttttttttttttttttttttttttggcaccacactgttttatttaaacctgcaaacaatataaagaggtaaggacttctgacgccaaaccatgcaagtaataacaaaggaacagagaaaaatattaataacaaaaagaaaatcattaaaaataaaaaaacaaagtacttcacatttcacagcagtgctttggcagtactggcaagcatttctggtcaactgcttccaacagcaggaatatgaagaaacccccagatcttagcaaaagtgtaacaacattttctccctgacagcttacattccaagtcattccataccataccgctccactccacagttttatacacctgatcttaagatgtaactaggtactatgtgtgctcacaataaaaactaactaaaaacaaatcagagggtagcagacaagtaaacaaagtttccagtaaggcatcaggagatcactgctggtgggcccctcactttaccagcttaaagaagttttgatttttatttctcagcaaactcaatattcagaagctttaccagcagactcaagtcaaaggttttaaatacagtttacctcattttttttttttggtaaatatttcatataaaacatgaactcaagttctacttcatttaaaaaactgaatattttaatagtaaaaatatatgtttatatttctctttttaaaaagacatttaataacaatacttcataagactggatttaactccccctcccactcttccccccaccccccaccacaagttgtccaggcagagatacattaaggcaaaggctcctggagaggtacgtccaccttggctgtgggctggagactcaaggtgaacacactctgctccttgcagggtcaacagaaaggcttctccctcatgttcactgagccatcctgcatcccaaagtagactctctcagccatgttgatgaataggcctgtgtccaccacacctgggatcattttgatagctgtatt

SEQ ID NO: 160721 - DNA, 1000 bp, Homo Sapiens
ttttttttttttttttttttttttttttttttttttttttttttttggtgtcttgccgtgtttcatgtaattcagattagaggtgtgtggcgggaggtaacacaaggggtaggctccaaaagatggaagaaggcccgggcatcacgcctgtaatcccagcactttgggaggtcgaggcaggaaggtcgtttgaggccagagttcgagaccagcctgggcaacatagccctgactccacatgccctcctttctttcgatccccaccgccacaggcgtcctgtgcctcttcctcggaggggccgtggtgagtctccagtatgttcggcccagcgctcttcgcacccttctggaccaaagcgccaaggactgtgagggggacccaatctggactccttccccgccttgggacatcgcaggccgggaagcagtgcccgccaggcctgggccaggagagctccaggaagggcactgagcgctgctggcgcgaggcctcggacatccgcaggcaccagggaaagtctcctggggcgatagtatgccttggtggaggaagcctctgacaggggaatgtcctgggacttgggactgtcagccatggaccggtagcgggggctcaggagtccaccttcctcaggactccactccagcatggggtcttcatccacactctggttgaagaaagccttcagcctgtgaggctgcatcctgtgggccaccgccatagccaggcccagcagcacacacagcagtcctgtggtcaatgtgatccagaaggcaggcccatggtgagtatgcagcacagaagcgcccaggtgcaggggacagggtgaggtgagtgatgtggccatggagaagaagagcagagccaacagctggaagatgcccgtggccaatagcatgtagccaccatataccagcacaggcatggagagcatcacattggccagcagccagcagaggaatgccacccatagcatggctgaggtgtagtgtcccgcca

SEQ ID NO: 160722 - DNA, 1000 bp, Homo Sapiens
acactgtctaaagcatttaatggtctttctttaacacagccaactcccccgggtttgaaacagtgttaaattctctcttgcttgtggcaaaagaagctgtcaagtccaacactgaaaaattggtaccatttcctggccagtaagcacagaacagaggggctaaatattttatggttttatttatttactgtgttctcatgctgtgtttttcttttctctgtctctccctcctgctcgtgtctgcccagggctgattgttgtgacattggccgtatgctggatgcccaaccagattcggaggatcatggctgcggccaaacccaagcacgactggacgaggtcctacttccgggcgtacatgatcctcctccccttctcggagacgtttttctacctcagctcggtcatcaacccgctcctgtacacggtgtcctcgcagcagtttcggcgggtgttcgtgcaggtgctgtgctgccgcctgtcgctgcagcacgccaaccacgagaagcgcctgcgcgtacatgcgcactccaccaccgacagcgcccgctttgtgcagcgcccgttgctcttcgcgtcccggcgccagtcctctgcaagggagaactgagaagattttcttaagcacttttcagagcgaggccgagccccagtctaagtcccagtcattgagtctcgagtcactagagcccaactcaggcgcgaaaccagccaattctgctgcagagaatggttttcaggagcatgaagtttgaatgtcaagcgagggagccttgagtgggaactggccctccagccctaagaaaacgtcactctcactctgcagtctcaaactatgcccccatcagggatggaatggacactggaggctttacaaaaggcagatgcccacctcagtgacttctaaggactgactctgccagcctggccttgactccggttacacagacatgggggtgaactttcactccacctccttccttcaagtacatactgaaaa

SEQ ID NO: 160723 - DNA, 867 bp, Homo Sapiens
tttttttttttttttttttttttttttgcattcactgttacttcctctttattcctgcagtgaaaacaatattttcttatgtcagatttctctcaatctcttagtcaatgaagacctgaactacaacaatatagagtcccattttaaattcaaacaaagatatttaggtttgacaacagactcatggtaatgtcatttaaaaagatggatccaatgaacacagacaaacatcaaagttttcaccatggcacaaacctctgccacaatcactcataataattcaactgccttcatatttggcagtaacgtcatgcaagtgaatttgctgatgattagcaaaattacaaaatgaaagtcaaggtcacttaatcaagaattacagcaacaaagaaattctaggaatgcaggtcaaggcaagaggctgcagctggcctgataatgataccacttgcctaatgttcatttaggaatttgctatcacaaataaaacacgtatctcctctgagttaatgtcattctatttcaacagatgattcaactggtcctgtagatccgatgactgttcaacattcttctgaatagcttcttgctggtattgaagatgtgttgttattattgccatcttccttaaactatcttctgagtgcaagatggcatcttcctggagtaccatgtttcgagctgcctgacctagcagctcggagctccgggagcctttcagcacctgcttggtgagcgcgattacgtcagtaccacaggtggtcaccttctccgtgagaagccccttcacggactgaccgaaccgcgcttgagactctggcgttccagtcgccatcatttcagttagcgaacggttgcgcactcccc

SEQ ID NO: 160724 - DNA, 1000 bp, Homo Sapiens
aattcacatttaattacaagtcatgatttttctttactttttcaacaaaatggtaaatatagtctttaaaagatgtaaaaaaaaattttttttacatttaaataagcatttaaaaatctaaggtaagactacaaagcagcataacaggttttctgtcacttgtaaactggattagaaggcaatccccagaattccagaaccgttgtggagatatgatttttaatttacaatctagaaaaactgcattcaacaagtagtccaaggatttgggttctagttgccagcttgcatggtacaatcttgagtaagtctctcaacttctggatataggaaatcaaaggccccccaacagaatgaaaggtgttaaatcaggtcatcttgaatattcttcccagctctgttattttacaacgccatgaaatcagagtaacatgttccaggctgtttggggtttgggattttagaacctgatgcaatgtatagcactttttaaatttctactttttggagtcttattcgaatatatacatatatatatgtcccccatgttcttctgtgcatgtagtatatttttctatttaacagcctcttcaccattagcaataaaaaagtttctcaaggatgtattttttatttcttttttttcggggggagagagtttcactcttgttgcccaggctggagtgcaacggcgcgatctcggcttactgcaacctccgccccccaggttcaagtgattctcctgcctcagcctcctgagtaactgggattacaggcatgcgccatcacatctggctaattttgtatttttcgtagagatggggtttcaccatgttggtcaggctggtctcgaactcctgacctcaggtgatccgcccaccacggcctcccaaagtgctgggattacaggcatgagccactgcgcccggcctcatttcttgcttttatgtttttttggcttccttttttaatttctccaagatctcttctggagttgtag

SEQ ID NO: 160725 - DNA, 1000 bp, Homo Sapiens
ttttttttttttttttaatttgggggaggatatattccaacttgggggaagggtgaaggcattttagctctgaagctcaatcatgacatttctagagagttctgcagtgcccccgcattggacaggacaggatggaagagtgtgctggactggctggattccccagtgtcaagctggcagcgctcctgaggttcttgagtgtttatcaactcagcaggtcaaaagtctgcagacactgggtggagcagcagtaagccacaaaactaacagttgtcttccactggtgcagccctgccattggcgtctctctcaagggaaagagcttggggtagacgatggtaaacataggctcactacaccgatgacagtgccccagagggcagtgcagcagctctaggagacttctgggtaatgagattggagacagaaagttcaaatctttcagcaagctgtggtaggtatgatacagccctctcatagccaattcctgcagagggaggacgtgatcatgctccgtccctatggccttcacctcagctgggaggaaaacggttcgctgccctgatgaaaaggaaagcagcttcacctcggaaacttgaatgggagcaccacagccactgcacccgatgactttattgtacagataagatggcaagcctttcaggtgaatgttgttatccacgtatacatactgtagttctcgagatcgacctaaatcaagtggcaaaaatgcaagacggtttccagccatggagagctcattgaggctgggcagctggcagagatggcgcggcacataccatagacgatttcggtccacagtgaggtactgcagagaaaggcacatgtgaagcctctcgggtaaagttagcaaacgattggtagaaatgtctagtgtctgcagctccttcaaatcgccaacctctggaggtaggaattgcagttggttattagctaatcgaagatgacgtaaagctctcagacgaccaatttctgggca

SEQ ID NO: 160726 - DNA, 1000 bp, Homo Sapiens
tttttttttttttttaaatcaactaaaacaatttgatgcttaaaataaaagacaggaaatatttcctgatgagactttagtcgagaatatagatatatttctgatccgggggcgggtgatcaggggcgggggaggagaaggatgtgccaccagtggttcgcgaggttccgtttctcagctcaggagggagcctggctgcctggacccgggctagggacccagagctggggctccacaggcctgaccagggccagggaagaagacggaggaggaggaagagaaggcggggctggcggctggggcttgtaatttacatgagaaccgtgctggtcactagcgctgtctgtgtctgtctgtcctgcgggacttctgctctggggagggaggctgggattcagcgtcgttgtcatttcctgtgtggcttcttttccagctgagaaacttttttttcttttttactttttaaaaagaatcacagccaaaataagacattaactgcaaaatccaaaatggctgcgcttaccctatgtataaaaatgcgtccagtccggtcggggcacggcctatgctttcccggggatcttggcccgcttgcgtgcaatagcatcctccacggccttcagctgtttcagcagctcctcccgccgagacagcgtgctggccttccctgatttggtgctggcggcgccgggatccgaggctttgccgggcacgctcgtgaccttgctggagctcttggactggggtgacagctggcgcttcctgtcagccggggctgcaggggctttggagttctggcctctctgccgctctggcttcggggagcccagtctcccacctgacttccggtcccgagaacctcggtctggggatgtgttgggccgcttggctggaggagggctctgcctgtccttgtctgatggttcatagcgcttcctgcttcctttatcagccgccttattcaacagtgtcaacttgatctccttgtgggccacaaatg

SEQ ID NO: 160727 - DNA, 1000 bp, Homo Sapiens
ttttttttttttttttggagttcattcaaaatttattgagctgcaactgtgtgctcagcaatgagaatatagcagtgagcaagatgtgaacaagatctctgccctcgtgagcttacaatctagcagcgcagccagcctattacagccataattttacaattgtaataaaaactctggaaaatgcatggtgctaactgatttatcagaaagtcttgacccaccaagaaatcagaaaagacctccctgaggaaggaacatttaggatcagctaggtggaaagtgaaaggaagagtgttgcaggcagagaggacagtgtgtgagggtctgaggcaagacatgtaatgaactgaaagccagtgtgtctaggccatagagaacaaagaggggtgttgcgagatgagcctgatttatacaagatctttgaatttaggactttattccaaaagcagttggaagccactgaagaagctaaggaaagttcgatgtttaggtttgtttttcatagctgactctcattgcagcatggaagtcagaagtggaaatgggagaacaggttaggaagtttccgtagcagtttagacaagaggtgatggtaacttggagaaaagaagataggttccagagatatttaggagacagattacacttgatgagtgactggatgtgtgaggaaagggatgtgtttctagcaagagacattgaagtaggagtctctggaagagggacaggttttggcagaatggggacatcctgtaggcacaggacaggccctgaggcttgcactagaggaacagcatagctttcattctcaaatagttcagggtttaattgagcaaacaaggtacacataattgcagagttgattaaagatcaaaatgatcgatttagataattcatggactcctgcattccatggggttagatttaaaccctccatctcacagtaaattcagatactgccgaagccaacagcaatgtttccacctttgttcatgcctcc

SEQ ID NO: 160728 - DNA, 1000 bp, Homo Sapiens
tttttttttttttttttggagacaatgacaacggcagccgccattttattgccaatcagccatgagccccgccttccatacacaatgacatttcatccccacaatcgattaacacaaccatgatagccatgaactcccaactcctccagctgctagtgctcaacgggagagtcccctccaggtctgtctcattgcagagcccatattctttctgcctggccagcagttactctcctcaatgagcaggcactggtgcagtcttgggtgggcaccagtcacccctatggaaatccttgatggatgttacaggacaggattggatgtgaggggtcttggaaatggggctcaagaatcttcatcatgaggcgtttctgcgcctactgacctgagatacagagaggaagttccatggacaccaacacccagttccaaggaggcacacattaaccttcccatgatgtggatgtgtgggaacacatgggcttttaatcacacgccatgcaatccacagaagagctgacccagcctgggggcatacacgcactcatgtgtactcaacgttcacatgcactcacaccctggctcggctctggggacgctgaggccgctgtgagaagaaggacggctctggctccgtcagatgaggctggcaatgctggatgtggtctcgtgacgccggccagcagacaactgtcctgagatgctgaagatgctgccatggccgccatggccactgtgggtggagggagtggccatacagatggaggggcagtgtccgctcacacccacttgatacagcagcaggcccagcagcaaaagcgagcccaaggcagccagagcaatgcccacagacagcatggcggccagcggccgagcaggggcaggggcggcggccagcccggccagggtcaggccggtgaccagcagcacgaggccactgagcagcaccacgagggcgtcggcccctccaccactgcgcagcagggccacatggtgggcc

SEQ ID NO: 160729 - DNA, 1000 bp, Homo Sapiens
ccaagtccaagagcataactcactgccctttttattcactctttctaaaagtgtaactgaaaagatatccttgataaattgaaactttatgatgcaaaatcaacatttttcaaaaagattctaacacagtttaaaggcttctaaaaattaataaatacaaccaatagagaaataaacataacatggacatttggcaacacagtatctcaaatcagatataaggttgctacaataatgtactatatatctctgccatttttaagtatatttcactcattgacatagcaatcacaactctccttcattccttcagagggttgctggtaaattgatcaagaaatgtgcttgaaatgtatttgattgatgcattacaactataaaatagttccaaagtgcaaatctgtgtaaaagtgtcatacacatcagctattcagccaattgtcatataaaaaatatatggtagccacttaagtgtactataaagtgaggataaccatctgaaatttataaatattcgagcctttgccgaaagcagcttgtatgtgaaacttaaatggcatacagtacaccagaaaaaggctccattccaaagtactacaaaaaagaattgtatttacagatgacatgaactaatcagatacatccaacatcgtctggaaaacttaatggcatgccataacttaatatcacagtcaacatgcacaacagacctcataattattttttctaataacaaagccaaaagcaaagaagtaaatgaagcaatataaaaatgaaacagtgaaagacaaagggaagtaccacaaaaacgtttcaatgatatcactgaaatgacttgagaaaccagttaggcctctggagctttattattattattattattattattattattattattattattggcaagtcctgtcatgaaaatgccctgaagattcagacctttgcaatttttccaaagctccttcccactggaacaagtcttaatggaaaagca

SEQ ID NO: 160730 - DNA, 1000 bp, Homo Sapiens
attttttaaatattccatgatattctttttatttccaggtgtggcatataaaactgacagcttacagtaagaaatatttcttatgatcaaacacttcatatgcactttattgcttttagttttgaattatttcaaggtatgttagaaaatgaaaaaataaaagatcgtaagtatatgtaagattagatgaactaagttgcttaagtcagtggtttccatatcaacaatgtgactacaagttaaaagttctgaagtcctaaatgtctcttcctgagaaatttcccatttggggctcaacagcacaaaacttttattagcgcttctctggggaatcacttggcattcctcggtctctgcaaactggacagcaggttcctttcaccaattcaggactgggacagggagccgggggacaaatctccaccacacaggtgacctggccactctcacaaatgcagtgagtgcagtcttctttcatccagcgctcctcggccttccttggaacccctctaacatctgtacaccctgcctgcctcaggcgtgcctccagcttgtttatctgcacagcagtcttgccacactcgcaggtccaccttcgggatctcgctgcagttcaggtaatcctgtgggtattctgcctttacaaagacatcagcctgcacttgctgaatgctgtcaccattgtcacaaagcacccggctcagggacgcctgcttcagctgagtgagttgtgccggggtaaatactccagggttttcataccagaacctatctccatctcttagccgctgaaactgggtaacaaacaggcacataagtgttggtcccactcttgtaccaggaatcaggtcttcaaccataagggcgggccagaggtcaatgtcacctggagagccgtacaactttctcagtttttgtctaatctctgaatctttaatttcattttgaagatcctcaaagttcttaactgaagtcaaattacagaaaactctgaagtcaa

SEQ ID NO: 160731 - DNA, 1000 bp, Homo Sapiens
gatggggggtgggctttatacaaagttgagtggggtgacaatggtacagaggaaatgggactttgcaattatatttttctaagtggtctgaacttggtctcactacccacatcacctggaatggttaccaggcctcaaaggactgccccacgggctaaacagctgatccgctctctgaagccagacagtcttatctgggaggtcctttacagatgccactgttgagggccggaagctgaagagagtgagctccatcctcaagtagtcctttatgctccttttgaactagccttgctgttctgggccgtcatttgtgatttggcctggagtgtaggttcttcagaagaagtgatgggtcctttaggtaatgaaataggtgttgatggtgttatgggtgatgatgtaactggtggcggctgtataaagtcttcatccttagttcccttcagttgaggtgcaagatccaccatgttctctttagattcagtgaaagtaggtaattccacaagaatatcagtctttggagcctccccactgagtggtatctcaatcggcttgggcttcacatctatcaggtagaaggtgcgggacaggagcaaaagggaaggagggacgttctccttcaggtggaggtcctgccactccgtgagctgttgtcgcagttgttcctccgtgagacccagtgatctcatccctcgggccctacaggcagcctgtagttctgatacactcaatgctgtcaccccttccttggcaattatttcatcatctgcttttatagacttcagtttcatcaggagctgaaagcggagcaggttgttggttccaaatgtctgcaattccagcagtttgcaaagggcaaccagctgagggcgatctaagtgttccagggccagctggtcctcaaatagtttggagaagcgaactatctcctttgtgctgggcttgtggcctgtctggacctgcttcacgtaggatgagagctgtgtagaggcatcgc

SEQ ID NO: 160732 - DNA, 847 bp, Homo Sapiens
tttttttttttttttttttttttttttttttttttttttttttttttttttttttttttttttttttcaggatgtgacaacgtttttaatgcaaagtcaaccattagcatctttcccatgtacttattagatgtgaaatggcaggacttcacggccccgtttgcatattttcctactccgcagacgaataatattttcagggaaggcagcgcagtctgtgccgtcacaatcgggcgactgtgggtgatgagggatgatgattttccaggaggccctggggtcagaggactcctagagggagtttccagcccctcaatcgcagatggatggcctgttgatgttgtaactggggtggaagttgagccggtcacaggaggtgatgcagttatcggggccagtcacgatgcttttctccaggtaaacattgagagtattgttccggaacattccacccgaggcatctcgtgcacggtgggggctctgctcccgtaagcctggttactggtcctgtacacggagacagccttctgggtcctgtagccccggaaccaccccgggttgttgaacctgcccggcaggtccgcgctcacgcggtagtagtcgctggtcctctccggcggggccgtggccttgggcgccacaggctccgcgcacgctctggggcattcctcagccattgtgcctggaggagaagcgggactcggcggcgtcctgttgccaagcgacggccaggtcacgtgaccaggagcaaggtcgggatcagaacctggctccagccctctgtttcctgaaaaggtccctgtgcttccaggtctttcctggggctgctgggctcccggctccccac

SEQ ID NO: 160733 - DNA, 1000 bp, Homo Sapiens
tttttttttttttttacttgacaaaattttactttagcccttgcatctccctgccaggctgccggacagctcccccgacacccaacccaggaggcagcctgatcccaccttgtgctttggtaggggacatccctcacccctctctcccaggagaccagggccaacgtaccttgagagtctgtaaacctacgccaggactggggttaacaccccagcccaccagctgagtctgccaggacacggggctctgggaagctctgaacccctcccatgccccagatcctgtgccacccacacccacaccactcaggactctggaaggaggtgagcggggaccataccaagaccccagaggtgcctgtggagagcagggcttgctggggggaagacaatgaagcagccaaggatccctctcgaggggctctgtctctggctgtgcttctccagcccaagctgcccctctccccgggggcagtgacaactgttcccccagagcaagtccagagtcacagaccgtatcccctcccaccagcaaacaggaaactaaagcagtgaaaacatcaagctttgttgccagagaaaaaaaaatgaaccctaagtatttaaaattcagacggaagtcccagcccaccgggccagccgtgagctgcagaggccttgattgcagacacacacccctccatatttccccaagctcaagggtctccagagacagaaggaaggggttttgggctgagtctgtcaccaagaggcagcgtttgggaaaatcaaggtcagggtggaggtgtcctcagggggccaccggtgtggggcactgaggactgtaaacatgacccagggtgagggccaggaggtgtcccagccccgaggttctccctggatgaaaaatgggcactgtggtgagaagaaaggggaccggcggtcagccccgaagccaagcaagacctggtccccaccaggagtatgggggtgggggctgagctcaggaggggacatgtta

SEQ ID NO: 160734 - DNA, 1000 bp, Homo Sapiens
attgtaagatggtctctttatttcatcattttctgttactttcttctttcactgcctggatgtttggtagacttgaatagcatgtttagtgcatatgagtttatctttcagattttcatgtatatgcatgcattcaaaggctataaaaattcctccagtgtagctttggctttccccttaccctcacatctctttggccacatttcacatctcttggcatgttaaactctcaattcattcttttcattaccatttatggtaattgcatgatttctttgttaagcaaatgataatctggctgtttttttaacttgtaagaaaactataacttttgctcttgataaaattactacactgtggttagaaaatgtggttctggaatgtgttagaaataaaatttctcccaacctttcccagcatttttgacaattatgatctgaacaatttacatccataaaattttctttgatatgaattttcagacttaggataaaggcttacctctgaatgaaggcattgtcactggcattacattcttcaagtctttctccaagagggagaagtaagtcacagtcacaattagcctaggctaatgggctttccccattacttccattcatatggttgcttgccaacataaattctctgatgattagtaaggggtaactgctgatggaaggcttttctacatttattatattcacatgtgtttctctattatgcattctctgaggttgaacggtagttgaatcatgactcaaggtcttctcacattccttatattcatagggctttttctcagtgtgaataacctgatgatgaatcaattgtgagcaatgactaaaagccttcccacattccttacattcatatggcttttcacctgtatgaattctgtaatgtacagtaagatgtgagacccgtttgaaggccctaccacataccttacattggtagggtttctctccagtgtgaattctctgatgttgcttgagttgtg

SEQ ID NO: 160735 - DNA, 1000 bp, Homo Sapiens
aatgtagcctctaaagcaagtgtcagagagagagagaaagagagagaaattaccttttttttttttttccactgcaacctctgccttctgagttcaagcaattctcttgcctcagcctcccgagtagctgaggcaggagaatcgcttgaacccgggaggtggaggttgccgtgagccgagatcatgccattgtactacagcctgggcaacaagggtgaaactccatctcaaaaaataaaataaaataaaggcggagatggcaggatttcctggttaactgtgggtggaagggaaagacagaagtcaaagacagctctaaggtttttggtctgagcggcaaaggacagagccgaagaaagttggggagggggggcccagcacggtggctcacgcctgcaatcccagcactttgggaggccgaggcgggtggatcacgaggtcaggagaccaagaccatcctggctaacacagtgaaacaccgtctctactaaaaatacaaaaaaaattagccgaccgtggtggcgggcacctgtagtcccagctactcgggaggctgaggcaggagaatggcgtgaacccgggaggcgaagcttgcagtgagccgagatcacactatggcactccagcctgggtgacagagctagactccatccaaaaaaaaaaaaaaaaagaagctggggagaggcacgcctagggggaaagattggaaactccatttaggacctatggaatttgagatgtcttttaaacccttgggtagaaatggtgatgaggtaggagcccaaggtttcgtggccaggtctaggttacagacagaaatttgaggattatcagaatagagacggggtttagagtcattaagctagacaagagcacctatgggtgggtgcagatagagatgtcaacgccatggccctgggtcatgccaaagttgacatgctgggctagtgactaggcctgaccagagaggtgcagagagaagggctggaagcagggagag

SEQ ID NO: 160736 - DNA, 1000 bp, Homo Sapiens
ctgtggtttatcttatttactgctagagaaattctaagtgcaagttgtattttaggagatgtagcacccagtgtccttttgaggtttgatgtctggttctttcacaggtttcacttcttcttctggtttgggtttagtactgtcatccttgggtcttttggtgagatcaaatgcagccaatgtttctggtgtccactgaacacttgtaggaggaaattcgaaaggtataggctctacgagaccataatttgctttgagttccagctgtggggcttctgttggagttttttgaaagtaaataaatccattttctctctgacatttttctagggtgttcttcacaaggtttccaagtttcctaaagaacagatgtcctgaaggtttgactgttggtccaggtcctttggtttctccatattctttacacagtgcttctgcctttgcatacaatttttctgcttcttggagagacctgattgcttcaccgcatttatcactagccaataaagtctcaccatggtaacagtaagcataagctgtgtagaaacacatcttcaagtgaagatattttctccatttggcagaatatgcaggctccaaactggataaagtatgatcagctttttgatagaaattggctgtttcatacgccagtgcagcaattagtccaggagcatgttttagttcaattgctcgagcaattgttacttcttgagcttcagcctgacattgaataacgtatgcttctatgagtcgtgactctaaatctcttcctttttccgcaggtgtaatgagttttgggagatgactttcctttaaatgtttaaaaatcccagctgcaatctttaggcttcgatgaacttcttttgcttcatcttctgttatattttcttttccagccagtcttgaagcatatttggtataccataaagctacattaaatcccatggaaattaattcaaaaacagcatcctgctgggcacttggaacctgtccttgc

SEQ ID NO: 160737 - DNA, 1000 bp, Homo Sapiens
ttttttttttttttttggtataaaaaaatttctttaatcagaaaggatttatcttccctcaacacaaatgcacacattaatagtaaaaatacatatatacataaatatttacacaaagtagaagtcacagtggacagctgtatgccctgggctagaggttgagaagatgagcatcagcagcaactggaggatggcttctctgctgctcccggtgtcctatggtcatctttctggccaaggtgggtagactgggaggggatagggtatagctccagtctgatggcagagttactggcaaactgtagcaacgaggaccctctccagatagtttcataggctcaccagggatgacaggagatgctgtagtaggtgggactggggtggttggggcagagtgggtgaagggttgcactccatgctggaggaaaagaatgacgccaatgccggttccagtgcctaaaggaccatggctaaaggagatagtacctggggagctgagaggggggttgcaaattggagtggtgtggatccaggtgaggttcatagctggccattgtgtgaggtgccaaggctgctttggttttaaagctagatgtcctagctgtgtctggtccatcttttccataggagatgcaggagaggaagcagctgaatcactgtggtggcttggaaaatgcttggtcagctgatgcttgccaccacccaatgatgacttctgggcagctatttgtggaaaccaagtctttaacatcccttctacctgtagcaaggttcctaggtaacgttcccccatctgtggcttctgcaaaacacctacaatacgctggatcctgtccattgccacactctgctgaaaactgcttaatcctctctcaaaacgacccatcttcagcccattgagtaggtctgtgagaggaggtataaatccttggagttctttacacttctgggcaaacagcaggtctccctctgtggtacaaccttgggtgtttagactggt

SEQ ID NO: 160738 - DNA, 1000 bp, Homo Sapiens
tttttttttttttttttgtgctatgcaaggttttatttacaacttagatgactctatgattgctcagaatctgacacagactaataagtttcattgtctgaaaatactcataaaatacctcatctccaaaataattcaaatacataattaaatgaacgtttttaaaatgagagttttcagaaaggaaaattaaacacattttagtaaatatatgttttatttgtcaagagtaaatgtcagttttatttagaatattcaagtacaaaaaatgaaaatgtatatatctatgactgttaagaaatgttagaaatcattaaaatgttctgagaataccagtaaggcactgaatgcaaataccacctgaaatatgaattatgtgcatttttatatctttaatattcagatgttcatagttattttcttaaaaagtatttttaataaaatgattcaaccttattatttttaccctggaagacagagtttaaacaagtatgtaatgaaaagttttcctaatgaaagctgtgatacactcatgctcaaaggtactttatccttaggaaaaaatagcttatatatctggatgttttaacttttaaagatattttgtttcaccacagtaatacgtcagccataataaggcataataaagcatgaagtcatcatattaaataatctgacacaaaagcttaagatcatatcaccaattgggtaattgtataaaaaatttttaagttctataaaactattaagaggttagagttttagctccataatacatcccaaaacatattccccaaaatttttagcatatataaaaaaggttcatcttggaatataaatgtaatcagatagccacgatattaatgggttctgtattttcagtggcactgacttcgctctttggtataatgcactgcagtgacaatagcttggtagcaagagaaaagatttagattcatcacagaacagcaacttaaacatttctaacaacagtgaatat

SEQ ID NO: 160739 - DNA, 1000 bp, Homo Sapiens
ttttttttttttttttcttttttttttaaaagttgcaagtatttttattatttttcactaggtgacagagtttaatggtacttcattcgaaatgggaaagaacttgccttttctcatgtaaactgttttcctgaaaaactcaagtttgcagtttgctagggaagtgctggcacagttgcgaaggattgtgtgataatatactcattttacaaatgtgacagatgacacccagaatcacattaatttgggcttttcaaaaacattctttgtttagaaggagattctaaagttatttatgatgcttagccatagtattcaggcaaatgttcatttctcctggtaccagtgtttgcaacatgtaatattccagaaattatttttggcatctcctggaaggggagctctctgccaacccatcatgggtattttttcttttccaattcttatgagcataaggacttttaggtttgccttccaatatacaagtaactgcagagcagccactccattgaaccctggacacttcttttcttccaagacctaaaagcctatccattctccaaaatgcttttgcaaaggctttgtgtgtgtcctcatactcacacctcactgcttctgttttgtttatggcagaaaagaggtcttctattgctgtgtattcttctctaaacacagtgtaaaaggaattgattatttgttgctcatcagttgtcatttggtaagaaggatcaaatttggaaagctgatggagaagtaaaactgggagttccattgatgtcaactctgccgctgaggcaccgtgatgtccatcaaacaaaccaaaaaaacacacattaggtttgttaccaaaattactcactacagtgaatttatcattcatgtcagctttccatgtagaattcctgtcttcacaaatgcccactcctttaattaacagatgacatattttttgagaatatatgacactcctgtcaatgttatcaaaaatcttatagtatgc

SEQ ID NO: 160740 - DNA, 874 bp, Homo Sapiens
ttttttttttttttttttttttttttttttcgccacacacaggggtttacttgtttctatttccagatttttttttagaaagttcaaaatatatacatatatacagacatatgtacatccacatgtgcagacacaggcacgcccagagttgttgctggttctgcctccattcagaatggcaggggccacccagcagacaaggagctgacctcatccatgggggtttcagacttgatgggcagggagtctctgctcagaagccaaactggaggtgatggcaagcctagcccccatccctgcccaagaccatcccctgcaggacaggcctgatgggcgagtggtggggcagggcatgcctcagtcggagtcacaggtcttttgttcggtggcagcatccactgcagaggctaggctgtcttcctggcctttcagcctttcacggatcagctcggcaatagccctctgagtccgcttttttagtttctccagcttcttggccacatctctcttgaggtcccagtcaggcttccgaggagcgaggttggccaggtccacctcctcgatgacgggctcgggcttggcggcctccagctgctccttcaccttctcctccactgcaaccggtttggcctggggcaccctcctcttcttcaggtcctcatcctccgggacatagttccgcagcctaagttccctgtgcttctcgccttcttcctcctcttctctgagatgcttggtctttggctccccatcttccttgtccttgcgcccggttttctcccgtagggccttcagccgttcctttcgccgcaacgcctcttcctctagccggcccacaccagccgtagtcgcctccatcttgcccgcgtacccc

SEQ ID NO: 160741 - DNA, 1000 bp, Homo Sapiens
ttttttttttttttttaccgcttttggccagggtggccctttttatttgctgaattctgtactttaccaacagaaaaaaggagcacaacaaacatgcacatgttactgacttctgcattctcgtcgcattgcacacatacatttcacctgctgtctgcagtgtgcacacactgtcaacactttacagtagttcatggatcctccgtgttcatgcacatcccattttcagtgtggctgtgaccttcctccaggtcacctactgtagagctcgctaagccattcccctctgcaccggcattgggcttgaagtgaactcaacaccattgctcccatgattccttttctctcaaggattattctgggaaagtgggctctccaagccacccagtgtgtagagtccttgatcattctcatcatacatttatgtcctgctctccagaaacactgaatcagtcagactgtagagtgtcaccagtttccctctagccttgcaagtgctgggtgtatttatgtgtacgtgtgtatatatagagagagactctgtgtgtgtgtgtttagcaggtgtgtaggtaattcccccattacagatgagaaaacttaggaccgaagggatgaagtcacttttcccagggttgctcagccagcaagtggcagcccccagtctagaggtcacatcccctaagcctcagtcagtgttctgttagacaaaccaccctgcctctgatggttgcttctagacttgtagacaacaggctcttcctacttctctcatcccttgtccgtggcggaaaacagaaacacaacttgtcccctcatggtttccatgtcatgcagaccaggttctcggcttcacctgggcccttccgcaaacctatgagatccaggccctgaggagttcctcaggagacatcacagccgtggcacaggcatccacctcctcccttctgcagctgattaacttctggggtgaattggttattttcaaggtgtctgggaggac

SEQ ID NO: 160742 - DNA, 1000 bp, Homo Sapiens
tttttttttttttttttttctttttttttttttttataatacaatttgtgtttattagtttccacaatgttacacaaataccatgcatttatttgcaatactgaaatgtcctctttaatcaagattttccagggcttaaaaaaatgattatccttgctattacttattaaatggtatatctaggtgccagaaaagatagaaaacatagggtaaacttatttttaaatagcatgttatttatattttcaaatcatatgcccagcatgttttctttcaatctctagacatcttttcaggtgaaatacctctaaatttcaagcactgtgtgcaattgttaatctgagaaagatacaataaattcactatacaatgtcttaaaaattggaaacatgggggaaatagtgtatttatttatttatataccaaaaaaaattggcagtgatcattactgagtgttgtgagccaagctctgatctcagcccatttacatacacttgcctcacttaatcctcacaagcctctagggaagacattatgtctgactttcaaatgggaaagatgagattaatttgtccaaagtacgcagctcaagtggcagaaatggcatttgaggcaagatttctggtttcagtacttgcatccttagctactgtactgtattagttcccgtaaattaggagaaatccagtaactgcaagaaagagcttcaagtcttggctttacctcttacaagcactctgtcattagacaactttcttcacctctagggctcagcatcctcatctgtaaaggtgctgggagaggaggaagcatttacatacctctaactgataggtctactatgagattcaaatgagataatggtgataccacagcttatagtacggtgtctgccacagtaatggctcaataaggaacagctattcttattattatgctgcttccatactacacacactgtaaaacaggtttactctccaacaagaggcagcacagcata

SEQ ID NO: 160743 - DNA, 1000 bp, Homo Sapiens
ttttttttttttttttttttttttttttttgatttaaaaaagatttatttacttgttgaatatttattagtagtagtagtaataaatataaccccgaagccacaaataaccttaggattctctcagctttaatggcagtagagtccagcttcttaatcttttgcacaaaatacactcaaggaggagctatccataagactaatagaagacttttgtctccctgacccagctcctctaatttcatatgggaaacacctaacagccataaagtgatgatctgggagtcctcattagagatgggctggacatgtcagaaagctgaagaaagaaatcaacctatttgtgaaccttaccatctaaaattgttagtctgtgtcttctaaataaacagagacctttttctcttggttgagcctttcctcttcttttgattttatctccaccactttatgagctctttcggcccatcgctttttccggtaatgctggaagaggaccactacaattactattatgatcatcagtgcacaggcagagccaatggccagagccaggaagtggatctcagagaagcgtacagtgtgcacgacgctgagccggatctcccctatcaccccatcaacatcaggtgggttcttcacctggcaggtgtatgtcccattgtcgtcgaactgcagtttccagagaaggatggaggcatcgtaccgctcaggattcccatcccaagacacccggtccttaaaccgcccactcatgggttggaagggatctatgtggtagtagaatacaaactgctcaggtcccccgtctagaggacgaaaattccaggtcactgttagagcatcacccacaggggcaaagctggagaaagtgcattttaaccgagcatctgtcccattaacagcctccagcacccgggaggtataaatttccacagctgctataggccaaagagctgtgagctgtatgccaaggagaagaagcaccgcacgagtagagc

SEQ ID NO: 160744 - DNA, 1000 bp, Homo Sapiens
ggcaaagaccacagtgctttactttttgtcttagcagaggagataacttgagggacagcccccaaggcgccaggtagccttcaggggcgggcagggttgggggaggtaggagactcggaccggcagccctggctccagcttcatcatctgtgtcttccctctctggccaggctcttcgaggggatgcaggaggctgggcacggtgagctggcagggggcttggtcttcgggtgcccagcaggttgtcagctcctgtttctgatggactcacctgcaacgattccggcataaccgggacagctgcctgcacttgccactggtgaggatgatgatgcctgtgatgaacagcacagctgcgaccaacagcccccgtttccggagggtgtgttcatcatagaagaaggggtcatcctcatgaaaaccagatggcttgagggtctgggggtctgtctggacgtctgtgcttggggatggtctctcagagagcgtcgtggtgtcatcagtgggatgagctgctttggtgctcttgtgtgtctctggatctgtcactagaggcccatccgttccttccagttgctgggtctgggtctggggttgtggtgtttcatcagcaggccaggttggggttggagaggtgggctggagttctgtgtagactgcatctggggctcgtgtcgggacctgaatgtccatgatagttgagtctgctgaagaactggacgtggtatctttcaacgtctgtcctctggtggggagaatcaggccaacgatggtgagaagacacaggcgaccagagggcgacatctgtgggaccaggcgatgctggggtcagccatgatgtcagtgagaccgacctccggcagcccccggggatcctgcagccctttccctgccctgagcaaaaacctctggcttccaagaccccctgccaggggctgacggctggcctcaggggaaaggggagggtcttaggtggggataccaaaccgtcaccctgctt

SEQ ID NO: 160745 - DNA, 1000 bp, Homo Sapiens
ttttttttttttttttttttagtaataacatgtttattcaaaatactaacactgttacattcttttcattctcagggcatattctactagagatgtactgtcctatgttttgaagtcacctggaagagttcttagtgtggttatatgactacatcaagagttttttacttttgatgattagggactgctttttaaaacttactttactccataatcttaaaatactcatacagttccacagtcacatttacactaacaaggcatatttgaagtccagctttcatccttgatcctgctactctaggctctcctttctcctaaagataagcattttcattatgtatcatgtttatcgtataggcatgaacacacgcgcggccccttccaggcagtcttcagtgatgtcacgtgttcccatggcacctgtattgtactcttatcagtcattatatggactttaacttccccagatattatttgggctcctccataagactgtgagcatctgaccactggagtgttgcttcccattatatccctgttatcaagcacaaggtcaggcacagagtaagactcaaaacatgttttggaatgtatgactggtatgaactacaaaccagtaagctgatgttttcattttgagtctataaatctaattttgtggtggttttgtgtatggctcaaggctcaaattgtaaaatttaatattatgtgaccaaagaaagttatacccagaacctcaatttcctcaccttcaaaatggggcagtttctcactcattggtctgctgtcacgattttaatgagctcatgcacaaacagccctttatataaggtaagtgctggataaatgttggctactataataaaataagcctctaagatacttggtcagcacaagtactacccaagagtatgcactgtaagtaaactgacaaaattgtgtatctaaaactggccagatgaaagagaaacttttaaggggcccttctgcgtgcccg

SEQ ID NO: 160746 - DNA, 914 bp, Homo Sapiens
tttttttttttttttttttttttttttttcggatgatttttttttttaatttggaaaagaaggggttctgtatccagagggggttccatacccacatcgtcggtggtgagcagtgtggccacatgcccggatggcaaagccggctatctagcaggcagctatctccgcctggttttgtgcttgggctcgctggcccttcctctgggagcctggagggttggtgagtcctggtagttctgggtcatgaactgggtgcttgcttcaggttcgcccaggtggaagcggttcagaaatctgtccattttccaagagcctcgagttttgttttccttgggaaggagagagatgacttttccttcctgaagatagacaaagaactggtagcgatggaagccactgtgtgccggtggggagggagcctggtaggctgataactcctggccctgaatcttcccttccttcaggtcggcgcccttgatatctgttaccagccaatgtctccagaatctctgtctgggttctgctctgctaggggcatctggatccaccatcaccaggatataggttgcgccgtccacggcccccgggaacttgactatcggctccatccaggaggtgatcttctgtctgtagttgttacaatcaggaacaaccttgcagccaatgttccccaactctgggtagaaaacttcaaggccctggcaaaagagggtgtcctcgtccaagagggcctcatgggcacacgggctgttctcatcctcgtctccagtgaccaccatcatgagacccagtaacagtgctgctgtaaccagcctcattgtccaacccatgggcacctctggttaagcacagggagaaggacaggcagcttccagggctccgcagctaatccagtccaccacccggacacaagt

SEQ ID NO: 160747 - DNA, 1000 bp, Homo Sapiens
tttttttttttttttttttatgttccccaacttttaatattagttaagcaagaattgcactgcagcagcaggatgctttttagtggctgacactataaagctaacgttaagaaagaaaaaaggcagaaagtgtgagcaacaaatggtgtaaccaaattattgcaaatggagattagcaataagaagtgaggaaggtgaccgtccactccattctgataagacaccatctttaaatattaagttttttgcaggaagtggaacacccatgtcagcatacgatgactgtgaaagcaaacttgaaaaactgggctctgtgtgaatatccaatattgaagcaccttcctggaatgagtgaacaaagttaaggacttgcagagagagttttctactggaatgtaagaggttttgaaggctctcttttctgcaaaggccatgtgcagcaattttcctacaaactttccggtttaattcggaactgaacagtggaattccaaagcacagctcgagaggaacccaatctgcttctgttgtggcaccagaggtttgctttgttgctgaatctatagttgcttcctcaatgaccatttcaaatgactctgtactcccatttacatctgagccagaagccaaatcaggttctcctctctcatcagaagcatcactgagttttctatctgcaagttggctggaagcattcaacatggtgacatatccacagagatgctgtaagtccactctgttccttagtatctgcaatgctttatgaacacccatattgacacgagtgaactctccttgtagttctgtttcatcaaatggaaatgggacatggacagtttctcctatcccatgcagaccatgcccctgaattaaaactgcagaatgtgttaaagcatcattcaacatcgtgagcacatttgaggtaggaactactccaggatcatgaccccaagatgttattagcaatcgatcataactctgaaatatatctggcagtttt

SEQ ID NO: 160748 - DNA, 1000 bp, Homo Sapiens
caaaaaaacattttttatttttatgaaccaaaaaatgtaaaagcaagattaatatgagaaccaaaatatgtaaaacacaatatttaaaataattagaacaaaataatgctgtagtccaggcaaaagatgattcttgaactgtaacaaggccatggctaaagatattcagaagagatagaaaaaagactccaaaaagaagtaataaaaatcttttggtattggaattcaccttctttaaaagctggttgttttgagaagaaggttactcatattaatgatcgattctcatcatggaataaataaaattattcacaaaaatgtaacgttttaagaaaatggtctgactatattggtccttcagcttcataatttgttgtgaagaatctttaagttcttaacttttcattttttaactgaattgaggacaacttttaaatgaattagaagtaatagaattgaaatgaaaaagttcaaaagcaaaccaagcccaaagctagtagaagacaataaccaaaatcagagctgaaggagactgagaccaaaaaaaaacctttcaaaaagatcagtgaatctaggagctggttttttgaaaaaattaataaaacagataaactgctagctagactaacacagaatagagaagatcaaaataaacctaatcagaaatgaggaggatatcaccactgaccccacagaaatacaaataaccatcagagaatattatgaacacccctacacacataagctaggaaatctagaagaaatggataaattcctggagacatacaccctcccaagactgaaccgggaagaaatcgaatctctgaacagaccagtaacaagctctggaattaattcagtaataaatagcctaccaactgaaaaaagcccagtaccagatgggttcacagctgaattctatcagatatacaaagaagagctggtaccattcctgccaaaactattccaaaaaattgaggaggatggactcctccctaac

SEQ ID NO: 160749 - DNA, 1000 bp, Homo Sapiens
aatcaacaaacatttatttctcatggtttgggaggctgggaagtccaatatcaaggcactggcatagtccatgtctggtaagggcctgcttcccggttcaaagatagctatcttctcactgcaccctctcatggtgaagggcaaagctagctctctagggattcctatcaggaaactaatcccaattacaaggcctccatcttcatgatgtcctccaatcctaaaaaccaccagagacagggcctccaaataccatcacattgtgggggagagggggggcacgggggtaaggtttcaacatatgaatctgaggtggcatacactcagccaaaacattacacctctggcccccaaaatccatgtcatcacatgtaaaatatattcatctcatcccaaaggcctcaaaagtctcagttaattccagcatgaagcctaatgtttaaactcaaactccaaagtgtcatctcaatatcacatcactcagatatggatgagactcaattcatgctgaggcaaaattcttcttcagctccgaaccggtgaaaaccaaactagtcatgtatttccaaaatatgagacaggcacaggatagagattcctattccaaaagtgagaaacaggagaaaggggtgagctcccaaacaagtctgaaacccagaaagcaaactgaagactttccatattctttagatatgtagatacttgtagacctgtcctccactattcattttcacaggtattcgaaggttgtgtgataaatgaaagctttcccacattctttacgtaaggtttatctccattatgagctctttcatgtctttgaaaggaactggaataactgaacgtttttccacattgcttacattcatagggtttttctccggtatgagttctttcatgtattctaatggaactggcataattgaatgctttcccacattctttacattcatagggtttttctccagtatgagttctttcatgtgttcggacagaacta

SEQ ID NO: 160750 - DNA, 1000 bp, Homo Sapiens
ttttttttttttttttccaggtgcatgtaatttattaatggagctttgacagtcacaagttccagcaagtcaggggtgggggctgcagggtggcctcttgccctgtaaccacagtcatcaaatatgcctcgccatctttgaggggctttcctgagatgacagattcctttctggcactgtgtagccaactggagtcacagacctcagcctgggccaaatgagcattttagggagaaggacaatcccttatagcttagccctaggggagctctgggcagggttttacacattctttctgaaagtaaggtcatttggggacagggctgagagcagtttcttggctacacagatgggtctgtcagggttgaagccacatgggtgcctgctcatgtgccatgttgaaggagtccctgtccgcctctcagcagcccgcatgggctttactggttggccttacactcaaacaggaaatccctgggtctcaggtggagagtgccgtgccgtcctgcctgctccccagggccctcacaggacacagcaggtgcaggacacaggcccgtgctgctgcagctgctgctggagctgctccttctccatcatcagcgccttcatcttctcttccagcttgcccagctccaccagccacctctgcctgcaccactcctggatggcgctggcagacagcgggccctggatgctcccgtcgcgccgcagaaacacctccccctggtctgtctggtagagttgcggctggctctgggccttgggggtgtgcacggtcaggcggatcaccttgagggggacgctggtctccgaggtactgatcacagggatgaaggtgagagtgtaggcatcgggaaagatctgaggcttgaagccctgcaggatggagtccaccagcaggcgtgcgcggtcctcgtcacggtggctgcagcggatgccctgcaccaggccgctgtcctctactcccacgagcaggctgccgccctcgctgttgagg

SEQ ID NO: 160751 - DNA, 1000 bp, Homo Sapiens
gggtacgatccattactttattcattaaggattttttgagtaccttctctataccagctgttatgcagattctaaggaatgcagatgaaaatgtatacagtgtcttctcccccataagcttgaaatgttcatggaaaacaggcaaataaccagatatgcacaatacaatatgaccagtgctataaaggaaggccagattctgaggaatcaaaggggattgtcatggaaatgtgatgtgagctgatgaagactagggatttgccaggcagctatgtaggatgagagaaagaaaagggcagttttctgggtggagggaaccatgtgtgcagatctcagaggtctctagtacctcagtactatgggaatgccagttacagtgggtagggaagaagcagcatttcaagaaatcaagctaaaaagatcatagacaaggggccagaccacatcaaatctttattctacccattcttcctttgaacaggaagagaaaccaagtcaaactagctgcataatgaagtttgactttttagtttcaggtgtctactcccaagtgactgcagtctccatgtctcttaattcatgctctcaagagagagagaatctgatcagtcactggtcagctgtccaagtcagatgtttgtccctcttttgggtgataggatgacctaggtatgtatgtgtatggattgggggaggttgaactggctctatccaagtttgggatcccgtggtagggatcacctttccaggaacaatggatgggaatgtttccctctgaaggctctgtgaaagaaaggcaacaatgttcatctaggacaacactgtagaccatagagaaaagtctagattctttagtagacatttacagaaagcaaaagaattagctgttaaaaccacaaagttttcattttaacatttaaggcaactcccactcatgacttcaaagcataatatccataaggctaaagtaatcagaatatttttgcattgctactgattt

SEQ ID NO: 160752 - DNA, 1000 bp, Homo Sapiens
ttttttatgaatgatgcatgtttttatgatcttaattacatttaaggatttaaaaaatgccactgatctcacagtttacaatatccaaatcttcaaacctgctggaagaagtccacagcacagcctggaaattgcatccgttgcattctctcgtgcagttaccttctgccttgatatgtagtcagttcttcctgaaggatggaagctctcttttgcagaaaattaacctgtgattttagggaggaaatggtgtcttcaagttcttgtcttagggatgctggcatcaatcctttcaattttgtttcatattcttgtcgtatgtaagttatctgttcctgtgactccaattctttgtgttgtaattttttctctgcacatcgcacctgattagaacggttttctaattcatcttgtaaaaccttgattgcttggtcattatctctaatcagctgcttcttctcatcttcaaacttttgtctaacatcctggagccgcctttctgcagcaagctgctgctggctgttctcttctttcagagaggaaatggttgtctgaagttctgctatgatctgtgaagatttggcaagcttctgagtgtattccttctcaatctgcttcagcttgctgttggccttttccagtgtcatctctgtctcagcagcatgagtctttttcagctctattttcatcttttctgattcagccttcagtttattgacgacaatctcatgttcccttgtagccctttgcttttcctcttcacgaagaagaccaagctctaccagctgctgtttccgctgtgagttcacattgatcaattcttctctcaacttgtgaacctgggcctccatgtcggcaataacctgtgcatctcgtttcttgaactcctgaatttgattttcgtgctccatattggcagcgcgaagctgtttttccaggttttcaatttcccgttcatggtctcggactaggctatccttctctgcgttatgctgctgta

SEQ ID NO: 160753 - DNA, 1000 bp, Homo Sapiens
ttttttttttttttttttatttaaataacattttaatgacaaaatttgatgctctcaagtatcaaaatggaaataccaacagcaaggtttccagggatgtccaacaccacagagcagggaggcctggctgggcctccactgttgaggtcatcatggtgcttccgctttattctgattaacttttggttacacacattgaaaaatgacctaagagagttgttttgagtggcgctttttctcattgtacagctcctgctagcagtttactgcaacactgatttctctggaacctctcagtttccagtcatcattagggctgttactagcaaggacctacaagccagcctcaaaatgtgagagggctgccgacagtcttcctgtggttagctgccacagtgcccagggaccatcttccctctcctcctcccccactgccagctcctgttccagccgcatcagttcctcatttgagagatcttcttcatgggactgcagcaactggtccacagcagcctcagcaacctcttcaaaggccacatttctggcaagggtcacaatgtttttttgaagctgtgcaatgttatctgcctgggaaaaacgctgggcctgaacacactcaggccaaatcttcttccacatgctgttcattagtgctggtttgagctcctcccatgcgatggccatgtccacagcatccatgatgctgtagtttctccaaaattccctgatcatagctgtgtcctcaccatccgctgcttctaggatgtgctgaaaagtccttctcagataatgagctttcaaggtcgagattacaccttgacacgtggtccggattgagtcagctgtactgtcatgaaggtattatactcttgtacttcttttttttcttttttttttttgagacggagtttcactcctgttgtccaggatggagtgcaatggcgcgatctcggctcaccacaacctccgcctcccaggttcaagcaattctcctgcttta

SEQ ID NO: 160754 - DNA, 1000 bp, Homo Sapiens
gcgagtaacagtgagctttattttcatgtcaccgctctaggttcattcacctgttgccaacaacatgagggagtttctccacagcccttgattcctgaattgttcaacaaatcaacagtcaccaatacattgacttaaggagtaaacaagcagcttttctctacacaccaccgggcaccccaggaaggcgcagctccctgctccacccccgcctcttggtgcctgtatccagcagaaggacccagcaggaggctgaatccaagcactgctctcaggccactctatcctcatccctggatcctccagggaacaagataaaaaaaaaaaaatcctgttttcctgctttccaaaatggagggccttaacatcaaccaaagttacaaaacaaaaacaaaacacaggagctagctgggcgcggtggctcacacccgtggtcccaacattttgggagaccaaggtgggaggaatgcttgagttgtaggagttcaaaccagcctggcaaatatggcaagaccccatctctctaaaaagtaaacaaaaatcagccgagcatcatatcacatgcctgtagtcccagctactctggaggctgagatgaagactgcttgagccagggagggcaaggctgccgtgagccaagatcacaccaccacaccctagccagggagacagagcaagactctctctcaaaacaaacaaccaaaaaaaaaaaaaaaaacccacatcatctgcaaagctatgttgggagcacagccatttcccataggctttctttttccttgccccattgccttccgggaagttttccccttacccatcatcacgatttttcccatctttcacgatggtgcaattcaacaggatgaattaactgaactagaaaaggataaaaaaaatctaaccctatgaaaactctgccttcaacataactccagggagatgaatattatactactggcacctctgacccacactatcctctgtaccccgtccctgccca

SEQ ID NO: 160755 - DNA, 1000 bp, Homo Sapiens
ttttttttttttttttttttttttttttttagtgttaaaatgttttaatatcaatgtaaaatgagatgagagttttacaagcagatttcagaacaccaacactgatttccaatatgatttctctccctttcagaagcctaaagatgaacatatacaaatcttaggggtttttacaaaaagcatgttttttttctattttcatacatatacagttgacaaacatgcaaaataactaatttccaaatcaaaggtctctagcagaaacatccaaattaaaaatgaagcatttaaatttacttactggccatgaaatccagcaagaaaccaccctttcccccacacttcagaaaaaccaccaattccttcctagaggattgatggcattaacagtacttggctctcccttgtcagcatccagacatccccggttcaatcttgtagattaatgttacagttccaattactaaaaatgccccaccatcttcttcactgcattacagcttagcaaggcacctaccaacaatgcagtttgggaaatgggccatgaaaaacataatggcctgagagttaaccatacatcctaggtctgccaattgaatgaggacattaatgggaatgtaaaattccaggagacattcttttattctcctctccaagttactagcatgtccagtatcagaaagaaaacagtagaggaatgtggcaatagccacatatgtgaaaccttagtagagctaaaaccaaactaaacaaaatgcaaactacagtgggacaaagaactgactctcatttgagttttatttgtggcttcaagcaacctccaaactaagaggctcataaattaggaaataattttaatgcactgagggttcagtaatttgcattagaatattattaaaatttatgttttgtaagagttgcatatacttcattgttgaattcggtgccaacagtaaacaaataactaaatgagatataacctcaaatatacccacttcca

SEQ ID NO: 160756 - DNA, 1000 bp, Homo Sapiens
gaaagtataaaaatcattttactttaatacaaaatcacataaagaaaggcatgttggctaaatcaaatattcactaaatatcagtgaagtcaccactggaatctcaatagcacattttcctgctttcttttctcccttctgctaaccattgaagaccagggtcatccgtgggagcagatgagtaggacacgcgtctgcacactggaggccctgggggttgacatgggagcaggaagtggacccccccaccctgcacatcccttctgtttttcttgatttcagtctcactggcccaggccaaatcttcaagggtgtctagttctgcagccagggagaaagtgatgccaagagaacctcgtctcctccctcctcagtctgctttgaaggggaaataaatacacaggcctagtgtgtctgtgtggcacagggaggtggttttgccaggcatcttggaaggttgtcttctagaatcagagccatagccttacttgtggccttggatctaggtctgtttccccgatcgaaaaaagaacagcttttttatgattgtcttctcctccttgttcctgccagcatttttggcactagtaaccacagcatctttttctcttcttcctcctgggccttctcttggtggaatcaggccactcttgtagcactgcagctcttcctgcaccaccaggagctgcgacttgagtttgttgcgttcctgcagcacatcccttagctcctgcagagtgaagcggggtcggttgggatctgtcaggtcaaccaccattttgtttgggcccaggttcacctccccgctggccggagggctctgtctccgcagcccctccacctccttcctgaggtggtccctctccatcttcagctcctccagcgccaggctgccctcattcaccagcgcctccagcatctccaggacgcggacgactttgaactgcagctgcgtcacccgggggtcgctgcccagggccataagctcgcggcccaacag

SEQ ID NO: 160757 - DNA, 1000 bp, Homo Sapiens
tttttttttttttttttttttttttttttaactccccaaatttttatttttccatttttatcaccacaaatttcttggtaacaatgtagaatttaattttgtaattaaaacaaaaactctcccctaggaggaatctgatgacataaggataacaccaagttatgtgcacaaacgacaaaaaatgccaaactaactggaatgatcatccttcctgaaatttctcttaaaaagcagagaagtagaaccaatgctgccacctagtggccagccaaacaaatcaggtagcatactggagaaaaaggtcatagtcccgacaatctggtttccctgcctattatcaagccacctaactccttacttttccacaaaaaaacacaaccacatatcttaagcaagccctcctccacagtcataatccaaatacttgaatacagcaaccaaagtctgtcttgttaaacacactacttctcatgaaactttcctctgcctattttaaggtaggtttgcccggtcctatggcccagtagagatgacacaggagaacacggaaacatccaaaatgttcactggttcagagtgtgtacacagtaattttgatgtctgttgcctcaaatacctcctcgatcatcgcagatacattttcccattgcagacgatcaagaccacatccaatcctgggcatggagaggtcagtgactccattcttcagacaatgagacttcattgcctctaaactcttctgtaagttttcataagttggcttgtgcgaagcccttttctttgtaatcaagtaatatatatatcgcccatctctcttcagaacagccacttctccagatttcttttgttgatttaaaagttcttgcacccctccaaatttcttcttaaagaggacagctatcccagcgcccatgcgacaatcctcactgatacagtgggctaaagagtctgttttcgggcatgcaaaaaggtctcctttcacataagtgattctgcttcc

SEQ ID NO: 160758 - DNA, 1000 bp, Homo Sapiens
gattgacagtgtgatttatttgggaaacgcctttgagggagggaatgaaacaggatagagaagggagagagcttagcacggatgaaggctcagaaaaagtctagcttggcctgatccaagggtgccagagcagtcatagcaccctggagttttctccgctttaatcaaatgaaccaggtgttggggtgtagagaggaagtgactcctgggtgaggtgagatggctctcatctcctgagggcaattctccagtttctggagaacaagagctgtgagcacttgcagcccaaactcagagcagctggggatgggggtctcagcttggtagaggggactggacagggcaccacagtgtacaacacatatggtcaacaaatatttattgggcatttattgtaagccaggcaagtcagcagaaacggcctgagcagtgcccaagagcactcactcactctccctagcaaacaggctcagaactctctcacacatgtcatcctctttcccactcaaaactcccaccccaaccttcctggaaggcagggctaacaggacctcctgcctgcctgctcacgactgattactttcaatcccagctgcaatgcaaactgaaactcattctgtatatcaccactctacaggagaggtctatttctggggcacccagaagtcagcacacatactgctgggaccaggactcgtaattcgccttggtccaactccttctatgggtttagctgccctcattcctgtgggtaatacaagatcaaacagtccacaactttgcctgtcttctctgctcccctaaggtccctctcccttcgccgtaagatgtgactgaccagtacagtttctcctgaattgacaaactgaactactccttctaccggctaaaccctgacatcagtagaatcaaaccaaaaacaaggtagagtgtttcacagagaagtggtggattgaataaggcagcagaaacacataccatccagcccctgaacctgaat

SEQ ID NO: 160759 - DNA, 1000 bp, Homo Sapiens
ccctagggggtgggggagaagcgatcagctccaaaccatgcaagaaaaacaagccaaacccataaagcaaaagaaaaaatcaacagaggataaattaaaaaaaacacgaaaggtgaatgacaccgataacggtggcgggcaggactgggtgagccagtgtgctccgcagaggccctgtttgccagtgccaggggaaggccttgggcggctcatggcatctccctcatgggagtcttggggtattcacacaactcatcccctcttgtgtaccccgcaccaaagccgggatagaggtgtggccaccctgggccaaagtgtgcaaagtccattcagtcgagagattaaaaaaatatacaacttggatggcatccaggctgggcaaggcggtggcccatccacccaggcactggcagcctgctgtgcaggggcagcagcatccacagggggcatccaggccccctcagtccaggatctcagcagctggagacgggtcctaggagcagcagggagaggcactggtggggccgacaagggcctggctgggagccccaatggtctgcttctttggcacttgggacaaatggctcgccacagagccaggtgggagcagccccctcggttcctcccagatgccctgggccaggatggcagtagcttatggtgtgggtgagcactgcccccgcagatggggctgtggggctctggagggccggagtggggtccgaggcccagcccctatgagtcttctcccaggatctccttcacgaaggcagcaatgtccgtcttcttggttttgtgcaaggtgaagaaggggtgctccatcagctccaggtagctcatacgctctgcggggttcttcctcaggcactgagcagtgaagtccacaaactcgggggagaaacggtcggctgggagctggggggacggctcctccaccacctgcttcagctgctggaacggggtcccccaggactcgtaagggaaccgcaggatggccatc

SEQ ID NO: 160760 - DNA, 1000 bp, Homo Sapiens
tttttctgaataaataagcatcaattttattgaatcatgaataatttaagactggtacaatcatcagctttattctctatgacatggggcatgatgtccagcagatcattggcaaatccaaaaacctcatgacaaatgaaaattaaataggtaggaagagagagagaggaggggaggaggaaggggagggaggatggaaacataccgtacacaaaatactcaattcctagttttctctttaaaaatggctagaaaaaattcatcaaaatgcagcactttaatcaattatttacaatttctatgttacaatgaaaaaatgtacatcttatagaacatatttcataaaactgctccactggaaacaactagatcaaaacagcaaaccttccatttaatatccacaaagttggattatttttcctttttgaagtagattcgccacaatcaaatttgaatacagagaattttgaagtttaagcatcaaacaacaaagtaaaagtccccaagatacaacaaagatctaggcaagtcttgttcctgtcccactcccaccccacccctaatgaaacttaaaaggtattcccatttcaattatggcctgtatcattcttggcagtttgggaagagaacttttggcttccattggtaactcaacataaatgttgcatagaatttatatatttcaaaattggcctaactgtagaaaaggcaaaatggaagcatttccgatagagccctaaatgagtacaaagtcactttgtaaaaggtgagtgacactaaagtaaaaatatgaccaaaataagaaatgtgcatattagacaaccctgcttcccgaaactttaggaaggacacggagttgtgagtcacacaagggctatgctacttgaagtcaatgttcaccaatcaggcagcactaggtacagaagtcttggttctgaacctggacccaggagggaagtctgtgggaaaggggagaagagaatgacaagagaggatgtca

SEQ ID NO: 160761 - DNA, 1000 bp, Homo Sapiens
cccctcaccccacaacagtccctagagtgtgatgttccccttcctgtctccatgtgttctcattgttcaattcctatctatgagtgagaacatgtggtgtttggttttttgtccttgcgatagtttactgagaatgaagatttccaatttcatccatgtccctaattcctaatttgaacagaaaaataaggattctgtgaaactgggttcaagtggtcgttattagatccacataagaatctagaaaatgataaaatatcacaaaacacagcacaatgtgggttcaccaataatgaaatatagagagaggatcttatgttttaaatttttgtaacatatagtccaaaacaaatagataattatacattctgcaatagatgaggacattggcagggcatataaaattagactcttgggcttcaaatgactaagttggaagcattagcaaactcaaggaagggacaattcagaggctataatgggcttaatgctgctatttaaagtaatgaagcattttctctgctttctggattcatttcaccaaacgatttcctcagcaggtcagatatagatttgcagcaaaatgaaaaacattttccaggaataaaacaactgatccctgcaacagctgacttaacttttctgaataataaatcttcatctgacatgcccagatgcctcagagtactgtcactgatattcttaacctcttcctaaccttgccagatccttgtatttcatatttgccaaacataattactgagagggggtaactgcactagctgtgtgatcttaaacaagttatttaacttctttttttgttgttgttttgttttgtttttgtttttgagatggagtcttgctctgtctcccaggctggagtgcagtggcatgaccttggctcatcacaacctccctgtcgcgggttcaagcgattctcctgttcagcctcccatgttgctgggactgcaggtgcataccaccacccctggctaatttt

SEQ ID NO: 160762 - DNA, 1000 bp, Homo Sapiens
cacgagttgtactgactttattccccttcatcctctcactcgcatgcctgctgtgccccatgctctggggctgtggggtgcctgtacacgagcagttgtcaatggtctcaacacacacctgggcatggccattctgccactaccaagccctctgtgaagggcaccgtggagactatggcagcatgagccagggttgaaggctcccagaactgtggccacagggcttgagttcatcactctagccacccatcgccagctggcctgagaccagagagccccaaggagccggggagggggcagacccagactccaggcctgagttctagccaaacaggctgagaagtccagatggacggtgggacccccacagatctccttgggaggggatgatcctgcgtcccccttcccccagccctggaaagtgagtatggtgccctagtcgcctcattctgacatctgggggcacattgtttttttgtgttgttttgttttaaataaaaagatgtaaaagctagtaaaacaggaacccctatccatactggaactgctgaggtgccattattgcttctggccttgtggtctggccggaaaggagcccccaccaacaatggcccaagtgaagagagtgcttagcaccagggacacaggctcctatccccagtggggcaggggcctcccaggagaggggttggttgtgcccacctagagctcccgtgaccgtcttgaccagctgtcaagctgtctggtcagctgtctggacccctcacctgatcccagaggggaagtgtacaagaacatgaaacccatgtcccaggacagggtttcattgccagctccccaccagtgtctctgacctctgcttgtcagtatggcctgacaggtctcagcctggccacggccactcaggcctactcaggctgtagtggggccagcaggtgatgacaccaccagtgcctgtgggagatcctggtgccagtgatgggggttggaaacccatgga

SEQ ID NO: 160763 - DNA, 717 bp, Homo Sapiens
tttttttttttttttttttttaaagttacaagcatttaatggtttaatcaagcatgtagtttttaccagtatacaaaatgagacttagtacaaaacggtcttcaactgtcacgtcagttgttcctggagtgttttatggggaaaagcaaacttcaccaaacatagagtaccaacattcaagtgctcttttccacaagtttctgattttcaacttaggagagaagaacagcatttaataactgcatcccttgcatatgggatgtatgacaggctataccaggtcattgacaagaactgcaatatgcagaataacacagccagtcccttcttatgccaccaaagagcagcacacagggtaaatatgaaacacaaaagcataacaattgttgcaagcaatcttgttgcttcaaacattttcttcagttgcttcacaggtcccattaaaaagcatgtactggctaacgcagcaagattgccgagggtataaaacactgcaaaaagctttatgccgcccggaagccacagcaatccagttccaagaatagaaaagaaaacgccacatacgaagcagatggcaaaccatttcaatctggtgttgaaactaagggatgaggcatccaggacctgcgcagtcaggccctgctcctcgtcgtcctggccgctcaggactcgccgcagcttctccatggccccgttccagggccgtagccctcgtgc

SEQ ID NO: 160764 - DNA, 1000 bp, Homo Sapiens
ttttttttttttttttgagtttcatatctccatttttttattgtgacccagtttctcgtcaaccagtaaaacatccagtaacacagccaatggaaataaatgaatgggtctctgtttatagtgaagattctttcgttctccagctccaggcttcatacggtaaaactctctgggaaggaaaggaactcagagtcccatgcagaaaattgttcagctggaggggtatcagaaagatggatttccaaagccaactgtttcctgtagtgtgtggatctctgcaagcagagcctcatctttcaatttcagcttgatcatgtacttgtaggcctgctcagcttctaattgccgtccaactttcaggcagaccagagccagatatgcccatacttcagcattgtagttgttcaatgcattggcttcagaaagagcatcctcagcctctgtgagctcctccagccgatagcaggcgattcccagtcctagccaggtaaggcatgaaggtgatctcttacaggcttgcatataggttttctttgccttttcatactctttctcttccagatagatgagccccagtctcaggaagatgaagtgcatctcagaagcatccactacaaagctaatggttcgttcatagcatgccttggcctcagaatgatttccactcagaaaatagagatggcccttcaggccccagacattggggttcaggtagtccatctgggctgcttgttgaaggtattcctctgccttggcaaagttcttcttaagaatgtgtgtttgggccagcaccaagtaatattcacagctggggcctccttgagggcataacagctcatgtgcaagcactctgtgcacatactgcacagccttgactttcatcaagaaatgtatggtctccatgaagatggtggtagtttgagaaacaccataatgaaggccgggatgcagaagagctgatgaatcttgacattttgatgcttctttctttgttggtatc

SEQ ID NO: 160765 - DNA, 1000 bp, Homo Sapiens
gacatacaatgtgcaagtatgagacattttattttctaattgaaactgtattaagacatttacttggaatcacattattcccttaattttttcacagagaatattccatttactgtttagtttgtggtcttgtggacatgttctaagtaatatatttgttagcatggtagtttcagttgggcaaaacttactgccaataagacttgaatttaatttgtcacgtatttccaatggcaaccaatgatcaggtgcttcaatattacaaatttcaattcttccattctttatgtctatgaatactttaatttccaagtgtgactgttcatataacacatgaaaggaagtatttatactaaactttggagttttgccatatatccactcccaagtttgcagttctttggctttgctatttattccaggaaacagtgtctcatccgttgggtttattaggtgaatgtgattatcaatttgatgataagcagcatactctgtagcaacagcattcattagtacttcacaggtcagagtgggatccttttccaaaagatttttcactaaggaaggtatgctagcagtggcattgctcctgatcccttggtaagggctctttagcaaagaagacaagaacgtcccatcagtactacataataaagtgcaatggtgataggcagtagtccggccgatcttagaagctgttcctgagattttaaactgtccatcaagtaaaaggtcaaatcttttggtagcctgcacatccagctggggttggacagcattcagagctctcacaattaatttcagattttccattctatcatacttttttttggttgtaaagaaagtcaaattgatattacccatatcatggtagactgttcctcctccacttcttctccgagccagttttataccttcttctctcattagattcaggttacattcctgccaaggattttgatgcctaccaattacaacagagggagaattctgccaaaag

SEQ ID NO: 160766 - DNA, 1000 bp, Homo Sapiens
tttttttttttttttttttgtggggaaaagtgagtgattcgtgttgtttccagtcagccccgctccgagtctcagggggactgccccgcacacagactgttcaccagggcctgcagcctctcggacagcaccacctgcagggagcagaggacaggagcggtgggcagggtgagggcgggggcgcacagggcagaatgacagggtgggcctccccccaacctggtactgtgcagggctccgcagccgcctgtgctcagggctgagtcggctcagggacagctgggccaaggctctagactctgccagggatgggagcggctcacacagctgcacggaggaggtaaggaaagagaagcttggggctagctcccagtcagggctctaccggggctgggggtcaggatgagggcggtggggcagccacctgtccctgctggaggcagagccgcagtagtggctccacctgggctggcctcacggtgcagggctcctgggcccctggaggccacaccctcagctcctgcccagcctgtggcactggctcttctgctaactgcagcatgtccatgagtggagacccgtcagagcccaggagccggaaagcagccttgctcccaggcaacgtctgcttctcggggtcctcggtcagcttcattcgtggctggccccccacggccaccagcttatagacgccacccagggaaggctgttgggggcaggtgaccacactggtgccaatgccaatgacattcacctcactgccctcctgggccagtcgggccagcgcctcctcgtcaatgttgttgctgactacgatgaggactgactccagccagggcacctggaactgggctgcagcagctcggaagaccttgcggatctcctgagcctgctgtagcaggtcaccactgtccagcctcacgcccactgcccggtagcccagctctcccagggccaaggcgactgctaggaagttggggagaccactcctccacacgct

SEQ ID NO: 160767 - DNA, 1000 bp, Homo Sapiens
ttttttttttacggttgaatggcattttgttttttcaaactggatccatcagctctgcctgactcttttccctctgcaccggtttctagctgacattcggtacttcttcctggcattacattgtttacggtagagttcaagttcctcgaagtacttagctctcaggagagccactctttgctcataagggtgcttctccaggtctgtcgctgttgaccacatcttccctgtggccttggccacctgcaccaccgaccagttcgggttctccctcttcagctgagcatagtggtcttggcagaagagtaggaaggatgatggaggccgtctgggttcctggggatcccgctttctccgtttcttcctcttgccaacataattcatcatttcttcctggtatcgggctttgtcgagtttggccagggcttcatatttggccttttcatgctttgagatggatctccatttttccgaacactttctagagaactctttaaagccaacataggtatttggctgctgctccttgaatttgtttctgtaattcagcaaaaagtgaacgtaagaagagacatttgccttaggctttagctggatttcttttcccatgttcgtaagttcaccttttttctggattcagtaacgtggacaggagagactgttgttcccacactccaggagcaatctagaaagtgctgtacttgcagcgaatttttctgtctgcaagagctgtagtcagggctcagccttttcagtgctgatggcattgttgagtcagaggagggaaactgtgacatcatccacaagccagccaatcccagccaacacctgtgggcatttgtgtacaggtgctcgtattggttggttacttgagggtcaatgtttgcctctcatgaaagatgatggttcattcatagtaggctatgaggcagctatgtcccccagaaataattctccttggcttcctggaggcagtgggttttgctgcactttaggggct

SEQ ID NO: 160768 - DNA, 1000 bp, Homo Sapiens
tttttttttttttttgatctccagaagtatgtcctgagaggaaaggcggccagagagctttaattttccagatcactgtaggtctcagtgaccttgacagtcatccgcacatggatggagtgctcttgttctatttttgaggtacccctgtgtttcacacatagaggctttgccttcagatcacagagctggactaagaccttacatgctgtccctgccgccccctgggaatgcaggctccttgctcacgatgtacctaaaatactgcacaccccgtctaaggcatcccagggaacagaagatgcggaagagactttaaaaattcagccttattattttgttagaacttttttgttcagttcatttttgtcattttttaattatcttcttatgggacaaaatgaataatccacagctcatttaaattcctccttttaaaaataattgttagggttgggcacggtggctcacaaggttaagagatcgagaccatcctggccaacatggtgaaactccatctctacaaaaaaaaaaaaaagaaatacaaaaattagctgggcgtggtggtgtgtgcctgtagtcccagctacttgggaggctgaggcaagagaatcgcttggacctgggaggtggaggttgcagtgagccaagattgtgccactccactccagccaggcgacagggcaagactctgtctcaaaaaaaaaaagaaaaagaaaaaaaaagaaaaaaaattgtccactatgtaatgggtttctcccttgattattacagaatcataaagctctgggatgggaagggaccagataaatcacccagaaccacagcacatttgatgtcagtttcccctttgatagcatccttgccaagtactcatgcactgcgcatctataaatacttccaccagcatcatctcactactcattttccgtccagggcagctctttcagtgagaaggcttctcattgaaggcacaatacgtgtttgagtaatttccact

SEQ ID NO: 160769 - DNA, 1000 bp, Homo Sapiens
tttttttttttttttaagaattttagtttttttcttcccccagacttttttttttttttttttttttttttaaggaaaaaaacccccgccaaatccgaaccgcgttgtagctcggtccccgcctcctcagcgggctgtcgcgtgcaacaaacctcccccatcatcttagaaaataattatagagcgcggcgccccgccctcgctcctgccagtgggcgctttggtcctattttttggattatttcattacgaagcacgtgaatgaatctagcccccacaccttcaagaaagaaactcgcggactggggttgaaaagcccaggtgggcgggtcaactccagctgacctggaagggtcagcgccgcgtccctcccttctcccctgcgtgcgttcggaaccagtactcgccaccctcacccgagtccccatacgaggcccggcttgccaactctgcgacctgccaggcacccttgggtgtccgaccctgggtggtcccagcagagaacagtccgagcctggggttggggagccctctcccaacactgctccctgcccccaagcctcgtctaagtgctgtcagttttgcagagtaaacggtgacgggaggttggagaagaggatgcttaagggagatgaggaggcaggaagaggaagggggcgggacgtggagaggaaaggggagatgataaagaagggaaggaagagaggactgagggttgagagatgccaagacaatgaaagttgggaggaggcggccagggtggaggtccagagaatttggggggctggaagaagtgcagggaggccaggagagatgcagggaggctgagagcgcagagttggggaggtgttcagggaggtttccagagtgcagggaggtttccagaagtgcagggatagggggccaagaggccggaggggatgcaggcattagtgcagggaggttggaaccagtgcagggatgaggcaggcctacagttggcagaggagcctggcaagat

SEQ ID NO: 160770 - DNA, 1000 bp, Homo Sapiens
ttttttttttttttttttttttgactgtgtaaatacactttattttccatttttcccgcctgggcgacatgtgaacaggcagtgtgcaaaatggtggcgggcagtgtagggggcgtgtggagagccccgtgggtgcctgccccggtccccaggcttcgtaacactgaaaagtgggcagctaggaagcggggacggagcaggggtccccacccaggaagcgccagggagattgcttgtgacgctactctactggaggctccgggagcaccgaggggggcagcccccagggtcatgaggcccggggggccgggggaagggaggaaggggcctggggggcatcgttggattttggcaccgttctcagctctgattcagcagagacaacgggaccaccaggaggaagtgaggggaggccgctcgctgggaagctcctgcctgggggcctggctctggctgagggtggggctggaaacacatgaagaaagggaagtagatggagaccgaggacccctgtagagatacccctccatcactggccaggatagggggcgcgagtgtctcccagagaaagatgtggggcactggggagaggggtctcttcacttcctggaagctgctctggccccagagaagcagggaggcttcccgttagccactcagtccccaggcgccccgcacatagtagggggactttggtttccgctgcaggggccacggtgcctgcgccaggcaggagaggccggcctggccatctgtccccagcggcctgactcccctagagatggccaggggctagtcaagggtcacttcatcccgaggagtgttgtggggtgctgatgtccagcccagagctggcgctctccttcctcaggcctcggctacctcctgagcacttcccagcaatgtcgcccctgtcccagaaggaagcctgccaggaggtgggagctgcctgctcattcagtgctgggacctctgggtcgtctgtcccctgccctctgcc

SEQ ID NO: 160771 - DNA, 689 bp, Homo Sapiens
tttttttttttttttgaagataaccagcatctttatttttcatgcttccttaaatagttttgggagtaggagacttgtcctttggaagattgtcatccagaggcccaggaaagtcatctccaccaagagagccaactccctgcctcagtgtggtgttcagctggaagggggtgaacccagccaggccccaagagctgtcccagcaaagcccccgataactttagatgtcacagagagtccagctgcccccactgactgcagaatagccaccagactgccagcagcaactccgcccccgttggcaatggctgctgtagacatcatcttggctgctatggaggatgcggcgattcctactgaggtgaagcccatggcactgagcgccacgagcacagtccccacagccacaactcctccgaccacagctgctacagcagccctgcctgagtcccatccactctcctttcccatggttggccccttcgcctcggtgagcctccactcggattcttggacttccacctgttggttgagttttgactttattcaggatctggtttggataaaggttactgtgcgggagctgacaaagtctctcgccggagggagcacacagaatttcaccttctccggccttttcccaagctggcaggagtaaagctgtaagaggaggtgccagcgccccaagc

SEQ ID NO: 160772 - DNA, 1000 bp, Homo Sapiens
ttttttttttttttttaactcttaattaacaattttaattaatctccactctcccactatgctgggtaagaaagcttttactgtattatcacatcatagagaggaaagcaaagcaagtaacttggtgtaataggttactttgcatagtacctcttggtaccaagggaacatacagaaatcattcccattagtaaagcacctcaagagaggattgagaaaagttagatacaaaggagttttgtttgtgctaccctaaagtcatcaactataaaaagttaaaaacactcctctcttcccttacatacttaaaatagcaaaaatgttttcttagaacttttatacacacaaactaaaacatagccaaaaatccataaagtgactttactaaagcaaattatggggcagatctggactaactgaatgtcaagaatggattaaaatgctaatttaaaatacactagagtctcccacaaatcaccttccccaaagaaaagcttctgtttgagccggaacaatctcacagaatcattaagacaacataaaaagaaagagtaaacattctatattccaaataatttactaatatttcttccagcctcgtactttcagtttaaactaatttatggtttaaaaagaaaggaaattacacaaaaatgttaagaacttttcagtgttctacatactaatttagaggccatgaggatttaattattttttttaaatgatgcaaggcacttttcttttttggggcttcatttagaaaaaaataatgctacattggtttattagattctatttagaatcattttggacaaaggaaaaaagggctggacaactctgaaaagaacaaatacaacgtttggcttttactgccaaaaaatgcaaaaaggaaagtcactcgaaaatctaacactatccttgtgtttaagcacttggtactataaatcaaaacgttttccttttatcatggaaactgtagtttttaaaatatagaaaaatt

SEQ ID NO: 160773 - DNA, 1000 bp, Homo Sapiens
ttttttttttttttttgtaatgttaattaactttattcacatttttccaagtaaatacaatattaactataagctaaaaacaatacatagttcttagaaaatacaaccccgaattattgtgtggcctgggctttgtgattatgtgcccagcctttgttcctccagaattttaaagtgaatgcagtgctcaaaacaaacttacgatagcacagggaaaccttccctaaataaagttttgttattagaagagaaatccaaaaagaggcctctactgccttcattcaagtgtcgagaatttcaaaatggaaataatattaaaagagcaatcgatttttttccatctcacactagtaggcttgaaggaggcaaatttggaccaaaaatctagacatagctccttgcatagggtttgatattaagcacacacttgcactgaataactccatatccaccctatagtacaaaaattcatttcaaatgcaaacgttgtgcaatgaccaggtcatatttttaagatcactctttaaaatatcattttactgatcacaaaattatataataaggatcttatatgggttaggtattaagtttgataccaaagcaactatagcatcaagctacataaatattagcaccattttttatctagtccagtgaaatgtaaaactatccatcaaactgttttttaccaaagcagtcaacaagaaaaattgttttacttctgatatatgctttgctcctcctcctctttgctagtaatacttttgaacactttaaagaaagtacagtcggccctctgtatccgtgagttctgcatccatggattcaaccaaatacaaattgaaaatatttgggggcaaaaaggatggtttcacttgtgctgaacatgtacaggcttttttttccttgtcattattccctaaacaatatagtataacaactatttacagagcatttacattgtattaggtattttaagtaatctagagatgatttaaag

SEQ ID NO: 160774 - DNA, 1000 bp, Homo Sapiens
tttttttttttttttttttttttttttttctctttctaatcaaaactcatttatcctcagtttataaatatggtaagttatatatttggtaagttaaagtgaggcaagtaccacttcactttaataaatctttcataaattctatttcctatagttaaagctttatttttcttctgtccaaaatattctcagtaaaggttctatacttggcagttatatataacccaccacaatttcatgtccaacaactgcaagctattgaaattctaaagatgcgacatcctctttaccataaaaaattcttccaatatgtttttttcttttctatttaattttttttttactcttacctgctgagatcaattatcctttatcttcattggttacactgctttctacccacaaaatgagacagtgccccaaggttgtgtccttagttttcagcctttattgatccctgtatttacctgagagaactaggctttaactatgaccccaagcaaatactcctgaatttacaatcaagtccagaacactatttctgaatttttgtttttcatttccaatgtctagttattatttcttctttaatatcctgcctcaaagaagtatgaccaaacttatcttttcaccaaaagtctttaagtgctgccatttctgttaaataagttcttttctgtcccagttatccagcttcaaaatagtagaggagtatttccacacttattcttctcctctttccacactcagtgtgaaaagtacactcaaatctctgcactgtctgtcatttgtgatgcaatgttgactgcagacttgttgaaatcccacctcatgactcatttgctgtccaatattgggtaagttcctaaacctcactatgcttcattttctcctttctcaaagctgggcagaaattaaagaaaagtcgatggttacatgctttgaatctttcaggaagatgccagttctgaattatttcttcatcagaaatcacatgatg

SEQ ID NO: 160775 - DNA, 1000 bp, Homo Sapiens
ttttttttttttttttttttttttacccatggcatggtcctatttattttcagacattctcgcttcacagaaagaaacagggtgaggggctcaagagagaggctgcccaagggagaagcacgggaacgctgaactggccgaggggcttgtcctcatcctcaggggtagggggaagcccccatctgccagtctggctggaagggaatagatatagagcagaggccctgagtggaaggtgacagttaaccaaacagccaaggccaaggagaggaggggccctaaggcttagagaggccctgaggaccaaccttgctctgccatctgaccttgcccttgtaggcctcctctgaactcccaaaatgtgacctatgccatcaccgaggccgcaggaacaagaggtgggtgtccatgacattggtacctgtcatccctgtgtgcagcaggtgtgccccaccctggaggcagcagaagaaggtatgtgagtcattgtgggctaggaaggtggctatgtccaggccctcagctgcagcctggctggcaagctcaggtgtgacccaggccccagcagcctctgtgggcccatcctgcccatcggtgccaccgctcaaaaacagcacatctatcggccccagcggccaccttctcaactctgctccaacacgcagggccagttcctggttccggccacccctgcccgagccctgcagctgtactgtgggctcgccaccagccagcaggcagactgggccccttccccatgccatggtctccagagcctcctccagctgcaggtctgggatctgaagctcagctgccagctcatggagctgtgcatcttcctccacagaagccccagccatggatggggtgaggcgggttctagccacatgggccagcagcccgtagaactgggccatactttttacatcaccttgcatggctgcactcagcaccacagcctggtagcccagtgcctcggcctgccgctgggcctcagcta

SEQ ID NO: 160776 - DNA, 1000 bp, Homo Sapiens
ttttttttttttttttcatttttggtcagcataagtttcctttaattatttttctgtttccagttggacttcactttgaggcttaacatagcaaagtgagtataaagttctacaatttagtcattgtggatttcaagtcatttatgatgaaaatggaaatgtgtagtttacttaagaaaattttcttcttctgtaacatctaactcgtcatcctcatcatcttctgcttgttgatcctttcttagtcgacaagtggatacctaaaagttgtatcttgaaaataagtttgttgaattttatattctgaaggctagatatgaaaagggcatagctctctagatcagggtttggcaagttgcggcccagccagcctcctgtcctgttccagatacacacttagctgacagtgatctctgaagaggtgactttgaatttgctcttacaatatctaaacgagatgaataatctggtgcatacagagaatttcggaaaacctctaaatcttcatcttcatcaatgttttgtatattctggtaggcagcagtgtagacctctaaagctttgccgtgaaataacatttcgattgtgataaattcagaaaatatagtctttatatccttcattttctgcctttcaaagttgttaatagtttcctccagatgacgacttgttcggctagcatccattgcagctctctgtaattccgtttctgcctgtgaaataacatgtcgatcagatgggtttcgctgacgtgttctttctaactgagttaattgcttagcttctcgattccttgctgtgagtgttgctttgaggtcatcccgtttcattttcacaatggtcccataagttttcaagggttcaactactttggcttcaagtctttcaacctctgcttgtcgataatcctgaagtttggcaaactcatctgcaaagttcatcaggcccagctttaaatgcggggtctctgtagcagcatacgcgttaatttcattcacca

SEQ ID NO: 160777 - DNA, 1000 bp, Homo Sapiens
gcaataaatgcccatgtttattacaagatagaaacattaaagatttcttaggcaaaagggcaacaggtatgaaagtattcacagggcgccaaatttacaacagcttgctccaggcgatttacgtgaatcctggcctgtcccagcatgaggccattgacaacctggcgcctctgccaagcctgtgtccaggtgcctggcatgaccaggcgtgatgcccaccaccacagtccctgctgcatctcagaggccggggacctcccacacaaggatctcgttgcgggcggccgtgaagagcagcctggcggacggtgtaaacctgcacaggtgcactgcgttgtcgtggccggcaaagtcttgggcagtccccatggcacagtctaccagcctcagcatgcactcagcaaagccaacagccaggaggtgggtcccgggggacaggctcagggacatggcaaaaaagggcagtggtatcttctccaccacctgcttctggcagaggttgtagatgatcacctccttgtaaacaccggggcccacgtacatcaggagcgccccatcccaagggcagaaggcagcgagggagggtgccaggtggccctgagtcagcaaaggcgcagcatgctgcggtggggtggatgggtaccggccccacccacagtgccaggagcatggtttacctccgtggtggcaggcattgggaaactcaaccagtccacaagctcacagtggttccgcagccagtcggaggcccagacgctgacccgctggtccccactggcagccagccataggtctgtgccctccacccctaagtcttcacactctttgcacgtgacacagatggtagagattggggcgccctggtggtcactcagcacacggaaggttgtccctgtgcaggggtggctcacagccacgagcccatccttgtctccagagaggacagtctgaccatcggtggagaaggcaacagtggtcagcgccaccgggtgggggtgca

SEQ ID NO: 160778 - DNA, 1000 bp, Homo Sapiens
actgatacatcacacagtcctttatggtttgtggtcatgattattattacagtttattacaccctctttgacaacaggtatggtctctgcggtctttagcaagagagcacacaaaacagcatgacttaacttttggtattatgagtagatgagaaattactatgaagataaaagttgaaactatataagcatgaaaagtaaaatttacatgaggaggaaaaaattccttaagttgtatgcacatggttaacgctgacttcacagtgtcttaacaatttgccaaaattataaacttgatgtaatccaagactgaagacagttaataaactgttttgaagaaacatgtacagaagtcttgtttgaataaaaaatacatattagtcacatataatcaaacaactgaaaatgaactgaggcattacattgagctacgaataacaggaaacacttgaaatttcctgatagaggaaagtgctcattctcacatcaaagtcctgggtgaggccagtcactgcacactacagtagaagaacaagctcccctctggttggttttgacagcagcatggtagctatcaggctgaatcaagaatacagtcactactagtatgaacaaaggtgcttactacacaaattagaccgtatgccaattctgtctacagactaggggagtcagagcatcacagaatattcccaaccaggacagtctgaattagttgcctagtacagacataataatgtctgaaggaaaaccaaagtgtggatggatattcaatgcagggcttctggagacctgtgtggaagcctatcacctccgagaaaattaaagtcaagtcgttttgaggatactcttgattggcaacccaaagaagcaggaaaatgggatggaagcaagtgtccatacagcctgtattcacacagctgtctccctgtatggtgcttccaaaccatgactaatgccttcttaacttacttccgaatctcatgtaagataggttact

SEQ ID NO: 160779 - DNA, 1000 bp, Homo Sapiens
tttttttttttttttttttttttttttttttttttttttttttccaagacttacagccatttattgcagaagctatggataaagctggtttcagggtacaatgcacagtttcaggagtcaggcttgcagagaagtccattttgggagcaatggtgtgtggcctgactgcttttcctccctggctcctgggctctgttttagctgcgtaggacatgaatgacccaatttgtaggatgaaagttaacaaaggatgtttctcaaaacttctggttttcaacttacatacccatttcaactttcatacccatttcggttgagtttatttattgatttattttcaggcagggtctcgatctgttgctcagactggagttcagtgacgtgatctcagttcactgcagcctccacctccccggctcaagcaatcctcccacttcatccttccaagcagcttaaactacaggtgcatgccaccacacctgttttttttttttttgtaatttttttgtagagatggggctttgtcatgtggcccaggctggtctcgaattcctgggctcaagcgattctctcacctctgcctcccaaattgctgggggattataggcatgagtcaccgcggccagcctagggtgagtttaataagatttggttgtgccgccgggccagtggctcacgcctgtaatcccagcactttgggaggctgagataggcggatcacctgaggtcaggagttcaagaccagcctggccaacatggtgaaacccagtcactactaaaaatacaaaaaaaaaaaaagttagctgtgcgtggtggcaggcgtctgtaattccagctactcgggaggcggaggcaggagaatcgcttgaacctggtaggcagagtttgcagtgagccaagatcaagccattgcactccagtctgggtgacagagcgaaattccgtctcaaaaaaaaaaaaaaaatattaggttatgctggggagatgggaaaaggcaggt

SEQ ID NO: 160780 - DNA, 1000 bp, Homo Sapiens
ttttttttttttttttttttcattttcaacaaaacaatttattttgatatcttgaaccatctgacataattatgtatatacaagatcttttcaatctacctctcctttagtagttacattaagagattaccatgtctcaagagcaaactgctggaatttaaaacacaattttccataagatctggaatgatcttttctaattattaaacgtgtcagcattagtattttctcccatactcagataaagaaaaatgtttgttaaaatttctgtaactttttttgttgttaattgaatgtaaaggtagtttgtttctctaagcacattgattagtaggcctctctctgtaaagtatttttttaattttaaatatttctgatcacactacagatttagaaataaaatgctgaaataatccaactgagccaggattgctcatttctctcccccactctgaggcgctctgcaggaataaagtactgagggaggtacattaaaataaggagactccttgtggctagtagcgactgaatatcctacgtacctaatttactgcagtggcttaagctctggggaaattctggatcactaaactaaaagtaaggttatgtcaatggatttttaaaagagtatactttaagaaggattatatgtaaacattttaataatgttaattataccatggcttatcagaatgttagtcttataataattagcaccagctacttggtatgtctttttctgattaaactgattccaccacactgtctacttcaatcagtctagtctagaggagcacttaaagagaaaaagttagaaaacgtcttcatgaatcagttcttttaatgtacagaagtttcaattacatgacttgggctcgcttaccaaatacctttggtactttaaaaaatgtatgtccatgatataatactttttaatccaaaagtctgacccatattaaaaaataaaaattataaacaaagccaattacacaagcatgtc

SEQ ID NO: 160781 - DNA, 1000 bp, Homo Sapiens
ttttttttttttttttttttcgtaaaaaatacatatttatttctcaccattctggaggctagaagtctgaaaccagggtaccagagaactctctagggcccctttttctttaagacactctcactccgttttccaggctggagtgcagtggtgcaatcatggctcactgcagcctcaaactcctgggctcaagccatcctcccacctcagcctcccaagtagctgggactacaggtgtgcaccaccatacctggctaatttttgtattttctgtatagatggggtcttgccatgttgcccaggctggtctcaaacttgtggcctcaagggatcctcccacctcagcctcccaaagcactgggattgcaggttcacaccaccatatccaggtcctgggggtcccttttataaggacattaatcctatttatgaaggttctacacttatgacttgcttacctcccaaagaccccacctcataaaaccatcacgttgggagttaggacttcaacatatgaatttggggggttggcacaaacgtttggttcattacaagaatagaggccttcccccaatacggctgcttttacctggagaatcctccaagtcacaaggtgaccttgtgcagggcacttctcatcttcgagcctctgtttcctctctgacagtgggggacctgggctgacattggctggagccaccatgacttaatggggaagtccccgcggccctgggactcatctgaggtcattaagcactgtcagggtcacctgtccgaagctggatttttcctaaacttcatttgcttttctctcctttcttttgccctggatactctcatctccctcaatttttctttcctttttcccttctcactacccacctccaatttcaaaatgtgcaaatagcagagcatcccagtggagttgccacggcaacagaagctggttttccctttccaaatgatgggccccttggaagcctctctcccctttgcctcc

SEQ ID NO: 160782 - DNA, 1000 bp, Homo Sapiens
tttttttttttttttaagcagaagattctttttatcaaatgaaatcttaagcagaatcccagcatataaaacagaatggaattactttgatctgattgaagtgggggctggtttcagagatcataggccatcttcttggcctgtcatggaggcctgtgaggcatctctacagaccctggtactctgtgaagagtttggaaattactgatctactttaacccccaaatctctaagctgaaaagtacaaaggggcccagagagttagataaatttcccaaggctgtgtggtaaacccacgtctccagtgtcccaggccagcaggcctttccctcaattgcctccctttttcagcaaaataagactagagctggccaggtgcagtggcttatcctgtaatcctagcactttgggaggctgaggtgggcagatcacctgaggtcaggagtttgagaccagcctggccaacatggcgaaaccccatctctactaaaaatacaaaaaaaggctgggcgtggtggctcacgcttctaatcccagcactttgggaggccaaagcagacggatcacctgaggtcaggagttcaagaccagcctggccaacatggcgaaaccttgtctctactaaaatataaaaaattagctgggggaagccgaggtgggtggatcacaaggtcaggagatggagaccatcctggctaacatggtgaaaccccgtctctactaaaaatacaaaaaattagccaggcgtggtagtaggtgcctatagtcccagctacttgggaggctgaggcaggagaatggcgtgaacctggaaggcggagtttgcagtgagccgagatcgtgccactgcactccagcctgggtgacagagcgagactccgtctcaaaaaaaaaaattagctggatgtggtagcaggcgcctgtaatcccagctactcaggaggctgaggcaggagaatcgcttgaacccagcaggcggaggttgcagtgagctgagatc

SEQ ID NO: 160783 - DNA, 1000 bp, Homo Sapiens
caaatacatgagaaaacaatccaagaatcactgcaggaagaaatgatcatttaagctcaatcatgttcttttgccttttaatttcatttaagagattaatattagagtcataaaagctttacagtttcaacacacatacacacaatcacagaattaaaaatctttactccttaaaaaaaaatgagttccattttgttcaatgtatcacaatcaaattttagtctaacaaaatccggtaaaactgctttcattaaatagagcagctgccacttacctttacatattttacggatggaactgagttcagtactgatccaaggatgctggcatcaaagcccttacacggaactatccctaaaggttccgtatttccgtaatataccaccaatcactctaaatttataataccctgtctttaacttggtatataccatcttttgggaaaaaaattattaatattttgagatgagatacaagaataaagtcattcttgaggttccacctctaatatgaaaaaatggacgctgtttgcacatagcagctagtttgatacctcctgttctgttaggctagccttcacacaatgagcatgcatatacagccacagttcactgcatctgttttgaagttgcaaagtgctgctcattcaagtcacagatgctaccatgttatgcaatgaaacagtaaaattgtatgtccaccatgagaaaaggaaaataaacaatgaaaaaaatgcagcaaatataggcagttggcattcagaacacgccaaaaagctaacactcatgaatcgtcattataaggttttcctttccttaaaaaaaaagtctttctttgcatatttcaaaatgtaacggtcccagagaatcatgaagtgccttgtcgtttctgctgctgacttctgatgacctctagttgttttttgcattgctggtagtaagtagaaaggcttttgttttcatctaaaagctttttatgttcctgtaccaggcgagatgta

SEQ ID NO: 160784 - DNA, 1000 bp, Homo Sapiens
tttttttttttttttttttttacagaggatctttacatgtttattaaatctgaatttgaagatacattccaatcttgcataaagtgtttgttgggcttttacattacgtaattaaaaaacaaaattttttaaccaattttatgtgccatgtcacgtttaatgctatcttgtgtgaccagatcccaccagtaatgacaaaactgtcttaaacctcatttttttttttttttgagacaagagtttcactcttgttgcccaaacgagagcaatggcaccatctcgactcactgcaacctctgcctcccaggttcaagcaattctcctgcctcagcctcccaagtagctgggattacacgcatgcgccaccatgcctggctacttttgtatttttaatagagacagggtttcttcatgttggtcaagctggtcatgaactcccaacctcaagtgatccgcccacctcggcctcccaaagtgctgggattacaggcatgagccaccgtgcccagcccttaaatctcatttttaagaaaccctcacctattctgtagtcagctaagcttttaattacattaattttaagcacttgagaataaaatgactgcatttatcatccaagtgtcaaacaattaaaaacctaaaaatggtaactatatataagctgaggtaatatgggcttgataaagcccatgaggtaaatatgaacactaaacttggttttaattctaacagactatatctaaacctgtaagcagtatactcctaacagtaccctcataaattctgaatataattcttgtttgctgcagtcaatatttggcagtttaaattagcacagacgttgaggccttgctgagttattaggctatgtaaaagaggttaaaaatatgatcattctttattgttaattggtaatattttctcatacattaggtaaatgtcaagctttgggtctctggagtataactttttgtaacattagccattatttggtaacaga

SEQ ID NO: 160785 - DNA, 1000 bp, Homo Sapiens
accatgattctcattgagtttttaaggcacccaaataattgaagcctaagatatattaagacaagttaaaattcccaaaacctttgaagacttttaaagaagctattactttcctgggtagggtcagctttcctgccatggccccgttgaatgcagtcattgtcagcttcataactcagtgggctgatcatgtgtgtgctgatctagaaaattataacgtactagaatacaggtctgtcatttctattgcctcaatttcccaataacagaaactctgggctatgtcctctttttagctttaagtcaaattttctttaaaaagcaccctttcaattttcatttaagaaaatgcaatcttgaattatggtactagggcttcaggcagagcagtaaagagtcatcttcattgttttagaattttttggtggaataatttttattatttagttatgaggcagggctgtaatggtgaaatcttttagttttatctgattccacaaatattttctactaagaaaatactactaaaatacaaattaaggctacttagtaaatgcctcaggatggccaaaaattgtaagaaagaaaacctttggatgatacatcctgtctacatttctgctactggtctcctgcttttatgattctccttgacaaaatccacgtgacagtaattttgtgtaaccttttgaaagatgaatttgtcaaaaggctaggatgtagatgacacttgctgtttaacgcctttttgctgttagttctatacagaagtacgaagtggaggtatgtcatccataggaatgccatcacgtgcattttcttcactttctggcatggctgaatcattcaaagttggattgtagtagctagaattcccaaaactcacatcataaggttccggtgcattgtctaatcgcagaactggttcatttctgtcgtcataaagtcgccgatgggaaaatgaatccgttttcctttttccacacaacaagtagcccac

SEQ ID NO: 160786 - DNA, 1000 bp, Homo Sapiens
ttttttcattgacagacgagtatttattaagcagctactatatgccaggttcaagttggtcttactctagggatagagaagagaacaagaaaagtctgtgccttcatggagtttacattctagtgagggtagaaaatatcaagaatataaatacatgtagacagtcagtgacatcaaacaagtgggcggtggggacaccacatgagcatgggtggcaggagggcctctctgtgaggtcactgtgggtagacggagaagccagccagcaaactggaggaaaagcacccagacggacgtccttccctaagctccctcaacccaggccctgagccaagaatatctgaaaggaaaccaagtcaaatagtgaagtcccgccaggaccagggtaggcaggacagaggagccggtgacagggaaggctgtggatggcttcttccctcctgggcatggtgccccaagcttgctctggctgggggcggaggtctgactcccgcctttcaggaaacctggccctcacaccacctccctcactcaagcgtccctagcatctcggaccccaggactgagcaggcagggtgtgacactgcccggtcccggcaccccaggagcaccgcctggatggagggggcctcccgcgtatcctccctgatttgaggcccgggtcctcaggatcccagagaacgtgacgtcaccaaagagaggctgacccccatcccagcaggtagaacaacacatgaggaaggcgtgagactgggacctcctagcagggggtggggagctgtgtggcacagcaagactcccagggcaggtgggcagccaggacccggggctccagcgtcacttcttcttggcgcggtctgctgcgtccagggcagccatgttgcgggcggccgtgatcaggtggatgacgctgatgagcgacttcagcaaggcgatgggggcagtgacccagaggcccatccggaacagtcccacagagccaactaaaggtccctcagag

SEQ ID NO: 160787 - DNA, 1000 bp, Homo Sapiens
tttttttttttttttttaacttcaaaataagagtatgattttattttcaaatgtgaaatcatgtcaacattttaatccaaactcaatatatttaacacacatatttaagaggcttactacatcatgcaattggattagaacacctttacaatcctatgaagagagtacagtgcagaaaagtcatatctttacattaaccaacaaaatcttagcaattatattttagtcttacatcactacagggtttaaaagtgatcgctgcaaaatcagattttaaaaatatcttccacaatcatgatttttgtccttcactgttcaagtaaaatcttgtgtcatccagttgcaaaatcttattattgataacacgtatacgtgtatacaaaccacactgcaaattaacaaaagaattgtacccagtcaggctgacaaagtctaataaagggacacttctaatctaatcatttcatcttgtaagtaatattgttattctctacatctattcatttgccatgttttaggaaagagcacattcatactttcaaacatgcaaaacatgataaactagaataaatggcacttgaaaaaccattataaaagagacttgcctgaagtcgtttcatttgacaaaaattaactaaaaaaaaggctaattgtaaaaaataaaataaaataatacattatagagaatattaagttgaacttcatttgccgttttgtagaactacaccacttctgcaaataagtatgttaattggtctgttctttggtgaaaacagagctatgatttcatagttatgttgagggagcagttagcaggtgtgctccacaacaaaaagaaatcagacaatctaaaggacattggctactggttgcctttattctcagcaccaggaatggagaaatcttcagcaaaacaagctcctaacaccagatattctctttatttaaaattgttcaacatgacagaatgcctgttgcgtaacctggcttttttttctaa

SEQ ID NO: 160788 - DNA, 1000 bp, Homo Sapiens
ttttttttttttttttttttttttttttttttttttttttttttttttttttttttttttttgggagtccacggtgtttattgggccaccccacgcatggccgtggcccagctgggcacaaccctcaccctggtctgtcatgcctgtttttcctacactcagcggcaaagctgcaggagcagggctgagcctggaatagcccttcctagtcccctcttctcagcccactacccatccatcagtcaccagccgtcacctcccctcccgtgctccaggctgggggagggagagcccagtggtggatccagcctgaagtcctgccctctctcatctgtctggaaaggaggtagcacctttttcgggaaacgggttagggagtaaagactgcaccctacatggtcctggtggtgggggggataacagtaaaggaatttgcaacgttttaatgccatgcctgatttttgggtcaggagtggtgacttgggtaaccacttggcgggggggcctgggattccctgctgtgtgccgtgataacagcaaatggtgataaggagaaagccaagacctgtggcctgatgcagggctgggggcggggggtgatcacttcagcaggcacaacacacttcactggctgcggaggtggaggggtgactctgggagctcaggggcaatggatccaaagaggctagggagcttgtgccctgggagacggggtacagggactttactaccgcctctgccagcagagacctggcctgagaccccatgggcagggccgcgacccaggactagaggggcaggccctctgcgggcgcgagagccgagcccgagccgttgtcgggactggggcatggaggactgccaggggacggcgtaggggtgcagggggtcccggtgagcggagtgtcggtgctgagggaagaaggcgtcccggaggagcgcgggaccctgcggcgccgggctggccccagctccacttgacccactcggtcggcgaact

SEQ ID NO: 160789 - DNA, 1000 bp, Homo Sapiens
ttttttttttttttttttttttaaagcttcttgttttaattaaaaacaagcacatattaacagccacatgtgaatgccaaatgattaaaacaaaaaaacaaaaacaagagccatctacactgcagctagggaaagcaaacttcttggcttaagagaagtgagggatgtgtgtacgtgtgtgtgtgtgtgtgtgtgtgtgtgtgtgtgtgtgtgtgtgtgtgtgtttcagaaaagccactccagtctgggaaaataaaagcacagaccatttctaatgactggttttgtttcaccagaagtaaacagagtacttagggtattttttttttaaatagtaacagttgtactaatttaaaagccttttcattgaagaaggaaaaaatctgtctacagtgagaaaagctacccaatgaaatacacattttaataggttgatcaactttttaatttatgttcactcatgggttcgatttttgttcaccaaacttccctgattataagggtcacctagggcacctgttacacacagtctcctggaccccgttccagccttgcagcatcactgggtcattgggttaaggagctggcccggcatgccttcgttttgccagccctcacccaatccatcttcagatgtttttctgtggaaaaaaacctcgagggtcttctaatactaactagtcagttactctgaacatcaaaagacctcgtatccaggaatgtaacgtatataaacagattgaatccctttgtgaaactgattgggagtcaggaggcatgaaaattagtctggcttctgcctcgaaacagaagtgggacctcggtcaagtcccttcccttctctgggccttcatttccccttacggagtaagtaggttatatcgtcttactgactaaaatgtctcccttaatataaaactcctccttagtttctgaaggtctctccaaggctgtgtgggtctaatacttttgaattattcagagcttctcaagccttaac

SEQ ID NO: 160790 - DNA, 1000 bp, Homo Sapiens
aggaaaacatgttctttaataaacataagagatagtcaagtctaaataaaataataatgataataataacagattctacaccacagttgtatacacttccagtgaagctttatgcattccattctgagctcctaataccaggtaaacacgaatcataggtggaaatatgccatgtttagcactagaagtaacatcacagtttattagcaaaataaagcagaaaatgatcaaaatgatcaggtaaataaatattacaacatataatgtactggtgatgaagctgcaataaagtaatataagtgatgtttacaattttttttttttttttttttttttttactgggaaggctagttgtaaacataaacattctcactgaactactggccccccaaaacctaacctatctcacaatcaataatcatcttttgactataaaatcataaaaacttgtactctgtggctcttttgtctcgatgatttttcagagaaaaaaattagctgtgttaagtagtttcactgatttatccatcttgaatagctgccagttctggaacttcatacatcctcagaacgtcttcatagagcaaataattatgtaggcttctgggaagtggcagctgactaatataactgtcagaccgtagacgttctgattttagactggaccgaatttccaaacgacaaagatgggtcagggatggaacagtggcaatatgttgctgtagaatccaagcgtttgaggcacgagcagagagcatcctttcaacagctggtgcaagtgtcttccaattagtaaactccaaagtgaagataagggtgtcaatgctgactgagtcaatccaagaattgcacagtagaatcagtgggtcaaatccagcaaccagaagatgtggcaaccactccttatattttgcttgtgctttaattgcatgatttacaaattcatatatatggttccatggtcccaatgagcaacctttcctcaaaaagtagcgaaat

SEQ ID NO: 160791 - DNA, 1000 bp, Homo Sapiens
tgacatttccagaccattccagagctggctgactcttaatgtggaaacaagttttggctacagacattcaggtttaaggcacataccacaaattacaagaagccctgtcactgacagggaactggctttgttctcgtggtttctgcaaggaagatggaaggaatgactttctggccctttttttttgttttttctaaaaaggagtgagtttggcagtaacaaagctcgtgacacactcaccagatgcacaggctaccttctcaggcacgcctccctttctctcctcagcgaggacacggtgcttcacccacccagtcgccctcaccagaaatgtgtatgcagcaaacagacttgtatgcctctgtctggcaatgactgtaagaaaagaaaatatgcctccaaataaaaatatacaattacatgacgaaatgaagccaagtcttagccacaggcaaaggggaatgattgcatgagtcagaaaaatgaaacatctattttagcagcaagaggctgtgagggatggggtagaaaaggcatcctgagagagttctagaccgacccaggtcctgtggcacactatacgggtcaggaggggtggaagacaggcctaagctctaggacggtgaatctcggggctatttgtggatttgttagaaacagacattcttttggccttttcctggcactggtgttgccggcaggtgggcagaagtgagccaccagtcactgttcagtcattgccaccacagatcttcagcagaatcttccggtaatcccctgaagtatctcccgagatgtcgtggtacagcgacttgccgtacatccgcttatactctgatctgatgtccaggaggtcggtctcgctgcgagacaccatgatgcgaatcagggtccggtcctttgttcctgcccccctcatggccttgttgagcctctccgcaaagaaggctggggtattcttgagacatttcaccacggccagcatgccctcctccaggtc

SEQ ID NO: 160792 - DNA, 1000 bp, Homo Sapiens
tttttttttttttttttttttagaggcctgggcttcagtttaattcacgccaaatttcagcgcgggcattctttggagtcacacacaacaaaagcggatgagaaaaggcacacagccttccccgtggtgttacggtgagcacgccaggcattttaatccgcattctcatctcagcctcacgactgccccgtcacatagataacagtattcctgcccaccctgctccccgcatctccctactccaccccacatgcgtgtgacagatgaggggactgaggtggaacaagtttcagcaggaaggcagatccagggctagagttcgagtctcccatctcctcaattaagactctcgtttccaggcctcttcagcccacccagcttctgctcctgtggccctgtgccaacggggcaggatttgggagctaggccctcagctcagtgggtgtatctggctgccggcaggggtgagacacctggaaggcctccaagaccagcagcctcttgttgatggagctgatggtagggtagggggtgagatccaccttgaatctttcagcatttgccacctgaggcaccaagcacagatcagccatggtcacctcgtctcctacacagtatatgcccgctgtgctctgtaggatctgctccagggcgttaaagccacaagtgatggcgttctgggcccaggtcagctgcatctcctctcccacttgcttcaggacagacaggttctgcaggggctggatgccaccagcgatgaggtcagaaatcatacgcacgctggccctcttctttgggtcctgaggcagaagtcgcggagtgggacgcatctcctctagatactcaatgatggccagtgactggtgaatggtgattccatcaatcttcagggttggcacctgcttcataggattcagtgcctggaagtccttagaaaactgttggcccccatcctttatgagattgatgggcaccgtctcgtagtcgatgcctttcaagg

SEQ ID NO: 160793 - DNA, 1000 bp, Homo Sapiens
tttttttttttttttttttttttttttttttttttttttttttttttttttttttttttttagaggcctgggcttcagtttaattcacgccaaatttcagcgcgggcattctttggagtcacacacaacaaaagcggatgagaaaaggcacacagccttccccgtggtgttacggtgagcacgccaggcattttaatccgcattctcatctcagcctcacgactgccccgtcacatagataacagtattcctgcccaccctgctccccgcatctccctactccaccccacatgcgtgtgacagatgaggggactgaggtggaacaagtttcagcaggaaggcagatccagggctagagttcgagtctcccatctcctcaattaagactctcgtttccaggcctcttcagcccacccagcttctgctcctgtggccctgtgccaacggggcaggatttgggagctaggccctcagctcagtgggtgtatctggctgccggcaggggtgagacacctggaaggcctccaagaccagcagcctcttgttgatggagctgatggtagggtagggggtgagatccaccttgaatctttcagcatttgccacctgaggcaccaagcacagatcagccatggtcacctcgtctcctacacagtatatgcccgctgtgctctgtaggatctgctccagggcgttaaagccacaagtgatggcgttctgggcccaggtcagctgcatctcctctcccacttgcttcaggacagacaggtttgactggtgaatggtgattccatcaatcttcagggttggcacctgcttcataggattcagtgcctggaagtccttagaaaactgttggcccccatcctttatgagattgatgggcaccgtcttgtagtcgatgcctttcaaggccagagcaattcgaactctccatgagcaggagcttcggaaataggaatagaggatgggcttccccgcctgcatctggcacttcgcg

SEQ ID NO: 160794 - DNA, 1000 bp, Homo Sapiens
tttttttttttttttttgaggtgaaagaaacagtgcagttttgttgctcacagggacccgtccccacacactggagagacttgaaggtgggggctctgcccatccactggggaatatctgggccagcctaaaagtctgtggggcctaggcctgggcaggctctgggggctgtggagccgaggagccaggcagagcggggtccttgggggccaagcccatgcgtcggatgctgtcctggtacttgcggcggccgagctccaagactgcgcgcacctcttcagccacgtcctgccggtcactctgctccagggcctgcaccaggagccccacagcccctggctgcccagcctggcgctcagcccaggagaagagcatgtgacggatctgctcatccagatcatcccggaactcgtgccggatgcgctgcacctcccggtaggacacccccaggtgcagggccacggctggccagtccagacccagacgcccagccacactcagcaggttgctctgcgtcagaaagccggtctcggcatctcccagattcaagggtgccaaggagaggccagccccccgccgtggcccctcggaccctcgaagtctcggcagcttgatgggcagagtggccatccacagggcgtctgcgcccttcctctgccgggcagcctcagcctcctcgggcacccgcacaggcaccgcgccacggtagaaggacacctccttcacattcttcaggtgcgagtagaagacaaagcagattctgccctccacacagtcagggcggtcagcatccacgtcgatgccgcgctcgaaggccgcaaagaactcttcgccctcgaacatctccaccgtgtcagagggctcggggccccggtaccgctccagcagccgccgaagggtggcgtccaccttgtttcggggcaggcactgcagcaggacctgctcagggtcccggcgccgctgcagagcgatgaggttcacacggtgcagccgcagccgc

SEQ ID NO: 160795 - DNA, 1000 bp, Homo Sapiens
cagtggtttgctgctctttgtcagaatatgtcagaaaacaaaacaaaaaaagttttaaatgctaaagattttaaaaattagttctctgaaatttctgtaaagccagtatcaccagtcatataaatctttattttggaatcataaacctttcaaaaatgtaatgagcatctacccaaaattacacctctctgaaatgtaattaaaagctatccaacaaaaacaaaaataaatatttttctagaaagaacatatttggcattttaaaataatgttaaaaacagcttctcaaatgtaaatgatgtctagatttttactttctattaccagacagaaagtttggatctttagtggttccaatctgacttcagtaataggaggcatgattacattgaagttaatgaactttaatcctaacaaagccaatatacttttctagcacagtgattgctttttaaaagtggtgtccagcacgtactaaaaactactaagagtaaggccagatagctcaaattagttgattaatttggtatccaaattgggtttttttttttttttcctggagatggagtttccctctgtcacctaggccggagtgcagtggcatgatctcagctcactgcaacctctgcctcccgggttcaagcgattctcctgtctcagcctcctgagaagctgagattacagagaagtgccaccacacccggctaatttttgtatttttagtagagacagggtttcgccatgttgcccaggctggtcttgaactcctgacctcaagtgatccacccgccttggtctcccaaagtgctgggattacaggtttgagccatcgtgcctggcccccaaattgttttatatatacctttcatccttagatttaatatttctaatttgtgatatttctctgaaaatcaatcaagtacacagttctagtgaaatataaactgaattttgcttcattaactaaattaaaatacgtcaaacatggttaaatcttata

SEQ ID NO: 160796 - DNA, 1000 bp, Homo Sapiens
ttttttagggcagaacagttttaagctgaacttttatttcctctcttttgaaatattctgattcaggttttgactgtggagaaaagagtaacaagaatgtcagcagaggcatttcgtatcctaattttaacatgatacttaaaattctacctacatttgttaaatgctattatttcgtatgtaaatcataatgcatatttattgagagctacattttaagtacaagtttgtatttatttaatcttatgtaccctatgaggaaggtattggtatcatcctctgttttacaggtggggagactatagcatagcagcatttagataacttgcctaaagtcccacagctcacaaatggggaggaaagatttgaacttggtgccagagcatatgtttaaccctggcaataagtgtctaagcatgctggtctccccagtaagcagcaagctgcccaagatatcagacttcttttctttataaaactacttaaatgatgctgcttgcaatggcactcaaagttgctgaccaacccccaaaagaagaataatgctgacataaaaggctatgaattaaagaggtaccttgtgaagaacagagattttaaagtatcatcttacttattatttgtaacaaaaatggaaaacttacagtaatgacctgcattgagaatttgatatgaatcatcaacatagttatgttgatatgtatatactatgttgatgattcatgtcaaactcatattaactcatgatatcaacatatatattgattcgtatcaaaaacatgagttagatatgaaatgagacatagatttctaaaccattaaaactacaggtttcatactatggataatgctgcataattatagaagctatctatcacattcctaggggagaccatagcaatgatttcctgtgggaatgtggacgattcttattccccaaaaccttacatttgtttaaaatgtcactcttacagaaaaagatgcacctctgaatatcctt

SEQ ID NO: 160797 - DNA, 726 bp, Homo Sapiens
tttttttttttttttttggggttgaagagtttatttattgctctgcccccttggcacagcaagcccaggctctaccagcaacgatagtcgggataggtctcagacacaaactcaggatggataacatagttgtttctctggggaccaccagacttcttgaagtgacttgtgtcccatctaaggttcggatatgggtagtatgacggcgggggagttgtaacagcacactgcattccgggccggtgctcgtagggaggtacacatagtcggttgctcccggcaccaaggccgcaggcggcggtcggtgcagggcgccccgctggcgtagtagtccatcccgcgcagacagtagtggcggcccgagcaagcactttcgtaaccatggaagggcaggcggccgggcagcgggtccacgcacccgcatcggggcgtgatccgcggcagctgctggttccgcgacagtgagttcagcatgttcaccatcacttcgcgctcgtaggcattgagccgctccggcctaggagggcattccaagggcattcctcgaactgctgtctccatcctggcctcctggaagcggcacacatgctacctcaagctctgacctggcagagctgctcccttttaggggtcctcccagaacacccagacctatcgccacgccgcaacttctcccgcccttcagcagctccccacctctccagggctctgtgttggcggctgtca

SEQ ID NO: 160798 - DNA, 1000 bp, Homo Sapiens
agtgtggtgaaaatggtgaagtcatttttatttcagtacttgacaaaataccccataaaattcaaaacttctaccattatacaaaaataggtctctacaagtgatattatctgtcttcatcaccagtagaatatattaggcaaaacatgtaacttcagtagccttataagaaaagtgcaggacacctcgagctacacattcagcagtattgtaatgcgtaaaagtttaatcttttcacccatttgataaatacacaaggtttataatttaatgttttaaattagcattccacaaatatacaggtaattcaataattattgtgcatgaatacatacacaatgcttatatatacaaattccagtttgttttcatgtgctggcaagggatttgtatacaatcataagctgtgttcatattggtcccattgaatattcacaatacaaaagcacaaaagaaccattgatttacaaaaggaaatctatttaaaatcacttcaattaatgatgtttcaaaggattatcttctcatgccagcatgaaattgagtagttgaacctgactgtatagttccaagtcgtctttgcagtgcctctagccgagtgatataatctgttagggctctgtcaggatcgtaattctgaagctgagaacatgctaaagaaccaggattgaaatcagctggagtgcctgggtacctattctgaaatggtaaaggggacctaatatagtccagatctgatcttgagcgatacgtagtatgtcttggttctccatataactccagcccaccagaagaatgataaaatgagtcagtcttttctgcaccttgattcagtccaaagccatctctgttaatattgatggaaacagaacctgtgactcgatgccaccgtcgaaccaaaaatttcattctggaaattgcaatggatactctgacggccgaccgaaacctggtgaagccctttgggcgattggtgatcacctctagatccgtgaaagct

SEQ ID NO: 160799 - DNA, 1000 bp, Homo Sapiens
ttccaagcatttttatcatatatatataaatagcaagagaaaaatattttcagttttaaaaaaaggataaaagtgacaaaaaaggaaaagcaggaataatgctaatacatttggttttacttaccttgcaagtgttctactgtcctgttagaacaaaccactgactgttacaaaagtaacattagttacatcatactgtattagatggaatatgctaatttctctcttgtaaaacagtctggaggtagatagtccacgccacttatggtgtttcttcaatgaggtcgtacagggaccaggatccttctgttgtttttcttctacaatggtgtgttgcctcctcttcagggtccaagatggctcactaccagatccacattccaagcaacaggatggagaaaggggcaaataaatggtcatgccattttaaggacacaaaaaatcgtttcccctcacattccattgtccagaacacagtcatacctgcacaggagactgggaaatgtagtctttattctaggaggcatacccacttgaaaaatcaaaggttctatcattatgtgaaaagtaaagaatggatattgaaggaaaattggtgctctctgcacatctcttatttagatatttgtacagaaattcaaacttgaaaatcattctactgggaatatgacaggaatgactagctgacataccaactattctgggttttcatttataaaggattagtttacttcctttgttcatccaaaagcaatgaaatgcaaaacattacctgaatgagttccacgctatgttttattggtataaaaccaaaataagatgatgtaatactctggtctaccagttagttagctatttagacctaggtgaaaaaaaaatatttttaaggaaagaagaaaaatcttttacttataataaaatactgattagtcttgtcaatttatctgaccaaaacaaaaatagttctttaatttttatcaaataagtaaaaagtcaataa

SEQ ID NO: 160800 - DNA, 1000 bp, Homo Sapiens
ttttttttttttttttttttttttttttttttttttttttttttttttggcttgtttgatgcttttaatatcattatttgtgttacacgatacacaaccaaggatgatggtcaatactgcaatgaaaatgttaaaaaaaatattatacacggctcatgtcttccacacaccttcctggaaataaattagtgagcacggagaaacctggctgggtggcagccacagctgagagaggagggagtgttaaggcagtatctacaaggggaagggtggcaggagggcaagctaaggcctagattcttccctccaacctcccagacagggaaggagggagccacacccctccctagacacagaagctgccactgccagcttcctgcctctctctgccacacatgcactgcctcagttggaagcccttgcctgccagggaactagtatgtcctgtggggggggagattttccctggtgtctcagggccacagagattgaacaatgggcccgagtcacactgcaagtcagcagcaaaggcagcagtctaaatgagcccccaaaaagaggaggtacccatgttctagaaaggtgagccaaggagccccggggtggtggtggtggtagtgggagggctggctctggggtccagatgatgggggcacaggggttggggggatgttgatctgggtgggagaggtgggttcagatgggggccagtatgggccttgtgggtcctgcaggtaccttctctgtccttgcctccctttgtttggcattttctcatcatctaacttgggtccctgcactagaggaggtaggaatgggttggcggagtggggggtggtgagctgtaccccaatattttggagctggcagttcctgggtatgatgcagggagaggtaccacccttcctaagccaacagtctcactccctcctctcattgctccccattccagctcccacctcccaggattggtgtccagagagtgggctgtgggtgagtc

SEQ ID NO: 160801 - DNA, 1000 bp, Homo Sapiens
ttacaaaagagtaaacattttattatttgtacatgaatcagtttggtctgaggatacacaagcatctggctaactcataaaagtagcctgaagtgattgataggagagtgtttgtagtcatttccatttgctgccacatcccttacattatctacttgctaagcactgagaggcccagaatggacacatcaaactgtcaggaggaacatatgggacactggcacctgcaatggtttttttaaaagcagagaatgcagagcagtcacagactccacttcaaagccagggtgtgtggaggtctccggggaagagctctgcacaacaggtttcctgggggccagagggcctctcggggaggaacagaaaaaaaccagccaggagtgctaccgaccagcctcagccagaatgctgtcagaacaaggccccaaacatggcctggcctcagtgatctggggatgaacggtgtcacaagggaaccacctgaagggtgggcagaggcccccgtggaggagccacatactcttcctctctcagcagccgcagcaggatgttttttttattcttgggccagctgtagacatgagtgttctgaagccaggtgggcacatgctccttcttagcatttgggaagagcacagggatgaatctgaaattcatgcttccttgttttatgaactcaatctgcatcattcgatgaatgtacttagtatgtaagccatgctcatcctcgtccagctgcgactcagcgccttccacgtcctgtttgtatttggggctgattgctacgattatcatcacggtcttatccctaaggtagcgctccatccatttaatgatatcaatgcctcggattctatcctcaaatatgtcaattgcagtttggaagccatttaccaacaaaaagttcacgaatttcaccacctccatagctgtgtccatcgaataagtgataaagactttccgcaattcttctggcaaattgcttgtttttagagttcct

SEQ ID NO: 160802 - DNA, 1000 bp, Homo Sapiens
tgatatgtaaaattttacctctatttcagatagaagccaaagtaaaacatgaggaataaaaacatttatctatgtattcagaatcacacacaagttacctttacagttcaatttactatatagaaatcattgggttttatatttgcagttaacttttgaactgagattacaatattataacaaaaaactttacattaattcagaactttttagcataccaaattgaaatacataggttcaaatttcagatttatggcaaacagtcttcaaatacaatacagacatttcttaaaagttaccgtatcattcacatgtgatatttgcaactctgagctatttcttatagaacagctctcctgcagatatggcaaagttgatatgccatgaagttcaaggcctgtatagtcaagccaaggactcaaagttgcaccatctttaaaaaggtttggcatttctggaccacaacaatgcacaacatgtaaagaaggtaggaaacagttccccctccttgttaaatggttaaaaaaagttacatggtagcttggaattttgcataaaaccccataatataccttggaaaagtccaagggcaatttgatggcaatggattggggccctatatatatatatttttaatagaacccatgagatttaaatgggcattaatcaaatcaaaaaatattaagcacctactggtttaagagatttaaatttattagagattcatgatcaatttctttccacctcgaaatcaaggtgtaaaaaccagctattaagtgcattccaaacttctcctatgtagcacaggtagaattttctgtccattggcaccaaagtgaagtcacatttcctcttgggagacagaaattccacacctgaacacagagtaagttaggaaaaaatgacccctgttgtttattactattgtgattctgagatctaggatttctaatatactagcagtaaacaaagcaaattcctggcaacaactgtcaggtta

SEQ ID NO: 160803 - DNA, 1000 bp, Homo Sapiens
ttttttttttttttttttcaggtcgttaaaaattcaaatggttttaatagctaaaaaactacaaattaagctctaaaacaaacaaactacagaaatgtaaaccttcatttgccaaaggtccttggtggcctgtcccctgccctgggagcagatggccctgaagcccttccctcactgtgcaggccaccgggtgaggctggacggtcacccatggtggcttcactgcaaggagcaggactgccgagctcaagcacggggccttcagcttcccctgtcctctggccacaccgccagcccttggtccttatctgtgtgaggtttacaaataaagcttctgatgtcaaatgtttaaatcgtgccctcagtggacgaggccatgtcctgatgcagaaggctgagcccaggctctctgtggcgccgctgagagcagagggctgtcttggggtcttcgagctctggagccaaggatggcctggtcctacttctctgcccccaccaatgggggacttgaatgtggccagagaatacagtcagtcagggccagccagggtgtctgtcagggtgggcacagggtcctctccaaacctgcttctccctccctggtcaggccttcatccccaccacccgcacctgtaccctggacgctggctcagaggcctacaggtgtgtggacacctgggcagtcactgtgtcctactgtgcccctcctctgcaggcccagcttggtgtctgagcctcttacaagccagttactgccagggctgcaccaggccttgcggaggacagtgcctggcgggagggatggagggcgtcaaaagtcactctagagcccaggggcccgaccaatggtcacagacagggatgacaggctgcagagggatgggctggagaagagaaggagccagccatggcgcagttcttgttcttagcatgatgaagggccacagattggtgtgcagcagggtgacgaggggcagacatacctctagtggtcatcagg

SEQ ID NO: 160804 - DNA, 1000 bp, Homo Sapiens
tttttttttttttttttttttttttttttttttttttgtccctaaatagcatgcgttcatgacgctggctcactttatttttggccccaggtcaggtctcccaaagggtttcccagcagtcacttcagagtctcctgcagagtcaccatcaagcagacctcttcctcgggaggccgtgtcgccaccccaacccttgacttctggtatcaccatctcctgtcacctgggctccagtctctgtccgatggcctcaacaggacatcaaagcatagctaccagtttgaaggtgccctcaggcttggcaggaaccacgtggacaaaagtcttgtagagcacagcacccttgggcagcctggtgatcagatccacagcctccgtgtttctgggatgaggcacgtagacctccttagtgtagcggactatcccctcttccagggcatacagacatttattcttcccaacacccacctgcaacacacagacctggtcagctggtcagctggtcagtgaggtggtccgtcccagaattttgggacagacttctcacacagagccgggccctggggctgaaagggtgatcagagagctccatctcaggttccctttcccactggctagcacgtccaaaccttctgcttctttattgactcataacaaatgagggaaaagaaagctccaacagccaacatgggccactgctcagtcccagggactgttacctggagccatgtctatgcagctggtcagaagccacactgcacaaatcccaaaacccaggaagatgccctaaatcttcacttagacttaaacaacactagaactgtcatattaaaacactagtttgatgtaaattttcatttagatagtgatctataaagtttaggctctatggaaaatataaaccaaagctatatggataatgcatatgctaataaaacaatcatactactgcattagctaatacccatgtaagccctttaatacacattaagtcatttaa

SEQ ID NO: 160805 - DNA, 1000 bp, Homo Sapiens
tttttttttttttttgagccaccatatatttttaattcaagtatataggcaatacgattattacagaagccgatgggttccctcagacctgacttgagagaacaaagccagcagctcaaagagcctgtgacatgggacgtgggaagggtgctgagagcccgctgtggcgtgggtcatgccttctgcaccccactttccccaggcaagatccctgggcgcccttatttggggggatgttgatcccgagggaggagtatttggaatttcttgcttttaaccagaatgccccctctcccctgccctcgccagcagcctcaccctgaagacctgggcctgctgaatgggccacacgctgcctgtgtcctgcctccgtgggtggcactttttacgcaggcagcttctctgttttttttgttttttgtaacctgcaagcttagaaatctcaggttgtgctcctggggctgctcctggggactggcctcgtgtcatggagaaaagcatgtgtgtcggggcgcgctggggccagggtatggctctccgccctggctggctctgcaggggtggtccctgttcaagcccgctccgtgggagctgccccctggggaccctgctcctcggtcacagggggcccctttagttttcccatccccatcctgctcgtgtaaagcttggtttatcttctcggcgttctgtgtgtagcgtagtcttggtttggtctccacagctcttcggggtggggtgtgagtgtggtttttcccaggcaggggccgtctgcccttgtcccccagctatctcctggtctgctgggtgggagggtctctccaggccccagaccccacttggaggggcatgtgtttctcagaggggctccatccgcagttgcatggaactccttacctgtttgccgtccatcccccggaggtaatcagaggagtgggcctgttgtcttggcgctggcggatggggcaggtgccctccatgggaaatactggtcctccag

SEQ ID NO: 160806 - DNA, 1000 bp, Homo Sapiens
gggagtagtgtctttattcattaaagcctgaggtctgaccacccctgtaaaacctcgtgcccacacagtgcctgtctgagtccttctgtgcccaaatgtggagcaggctgcagagacttgaagcctggggttttgtgcctcctttttgttttgttttttttgagacagagtcttgctctgttgcctaggctggagtgtagtggtgtgatctcggctcattgcaacctctgcctccagggttcaagtgattctcctgcctcagcctccagagtagctgggattacaggtgtgcaccaccacgccaggctaatttttgtatttttagtagagacagggtttcaccatgttggccaggctggtctccaactcctggcctcaagtcatcctcccgccttagcctcccaaagtgctggaattacaggcatgagccaccacgcccggccatcttcttgccagcaactcttagaccaggaagcctcggatggcagctatgaagtcctgtgggcggtcagcgtggatccagtggccagcgttcggcaccgtctgcatctgggcccgagggaagagccgcataatctcagggtggtggctgggatgcacgaactgggagtttccaccaaggagaaagagtgttggcccgaggtaggactcctgcctctgtgggaaagccaagatcttgtctaggtgctgggtcagggcatccaagttcaccctccacacgaagcgcccgtctacctctaccaggttagtgagcaggtgctgccgcacggccatgtcctggatgacagaactgagctgttcatccgccagttttcgggcacgggagcggggcagctcatctgcgatgttgatggccctcatggctgccacataggttgcaaagtgggagacacctgtgctttccactgggctgatatctacagcaatgagacgttccaccagctctggcctctgtagtgccagcagcatggctgtctttcctcccatgctgtggccaacg

SEQ ID NO: 160807 - DNA, 1000 bp, Homo Sapiens
tttttttttttttttttttttttttagagtacgttctgcattttatttttgcaggcaacactttgctcaccagcaagaacacagcccaaggaagggacccaataacctttcaaaacccaaactgcttcctgcggtgagggcccagggtcctccacggagaggacaggcatcttcctttcccaccaggaaggagtcagcccggagcctctgctatgtgcaaggcggtgtgcaagcaccggctgcggctctttgctgtctcttctttctctttggggctgggctgggtgtgcgttctggtgctgatgctttggcctgtgaggctgagcttggcacctcgacccgttcaattacagcaacgaagaagccactgctgagtgtggtctcaggggaggcccggaggcagtgctcggcacccgggaacgtgctcaggcctcggtggggccaggcaggcagggcgggagctagcctgaaggcgcccgggttctgctgcagcgcatctcgcaccacgtcttcattctcctcctggcagagggagcacgtggagtagacgagccgctgcagggaagggaaagtgagcgcgtggcacagggctcgctgctggaaccctgccagggcatgcagacgcaccgggctaggtgtgcctgccccgggctcctccagctgtctgctcggcatacccgagccactgcaggaaggatccagcaggatgtagtggacctcatggtagcgtggatccgagggggagaccgccaggaagtcctcctcagccagttcacagcaagagacgccagcccgggccagcagcgtggccatggatgccagccgcttggcatccaggtcaaaggcaaagatcttcccttggttcttcagaagagcagccaagtgactggtcttattgcctggggcggcacaggcatcgatgacatgggagcctggcggggggtccagcagcatggctgggagacagctggccctgtcctgcagaatgaggtgtccggcc

SEQ ID NO: 160808 - DNA, 1000 bp, Homo Sapiens
taaaatgctgaactttgtaatgaatgattaaagccaagaactccaaacccacccagcagtcttaacattaccaatagagaggcaccagcattatctgcctcctgacaggatgcaacaagaagtacccagcaccacctaggaagtatttttgccacaaaatcagacctccagatctaactaccattttataggaaagataagttcagagaaccatgtcaaatgacacctcgggatttcaaccagcaacgttcaaatgtgctaaactctgtagatggaaagagacttacagacatttcaaataaatgcaatatatgggccttgcttgaatcctaatacaaacaatccaactacaaaaacagccaaacatttgtgggacaatgggagatgcttgaattccgattgtatatttaaggatgttagaaatatttatggacaaaatgatgtaatgctcggaatttgcttcagaatgatccaggtacagcatgtggagctggagagaggagtgggcagcagtgtagataaacaggcctggccgtgtgtggatgggttgtcagggctgagtggagttgcaaagggatttattataccatgatctctgcttgtgcatatgtttggagattttcataatcaaatgtgaaaatttttgattttcataatcaaaaatcaatacaaaatatgaatgtataacgtaattcctccatcatgacggtggtgggagtggtgtgtatgtgtgaagtgtgtgtgtgtgtatatgtgtgtgtgtgtgtgtattctcatgttctgtttggtcttaattcaagttgcaaccctggaaacagctacattctctggaaaataactttttgtaggtgtaaagaatgccccagcctaacatattcaaggtctgtcagacaggcaggcacagacacaaggcccctccttaggggactgctggggccagtcccacacggttattcccacggtcaaagactgagtaaaactgtcgaatgaagacatcccc

SEQ ID NO: 160809 - DNA, 1000 bp, Homo Sapiens
tttttttttttttttttttttttttttttcactttatcttttctactttattacttcaaattaacaaccacgataaagctcaaaaaagtccaatatttacacaggaaaaaagtacaaaattccccccaaagttcttcagttttttttttttcagttttttaaattacaaagtaataaaaagctttgctctttaattaaaaaaaaaaaggaaaaaggggaaacagaggtaaataaattaggaaaacacacacacggagaaaacaaacaaaaataaaataaaataaaaacaaaaaggtgttaactaggaaggatgggttaatccaaaacccagccctgactccaggctcctcctcagaaaggtggaaccagggagaggggggaccccaggtgactgtcaggaccagggaagtaatttataactcagagccagatgccttctggaagcagtctccatggattctgccctaaaaccaggaatggaagatggagctgccaccggctgatgacgggctagggggggaccggtggcagcgaggaccctctgagctctgagggatgcggaggtcaccgcccacccccatgtccttgttagtagacacaggagaacgggaattcgggctggcaggcggggcgggccgtggcacctgctgtcttgggaaacacaggtcaatacatccacacacacacacacacacacacacgcaggggacgccggcccccaccacctccccacccactccatggagaggcagaggaggagcctggaggccagggggacaatggaaaagcccagcacgggaagtcagccactgtcatctcagagtgggtggggctgtgcgtatctcctggattctgaggctcggaaaactcggtgggaactgccttcaactgactacaccactccctgatgatgcttgagggccggctttggctctgggacctgtcacttctccgacacggacccgacccgttcctctccaggcaggtggtgggtgggggc

SEQ ID NO: 160810 - DNA, 1000 bp, Homo Sapiens
ctagctagaaaaggtgtttcctcccattttatttcataatacattttcacagaaacatgatatatttacaaatatacaggtaagagactgctggtcagaaatcttaaaactcaaaatgtcatcaaaaattaatttacaaaagccaccaagggtccatggaggcggccaggtggatggtgtggccggcgtctgcgtgagcctgcccagaagcccacgcagcctcccggctctgcctccgctggccccgtctcaggaagcgctggtttgcaggtttttggaagctgcaagcatcgctctgactttggccatgagatcctgagtgattttgctctgcacggaagaaacgattgctgaagagatctgggcttctttttcctgagagactcccctggagcgctcctggctggagccccgactctccacaggggagacgctggctgagtgcgccgagtgggccgcgggggccgcgggccggggcgctgcctgcttgctgggtgacaccgactgagacctggccttggacttggtccgcgaccgggaccgcctcttcttcttcttctcgtggggacttctggagcgggtccgcttcctgctggccccagggctgcggctcacgcggtaggcagtgggcacactcctctcttccctccgtctctcaggggagtgggctctcctccgaggggaccgggagcgggacctcgaccgccgcactgtccgataggcactgggaagagaatgctttgcttttgagtgtgatctagacctggacttggatgacgaatggtacttgggagaacgtgatcttgttcgagatctttttttgtgctttttctttttcttttctttctcttcttctctcggtggatctttgcttttgctcgaaggcctatcgggtggtttaacttctaaagtaggcagaggcctgcctccagtcagtagagggcagggcgtagtgctggattcctcgacactgaaaggactctcctcaattttcccagct

SEQ ID NO: 160811 - DNA, 1000 bp, Homo Sapiens
tgaaggttctgaggcaagtatttattccaagcaaacacgtgggcgtggacagctatctcagagcctacgtcactcagcagagtcacacatttcaaagcaggtcacacaagtccctcatgaacagtcttccagcttcagcccttctcttgccacctctgtggtctgagctgggggagggggagggcctccgagttcccaaacaaaacacaggtacctaagggctccaccacctgggccctcagggagcagcatctgcccagcgaggacctgctgccggagctgtccttggagcctgggcacctgtgcacggccacccctcatgcctgtgagctgccacaggtcccttcctccacagtgtggggacgaaagggcagctggcatttctccaaccttcagctgtaggccttgggaacttggaaaagatcagcaatgtccagcagggctttgcggatgtggtttccaaagcgctgggcgttcgtctctgagcttgagaacttgctggagatgtggaagaagatcgtgttctcgcctgcaatcatgtaggaaactccatagccatcatctgctacagggccaaagccacctccagcgcccaggtgattggggtgctgctctgggtcgaacatgcggatctgggattgggggatctggctggtggagagacgccagggttccgagagcacctcagcaaggaaaggagagctgactcctaggtacttggagaccaagtaaaggcagaagaggtgcctgtcgatccctgccccggtcatggccaggcggtacatattctggtgcttcttagcagccttctggaagagatctcgcaggtctgcttttgtgtgggacccctccatcatggcctgcacaaaggctgtggactcgctggtacaggaacgcacagtctcagtccgtccctcccggaacattctggtcattgaggcctcataggtcaggcagaacttacccccggaagtgagccagctgcagcgcgatctgcaca

SEQ ID NO: 160812 - DNA, 1000 bp, Homo Sapiens
gatgttagaaaaagggatatatttacaaaccaaaaagtctccaaattcccactggaaggaggtagcaagtatgagcaggtctctttagaagcccgtcctcattcctatagaaaccccaagtactagcccatggggtcagcccttgccctatagcccatccttgtcacaacccaagaagcaatccctccattggccacaccctcagtccttttgccagtcatcctgtgcccaggcaggcattggtgaaaagtactcaaagcctggccctttatagcgtagggcatgtaggaacatcacaaggtcttggggcaagggatcctgtcgcaccagccggcactctgcacagagtgggtctgtctcttgattcatgacatctgtttcaactgccttctctgatgccaaggctattgtgtccaactcctgaggggctgcctcagctacttcctccatcttctgggcagctgcagccaactcttccaggtcgtccttgcccaactctgaggagggggccgtagagtctgtgagtcctggggacaggtcaccctcacagagatctagcacatccaggctctgtttggcctggtgctctgctaccaggtcccgtagcaactcctcgtttgtcttgggaatgtagccgccccggcctcgagaaggaccccaggcaactgagttgtagatggggtcgttgagaatgggatggcccaagaactgaaggtggactcgaatctggtgtgtgcggcctgtgagtggccggcaccgtaccacactggactggccattgtagcttagcctctggaacactgtctcacagggcttgccccggggatctacacggcacacccctactttgtaagacaccactaagatgggttctttacaggtcacttcctcagtggggaactccccttccacccggcacacgtactccttctccagctgccggtcccgaacctgctcgtgaattctctcagagactgcagctgtcttggcaaacataagc

SEQ ID NO: 160813 - DNA, 1000 bp, Homo Sapiens
ttttttttttttttttttttttttttttttttttttttttttttttttttatgtggataatatttatttgtatcttatctatagaacaaatatttacagatacaaacggaatcacagcaaagttgctataaaaccatccagacctctcgatggccacttctgaaaacatccacggtgaagggcagggccaggcctggctgtggagtgggccagctgagtacctgggcgtcagccaagggaaatggttggggattatggcttcagcactctgccggagcacattcctgagcgctgacaacgtggagccctcaccgcccccacctaccccaacctcaatggggaaggaaaggggcctgagctgggcagggctgcccgggctcactatgtgcctgctccaggagtccctggcccctgtgctggcaggagcatccctgagctggaccgggaggcctctctggcctggggctgctccctgcccggcaggctgctgtttggcagctggaggtggcaagagctgctggtgctgccagggcgtgttggccaggaatgagctcccagggcagccctgaggaaagggtcttaggaagcgcctcccagctcactactaggagctggggactgtcagtgctgagtggggctggggtacaggagcacctgcctctcctttctttggcttagaagtggggaaggaagggccaggaaaagggaccaaagccgccccagccttggcccctaggccgcctggggactgtgtgtgtgctgagggggcagtgggaggtgggcagctctggagttccctgcaccctgggatccttgggctgctctcactcccggggtcccagcagggcaaggcctctgcttgggaccagtgctgctcttcctcgctgcttactccaggaggtgaaggtgacagggcggcaaggagaggtaaccacagcatggctggggacaggcgctacactgggccccggacccagcacagggatcacagtgtcggtct

SEQ ID NO: 160814 - DNA, 1000 bp, Homo Sapiens
gtttctcttttgcactgttattttattttgtttagtccatatattatataaaacataacaggaaaaatgaacgaatttataaaataaattgaggtgtttggatgaaaaaaaatacaagagctttgccttcatgtctacagatctcttaatatattgttggtcttgcaccttagatatcaaataaagatatctagcttgacacaaaaattggtagctgcaaggttaagctgtattagtttgatgatgggccaggaaatgatatattttctaaattttgtccttaaatattggctgtaacaaatgctgatatagcaaaaagtaagcttctattagacagcaagagggaaacttgagtgaatgaatgcaacttacctccaagtcctcttaaaggaggtaaaaaaataaatactgtgttttaccagtgctcccctcaaagcattattctaagcatgcaggagggtatagtgagcagctacaatagtaagatccaacccagaggtaggttcaaggccaagagtaggagagtggttgaggaaatcctcctagggccagtaccatttcatagaatgcccatttgtgctgggagatgagtctatggcctattttcttctgattcaaaaggacattcccaatttcaaccttgctgaaaaacaggcatttttgtacctgctgttaagaacagctaggatacaggataaggctggcataaaattatttagcaagcacatgctagctattccagtttgaaatctaccaaactgtaacatcagggagaaataaaaagttgaagatgaagttgttcctcaagctgagggaacaaaatcttacaaaaggagggattaggcactcgctaaactctatatggagaacatccttctcaagctaggtggaagatgaggaagaatattaccaaaagctgaccaggccatttggagaccaaaaggagaggaaaaaaggcatttaggaagcaagctagtaaaagaagttcttctgggtctga

SEQ ID NO: 160815 - DNA, 1000 bp, Homo Sapiens
tttttttttttttttttttttgttgttttctttgagacggagtctcgctctggtgcccaggctggagtgcagtggcacgatctcagctcactgcaacctccgcctcccgggttcaagtgattctcatgcctcggcctcccaagtagctgggattacaggcacctgtcaccatgcctggctaattgttcctatttttaggggtttctccatgttggccaggctggtcttgaactcctgacctcagatgatccgctgtcttcggcctcccaaagtgctgagattagaggcgtgagccagtgcacccggcccattctcttggtttttaaagctgaaaacaagatcctggtgtttgtggtctcgggagaagatgccgtggccctgaggccagccctcacctgggctgcgtgaagaaggcatggatctgctgtgccactgcttgtccgaccacctgctccagttccccaatggaagcattactcagttgctggatgcttggaaacttctggaggagaaggggagctttaacttttccaactcctgggatctgctgcacggttcgaaggagcgaaggctcagacagcagcagggcccgtttcttcccgagaagagggttcttactgggctctttggtttgctcttgaaccaactggatgacgaggcaggatgcttccatctggctggccactggaagcagcaccattccaaggtccagcacagtaaacttctgtagggctgggaagtattgttcactcatccgggttttttcaacgactacaattcctttaagattattggaatttctaacccgaacaagcctctttctgtagccatttcctgccaccaaatcagcttcggtgacataaagaatgcagcatctgttcgacagataaaagtctggtgtcaagccatcctcgaaaatgagcttaattttcccttgcatctcctgcgccagctgtgacccgcgccatttctcattggccacaatatgccccaaaggcac

SEQ ID NO: 160816 - DNA, 1000 bp, Homo Sapiens
ttttttttttttttttttttttttttttttttttttttttttttttttttttttttttttttttttttttttttttgtaatgtaaaaccatttgtttaattctaaatcaaatcactttcacaacagtgaaaattagtgactggttaaggtgtgccactgtacatatcatcattttctgactggggtcaggacctggtcctagtccacaagggtggcaggaggagggtggaggctaagaacacagaaaacacacaaaagaaaggaaagctgccttggcagaaggatgaggtggtgagcttgccgagggatggtgggaagggggctccctgttggggccgagccaggagtcccaagtcagctctcctgccttacttagctcctggcagagggtgagtggggacctacgaggttcaaaatcaaatggcatttggccaggctggctttactaacaggttcccagagtgcctctgttggctgagctctcctgggctcactccatttcattgaagagtccaaatgattcattttcctacccacaacttttcattattcttctggaaacccatttctgttgagtccatctgacttaagtcctctctccctccactagttggggccactgcactgaggggggtcccaccaattctctctagagaagagacactccagaggcccctgcaactttgcggatttccagaaggtgataaaaagagcactcttgagtgggtgcccaggaatgtttaaaatctatcaggcacactataaagctggtggtttcttcctaccaagtggattcggcatatgaaccacctactcaatactttatattttgtctgtttaaacactgaactctggtgttgacaggtacaaaggagaagagatggggactatgaagaggggagggcttccctcatcttcctcaagatctttgtttccacaaactatgcagtcataattgagaaaaagcaatagatggggcttcctaccatttgttggttat

SEQ ID NO: 160817 - DNA, 1000 bp, Homo Sapiens
tttttttttttttttcggtttttcttttaattatttaccagataaaaaagaaaaaaatagtgattgtttctcttcacccccaacatttccgtttaccaaggtcgagttggagagaaattcattgaacaacgatttgtgctcctggcctggagcaaattcttctcctctgctctacgccacctcaggcagcagggacagggcaaagggctccaggcagaaatcctggtggctgggcagcagagtggcagtgtggcgatcgcttcttctcgccattgccagagcattcagaccctttcccgtctgtccccctaccccgagtcccccagtccctcaaaggaggcagggagtggggactgcaggaagcaggacaggtgcacgggtggcctgggcagctccccacagatctggcagaggggacaacccctgcttctattgcacatcctggctcagcccccctgccccgagcagtaggccacaaaatgaaacactttccaaattcagagagcccggtgctgtgtgccaggctcaaggaggggaggtgtgttgttgtgtggcttgttctggaagatagatatgtatttttaagttactccatgatggggccaaggcaacaattttgcctctttgcataaggggtctggacatctcagggtcctgtagtgactgggcctcttcccaggcgagtgcagaagcctcggaagaagcctttcccccaccggcggacctcctggctccatcagatgaagaggcagcgcccaccggccacaccagcccctccggactgtcacgactctgggccacttggggcgacctctttctctgaacacctggagaattctgtcaaatgaccctggagaaaaaccttttatactacatgtttttccataaaatggcagctaagtcccctcaaataaaacctttaagtatttcattctcattcttaccagtgaaatcaagtgggacaggaataagctatttaactgacattagcgacaggata

SEQ ID NO: 160818 - DNA, 1000 bp, Homo Sapiens
tttttttttttttttttttttttcatcactatcatatatattatgttgtcttaccattcaaactgttggcactatacctaatccacagtaaacaggattatcattcccataatatgatctttcttatgaagaatttggtaacagtattctattgtagttttcatgagaaggcttttcctattcaccaaattgactcggttccttgtcagtatgaataatgacccaaggtttactggggatggtgacaatgtaggaagggtccctcgcctcattcagtgccttctcagaggccctctccagaacagccatgtgtgacattctgatgtggtcatttctatttacaataatatacatatttttctgctgcatgcgtgcaacagtgtacaatcagacccaaccctcaggggggttttctcacactgtttctctcaagcgtggctgctctgatgaacactgaacactgatttctgaacgaagcctttcccacagatgccacacttgtagggtttgtctccagtgtgtgttgtctgatgtttattcaaattggacctgttgctaaaggccttcccacactcagcacacacgtaaggcttctctccagtgtgaattcgctgatgcacttggagctgtgattttttagtgaaagacttcccacagtcactgcactcataaggtttctctccagtatgaattctgtgatgtgtaatcaactctgacttctgtcgaaaggtcttcccacattcagaacaaatgtagggcttttctccggtatgagttttctggtgcttactgagatttgacctgccactaaaggctttcccacactcggcacacacatagggtttctctcctgtgtgaactggctgatgcaccaggagctgagacttggaggtaaaggacttcccacagtcactgcattcataaggcttctctccagtatgaattctttgatgagtaataaagtttgacttgcggatgaaagctcttccacactcagtgc

SEQ ID NO: 160819 - DNA, 1000 bp, Homo Sapiens
tttttttttttttttcttttttaggtagtttaattctctacttttattatgttctaatacaagtaactttagtatttactgaagttttaacaaataacctaaataaaccaaaacaatgttgagagaaaagtatacatgcaaatgagcaaaaagcttaatatttttaaaaccaaatttttaaatacctcagaaactagttatatcaaaagaggtagtaatcttcaccttcttgccaccaacatcctagataagatatgggcctgtagtgggtagaattgtgtcccccaaaagatatgtcaaatcctaacacatggtaccctgtaaatgtgaccttatttggagacagggtctttgcggatgtagtcaagatgaggtcatattggatcatggtgaactctaatccagtgctggtctccctagaaaaagagtttggacacggatacaaacatagaagacagggtagaagaccacttgacaacaaaactgagattggagtcaagccactataggctaaggaacagcagggattgctggcaaccaccaaaagccaggaagaggctaggaagtattctttcctagggcctaaggaggaagcatggcactgggacattgtgagtctggacatttagtctctggaactgttaagagaataaatttctgttgtttaaagccacccagtttgtggtaatttgttctagcacatctaggaaactaatacagagttttttataattaataaaaattaaactcttatttggaatgattttccccctttcataattaaacagtgccctattttacataaaataatttaagtaaaaggcataatatttcatgctaataaaccacatttactcagaaaaacatgaacctttgaaaaaatacaacttaagacataagctttgttattttaaaattgtagggcttgtctttacttacatatcttgcctacagaccttaccttaaaataggtaactataatagattactaagaacaaag

SEQ ID NO: 160820 - DNA, 1000 bp, Homo Sapiens
ttttttttctcatcagcaatttcaattttatgttttctacttatttttatataagaatacaatgcaacaaaatattcatatattgcacaaacagtgatgtgcatacaaagatgctaacaacattggctggtaataggctttaccatgttacgatctaaatgcttgttcatcagagaatgtacaaaattctaagtttggcatccaaaagggggcttacagttattgaatatttttcccagccctattttaaatcaaattcaagtttgcctatgacaaagactgtctataagtaacagggcaagcataccaacatcaaaattattcttcttcttatctcacgtgcccctatttctcccaaataagtgacaaggagagtaaaaggatcactgagggaacatttgaagaatgctactaagtgccaggtcctgtacaaggtaattaattactacaaacactctcgtgatggacatggccaatagtgtattttgtcaaaaaacaaaaacaaaacccaagattccagaagctgtttctgacaagaagtccttgtttcagtactcttcagtatgagtccttacttgcaggactgaggaatgaaattgagaaagaacctttaatcattagaaaaggacccaataaaactatacttaaatggatcattaatgtggatttttttacattcgtgtgggatagagaataatcccatgggaaacaaacacattttgaatattttttaaagaagtatttctgattctaattttactgtatgtttaggcatcattaaggacctctgatttgaaggtagatttatgtgccagggactccaaattcatgacatgttttaaggctccatattccatgcaaaaatggacttactgagcatggtggtaataataagtatgtaaaaaatagataactacagtcgtactttggtatccatgggggattggttccaggatcccccagtatcaaaatccacaaatgctcaagtcccatatataaa

SEQ ID NO: 160821 - DNA, 760 bp, Homo Sapiens
tttttttttttttttttttttttttttttttttttttttttttttttttttttttttttttttttttttttttttttttttttttttttttttttttttttttttttttttttttttttttttttttttttttttttttttttttttttttttttttttttttcttttcagataatttatttgactatttctttttttttacttgctggactgtccaaaacttcaatcttgccttttccaccttcagaattgggaagcttaatgttatctatggtgacttcagatgggatgctgtcatcttcgtcttctgattctgaactgttctctgaactgtcttgtgaactctcttctgaactgtccacttcttttgaatccgactgattcatctcaaacaaagccacatccatttgtataactttactatgaggcccatcaatgttttcaatattgaaacgaccaggtggtgcagctgccatttcttttcttagcttttcatttgcccgtgccatctgtgggagaaatgtctgtacctggtccaataagggactcctctctatccgaactgtttgaagagtggaggtctttctggacttaggttgggagttgatgagcaacctgtcccatatacctccgcggccgtcgcttcccgccgtcagcagctccttggacactgggactcctgaggaatcccgggtgggcgacgaacaactcgggctagcctggggcttgccatggacctccatgcttcccggacgcgtgg

SEQ ID NO: 160822 - DNA, 736 bp, Homo Sapiens
tttttttttttttttttttttttttttaattttcaaaatacctttatttttttctctttgggtggtcattccatcacactgttaacagtgcacctgctgtaccatttcatttggataattctgacaatctccacttcttcatgcgtctcagtcagtcctcagtttcttcggcttctgttattgtccctgttacatcatccttatcctcgtcactcttcatcgagggcccagcacttggaggcccaggactcgcaggcttcagccctaacttgctgctggatgaggccaactccgccttttcgctggacttctgtggcagcgcgacatccacagggatggccttttctttcctgctctcctgaatgactctgtagatgatggtgatgacgaaggccccagcgatgatcacaatcaaggcagagaacacgtggatgtaaatgggaaccgctttcttgtagcagacgccttcgtagaagcagcacccgagctcctggcatcggtccctggagacgttgtagtcacaaatgtcatacagaggaacatcacacactgtgaattgcttcaggaggtgccgcggagagttcttcacttccagcacgtattccattgctgcagctgacagatgaaggggccgagcacacctgcgcctcacgtcccaggcgggtcccctcagccacctgtgcctctcagtcccactccacgtggaaaacaccttttaggtaaaacaacaaactgg

SEQ ID NO: 160823 - DNA, 1000 bp, Homo Sapiens
cataaatcacttcaatttatttccatttctaataacattgttattggggcgataacaagtcatgtaaatcagcctacatgttagaataatacatagtctacaatatatagtctgattttcttcatgctataaatacctataaacattagtgtacagaagcggtatatttagatctgactaaagaataaaatattaaatcagtatttgtctcatgagctatgcacaaatgtctttatcaatttacatttcaaatatagttttaatgacatagtcatgtcatatagcttttaatagagattctagtttatagaatatttgtctacaaaaaaagaattttctaagaactggaaaagcatttttcaaagcaatttttcaaagtataataagtgatctgtggttctgtaaaggtagataataccagatctttcaagtttcactgtgcttcaggattgttcttgaagagatattctgccagaaaatcaacagggtcttcgggtcggacgttgcaacattcattcaggccctgaataagagttggcatcacataggtcattaaatagtttctcaggggaattgactgagcctccagtaattctctttcttctcttttcacttcctccagtcgtttattccactcctcccagcgagctatcttctctgccatctccacggcctcctggtgctcgcgttctgcttcctcagcagcctccctggccagccgctcctccgcagccttccgctcctcttctgccttttcttcgtctgttaaaccataatttcgaggctccccaatctctttgatgagctgtttgatagcaagtctattctgagcatcttcaagttttcctacatcaatatgtatcgggtgaatttcaagttcatcaaaatagttgaagacagtctcatcgtcgatattgatgtcccggtagttgctcagagcccggaggaatcggtcttggctgtagtgggtccccgccacgatgctctcaggaaggtttat

SEQ ID NO: 160824 - DNA, 1000 bp, Homo Sapiens
ttttttttttttttttttccggtatgaagcctcttttatttgtgcctcagaatcagtctggtgcccctggcatcagggaagggggtgggaggaacagtttctctttgttcttttcttccatccctctttgtgtcccttctgagcctcactggctgagccgggaaggccagtcccagacaggcccgggacaagggtgtgcggtgggcccctgcccctggcggggtctgtgcttctctgggtgggtgaggtggggcaggggagagccgggggttagcaccattggatgaagggttttagagtcagtctccgtgtgggggcaagtgggatgtacaaccacagaggctagcagcagctggtgggaaggggtgggggtggcgccagggccctgggcgagccctttgtgtccagtctacttgggtctagtgcttaccccagcccaatatgctccccactctccgaggcaccatgagggagtcagggcttgcacaggccagggggctacgttggacacactccctgctgtgctgctgcacccgcgaggcggtggctccagtctccagccgccgctctgcaggcgcgcaggccggggtttgtctggctcctggccctgggcgtggcgcgcgtggcgctggcgagggtcccggcagggggcgctactgctcggtcagtgagagcctcaggatgcgctccagctcctcctcctcctggcgcgcgcgccgccgcctctcctcctgctcctgcgccgacagttccatcgccagccgcagctgctcgtcgtagctccggaacacgtggccgccggaacctggccctgagctgggccgagggctgggcactgacgccgggggcgcaggctggcgctgcggcgtgggcggggcgctcctgtcctgtcggcgaccctcgtaggacatggggtgggtgcctggcttgctgttggttagcgcctcccagatggtgacctggtcatactcactgcccgcctcaagcaggctctgctgga

SEQ ID NO: 160825 - DNA, 1000 bp, Homo Sapiens
agattgatgtttatttgcatatgcattagaaaacctgaaaggcgtacagtgaaaaagcaaaaaacaagcaaaaccaagaaaacaacaacaaaactccaagccacaagcaatggcacctgcatggaatagttctgagtttggcaaaggacagcaacaagagagatttctcacagcatcttttgatactttttttcttttttttgagacggagtcccactctgttgaccaggctggagtgcagtggcgtgatctcggcttactgcaacctccgcctcccgggttcaagtgattctcctgcctcagcctcccgagtagctgggactacaagcgcgtgccaccacacccagttaattttttatttttcgtagagatggggtttaaccatgttggccagggtggtcttgaattcctgacctcaggtgatccacccaccgtggcctcccaaagtgctgggattacaggcgtaagccagtgcgcccggccgatacttttttttgttgagtcttgtgaatagaatacatattctagaataaaataaaaagcttaaaattaacaaaaaacaagtttattccacacctacccaatttcacatagacttgaaaacactgatcatataatacgtggttttttctattgaatatttactgttcatctaaagtacctcagaaaacacaaatatgaatcttacactaggatttgttgacatgaccacaaattgtgaaatttcaaagtcctctcaatagccttccaatcctagtaactcaggtacacctggattcctgacaactctatttctttgttttctttcatcacttaggttcatttctatgggttctgttattggcattttttttttctcatatctttgcaaaaccatcctttatggtgaaagtcatgaaggattcttcacaaatgcaggaaaatgcattgctaacaaagtgctaagtcagaagtgtcttgggacctgtttgaaaacaagattcggccgggcgcggtggct

SEQ ID NO: 160826 - DNA, 1000 bp, Homo Sapiens
tttttttttttttttttttttttaagacagagtcccactctcacccaagctggagtgcagtggcatgatcatcggtcactgcagcctcttaactcctgggctcaagtgatcttccctcgtcatctctcaagtagctgggattatacgtgtgcaccaccacagtcacttttttttttttttttttttttttttttgagacgagtctcgctctgtcaccaggctgaagtgcagtggtgcaatctcggctcactgcaacctccgcctccctgcaacctgcgcctcccaggttcaagcgattctcctgcctcagcctcccaagtagctgggactacaggcacgcaacaccatgcccggctaatttttgtatttttagtagagacggggtttcaccatgttggccaggatggtctcgatctcctgaccttgtgatctgcccgcctcagcctcccaaagtgctgggattacaggtgtgagccaccacgcccggcccaccacgataattttttttttgtagagacgagggtctcaccatgttgcccagactggtcttgaacttctgagttcaagcaatcttcctgcctcggcctcccaaagtgctggaattacagtagtgagccactgcacgtggcctcaatcccccactcccccgcttctttttttgagacagagtcttgccctgtcacccaggctggagtgcagtggcacaatctcggctcactgcaacctcctcctcctggctcaagtgattatcctgcctcagcctcccgagtagctgggactacaggcatgtgccaccatgcccagctaattttttgtattttcagtagagatggggtttcaccgtgttagccaggatggtctcgacctcctgacctcgtgatccgcccgcctcagcctctcaaagtgctgggattacaggcgtgagccaccgcgccctgccccaggccccctttttttaaggaccccagtccttgaattggggcccaccctactccaagat

SEQ ID NO: 160827 - DNA, 1000 bp, Homo Sapiens
ctttttttttgaagtgcaaattatttatttacatatttaaataattcttttcctcaactgaatacttactgtaatacagaatacaagtgcctttctctcctcaattagtgtcttgttttttgttctggtatttacatacataggaaaatatctttatattaattttaataagaagtcttcacttgtataattaaaggagactcagattcagaaacactgtcatgcccattaaaagtgccagcaaatggatgaaaatatcactgaaattcatatgacatattaaaacacattttctcacttgattaattatgtatgttgagactggaagaaaaaatgttatttactgcagaaactgttaataggcatactttaatataatgtataagcatatattttaaactcacacttgcataattattttattataaaaattaaaagtcaggaatggcaaatgtagttttcactggttctttgattttttaagttatgcttactttccaagctttatgctctattatttatagttgttttctgtcatattttctgtaaaaagtttattatcacttccagaacatgattggcattgattgttttttatgggaatctactcttccaaattcatttaaattgtagacttctcaccatgaattctttagtatttaataagatttagcaaatatttaataaggccttctcatattcataaagtgaatattatgtatgaattttctgatgtacaataagatttgacttctgggaaaatgctttcccacatctgttacattcatagggcttctctcctgtatgagttatctgatgtctgaggagatgggacttcttgatgaaggctttgccacattcaatacaactgtaaggtttctctcctgtatgaattctttggtgtgtaacaagcacggatgtgttgccaaaagctttgccacatatgatacactggtagggtttctctcctgtatgaaatctggaatgtttataaaaggat

SEQ ID NO: 160828 - DNA, 1000 bp, Homo Sapiens
tttttttttttttttttttttttttttttttttttttttttttttttttttttttttttttttttttttttttttttttttttttttttttttttttttaatattaataataagttttattaaaacagaaggagattctaagtagctgggttcttgccacatcaaaagataaaactaggtttcctctgatcactttgaactgcttatgagtgagcatcatagccagaaactaagtccaaatcaaaagcatctacaatagctgcatcggcctccactctgacaatgcctccgccactacacttaggctggggagaaacatgtgtctgggtaaaaagggagataagggaaacatctgttctcacaatatgggcttgttatcatagctcctttaagtaccgcagtgctggctccaagagcatattttctcccgaacggaatctgcgcaaggcctggtcgattttctgagggctcagggacaggttgtaaatgagattgtagttgtgaatgaggcgtctggctcgttccttctccagaactcctgtgttactcagatcacacaggtagagggcattttccagcttcctgaacctgtctatccacgtctcacattcctcagccttgttcttcacagctggattcacgaagggctgggagactggcctgatctttaaaggtttcagaggatctttgcaggctgaagtttcagcaggagagctttctggctgcagctcctcttctggagttttcatatgttcagttttgctttgagacatctcggggacttcaggctccattggaggggcaggggctttcttttcattcttccctgtaggcaaatcagataacaaatcagaagaagctctggtcagcatctcaacaaaattctgccattttatttcattttggtaacccaaatcttgatggttaagcaatgtttccagcaggctcagggtcagatataatccatgcttcccacatatagccctgaccttaggtagag

SEQ ID NO: 160829 - DNA, 1000 bp, Homo Sapiens
ttttttttttttttttggcactccacacttgattttattctgtgacactgagttgctgaaacccccccatttcctgggcagaggagggcagtagggcccagaaaaaaggggggccagcctcccaggaggactggggcctgctctgctggggtcactgctgaccaggcctcagccttccttccagccccaccctctcccctgcagtttgtttaaaagttgagctgcaaaaattaaataaaaataaaaacaaacccctgagctgttaaaaaccaaattaaaaacccccctccgtgtcaacaggtcctaaagccagtgtggcgggacaggcaggcggggcaggcggggcaggcggctggtggagctcagctggtgcttgagtcctcgggctcaccgtcagactcctcctcctccttctcagggcccaggtggccctgggtgcctggccgcttcaggatggcgctgtacttgagggctgtggactctgcctgcaggaccacctccaccaggctgaagatggtgatgacctgctgtgctggctcctgctccatgtcctcaggctcccagaccagcgtgagttccggcttcttgcccaccttctggaagtggtgggaccgcagggccagtgcgttgcagtagatgcgcttctgcacgccgtagcgcagcaccagcacgtcgaaggcttgcttcaggatgcccatcaccatggcttctgactccagggggccactctccttgaccagaacagcaaagaagagactggtactgagctcctgcacgcgcttggacgccatgcggcggtcgttacagtggtccgcctgtttctgcagggtatcaggcgccatgtctagtcgctccctatagcctaacgcggcagccaggaggctgtgcaccaggacgtcggcaaagcggcggatgggcgaggtgaagtgtgtgtacaggggcacattgagcgcgtagtgccggaactgcgctgggtcctgcagcagccccgagcagaagt

SEQ ID NO: 160830 - DNA, 1000 bp, Homo Sapiens
tttttttttttttttttttttttttttttcacaggccttcttttttattcaccgtctctcgaaacacatactcgtttaccacttcttcataacctgtgtccataaagagctgagccaggaagtcatcagtaaaaaaatatgatctggtcccatcttgtctaacataaaagttttctccaagtttgctgctggctttaaacctaagcatggcatgatcatacagtccgtagtcacgaaacaagacacttttgcctggttttaataccttgtaaatgttttgtaagacaaggtgcatcttatcaggatgaacagctgacagcacaaatatcaacataacaacatccacagactctggcggtacatgatccagaagatcatctttagtcagatcacactggaataccttgcatctttctgtatcatataaaggattttgcttaacatattcaatggctcttggagaaaaatcacaggcataggcaaagatattcggatcttcttctaaaagtgggaataaacagtttccaaccccacagccagcttcaagcattgttaacttttgatcttcaaactctctacatgatcttagctcctcaaactctctggtggtccagtgtctgtctttgaagaaattagtgctatttcttttgtaaaaaagatcccaatttttctgagcctcttgttccaatttctgctgtttaaaatcagacaccaaagtttggtctcttttcagtttctcctcttcttcagaggtgagaatccttgcctgcagccctttcctttgcaaagaagccatctctgaaactgacggtaacacttaacacagctgaagattctccatcaccaaataatatgaatccacgctaatggatcagatacatttcctgaggtgagtttcacgcctcaaacagcacagggggcccacagccagccccactgggcctcggaggcagaatacgggaagaaccgcgaaacaaccctaaaccaattctgaggacca

SEQ ID NO: 160831 - DNA, 1000 bp, Homo Sapiens
ttttttttttttttttttttttttttttttttttttgcagttatttcaattcaggttttattaaagttgtttctgaatattttttctcagtgatccttgttctgatgaatattacatttcatccttagttttgctcatttgattttgctttagtgtttaaagaacttttatttatcaaatcctttgccatgaatgagagcaccaaataacatatcaatacccaactgcctgattcctttacagcagtaagaaaagtcagtaaaacatttgtacagtccaagtactacaacaccaagatcccctcttcaagtgagagtgagccaaagcttccttagtatcatctcaagtcaatgtcttttcactataccattaagatgaaaataactaagagcactgacacaattttcttactctttccatctaaaaatgtgggtttcctgtggtgtggctaattttaaaaaccagaaaatggaaggaaaataagtcagtgaatgattagcttacaagttttttctactcatcattaaccagtcttcccttttccctagactttagacagccataaaaaggcaggaaaaacaatgtgcataataaaaaaataaaaataaatatctgagcacctactgtagtaggcatttaacacatttcacttaatcctcacaacgctgtgaaagaattattataatcattttacgaataaagaaacaggctcagaagggtgaaatcactggtgcctaaagtcctgcaggtgactgagctgagatttaagttcaagcctatgctgtaatatgctgctttggctccccaaagcccttcagcttgagattcttactactatagcttcatcttctaattctaaatttacacttttaagtctgcaaaactactgaataacaaaagaacctaaaattattctgaatttacttgccaacacgggaggtgtaatagaccattagaaaattcttctagcctggacaatatagtgagaccccgcctgtaa

SEQ ID NO: 160832 - DNA, 1000 bp, Homo Sapiens
tgtaggtattaaaagtttcttttgtgagatggcacataggcaggtttggtgtttcctaacactatgaatatcttaaattgcttttgaaagttttatccacaaagaaagaaaaataagggtttcctcacagttgaaaatagtttttgaaaaaaggttaagaggaaaaaaatctaaataccatccttgataaagaaatggaacttcaagttaaaaatacaaatttaaatgaagttttataaaatattaaaaactagctaaaagtacatgcataggcatttaatcaaggtaagaggaacagcagtggaacttaaatatgatacaatttatcaacaataaataaacatttcagtgcaaatagtgcagaaaaatttctcaaagatcatagcaatcattctaatcggtacaaaatcagtctcagttctgtatacaatctatataggatatctgtgaatttagccactgatgaaatgccagtttgcaaaccataaatataaaacagtgtttggttttgtgtcccattcctctcttggcagttcatgtttccaggaaaatctatagtggagcatgaaattggctgtgcattgctatcgcctgctgaagtttctcttccttggctcttctacagtggcaaattgttctcttttccatgaagctactgagaaaatcatctatttccatctttccctccaagaaatcttctgcaatattatcagattcttcctcagcttcatgtgcagctactttcaatcttgcctgaagggcacttgcactacagctctcactaagttcatgctgcctttgcatcttcctttcgaaagtggacttcatctgtgtaagtaattcatacttatctaaaacagtttgtcttttggcttccaagctgggctccaaaaggagattttttcttgctagttcctcaatactttttactaagtcatctttgtcggtaataatttgttttagttgaggcaaagtcagaaactgttctagtaatacctcc

SEQ ID NO: 160833 - DNA, 1000 bp, Homo Sapiens
ttttttttttttttttttttttttttttttttttttttttttttttttttttttttttttttttttgccatgaaattattttaatatgtttttctccatgactgaatatacaaatataatggaagtaatgtattcttctgctgtaaagatgggtggaatatatcaaaatccactcgctgaattttctttagaaagtcctctagagaaaccgtctgaagaaaagcaggaaatgctttcacaggaacagttttgtgaaaggacctagcatgctttaggtgcaagtgtgcttgactggcaatgtcatatattacatctctcacatttttatcttggttcctccgtagaaagtcctcttgtgaaacaccatgcagcatacaaatatccatgggaaggaacacctttcttctgctcccatgatatggtgttgctctcaagcaagtgacaatgccttgtgcttttccaatatgacttgcagcatgatctgcatgaagatcctttatacccaatatttctagtgttaagtaaagaagagagctctgtgtgttttcagcataattttccagttccttgatattacgatatgctttgtcatccagatttttttctctttcatcgacgattttcataagccatcttttagtcagattatgtcttttaacagcctagtgcccagacacttgtctctactaccattctccttaaaggaatcagggctctcgagaaatgggcgattccaaaggtgaggcaggggagagattcaaaaggatcctagaatatcttattgtgtcagaaaataagaaagtgctccaaaaaatgacggaagcgtgtcacaaggacatagcagccgctgtgaaggagtttccgctgtccaaagctgggacaaccttccatagttcaatggccacaggctgatgtggtggattgtcacagtatatatcttccacagtttttttccaaaactgcattcgcatcagtccaattgttttctcagagactgagt

SEQ ID NO: 160834 - DNA, 1000 bp, Homo Sapiens
attttcacattgtttaattttatgtacatttcacatatcataaatacacacaatacaaaaagctatacaaaaaccctactaattcaacatttaaaaaagggagagggagatactgcatttgatttctgacacttttctgtttaaataatacttaaattcagttttcaagaagacaacaaattgaaaatcattaatttttcagagggctttgtgttcacataaattcatcattcaggctgggcatggtggctcacacctgtaatcccagcaagttgggaggctgaggcaggtggatcacctgaggtcaggagttcaagaccagcctggccaacatggcaaaaccccatctctaaataaaaacaaaacaaaacataaataaattcatcattcaagtatatttttattgaagcaataaaccacttcactggctgtagagtcaaactgggtaagcctcaatattgagcaaaagtagagaactcttgctttcctcagcctagaatcagcttctaacacacgaaatgcagagcacaacagtgatttttaagctggcattattaagaccacagtatagggctgacaatgcacagcacaccctatattgtttgcctatagactcttgttaaaaatatcatactaaaaataataattagaaattttatttttcctaattttttattcaatttaaaaaataatacatctttttcattgtgcttggcaactggacatgacataatttaaacacacaatggagaaaatatatacataactgctaaaggattttgacattgtttaaattaattattttattattttggttcaacagttatcaatcacagtaaatataaataacaaaataatatcattcatcatacgatcatgtttttaaaaagtgaattgttgaggcacaaaaacattacgtgacttgcccaaggtcatgaagggaatgaggggcagacaacagcatgttttttctaacttaaacaactatactaacccctag

SEQ ID NO: 160835 - DNA, 1000 bp, Homo Sapiens
tttttttttttttttttttttttttttttacataaaagctgtttattgacattacgttcttcagagtaacaaacccccttggaggactctcctgccgggatgtccatgtccgcctttgctccgagctggggtctcatgtctgtggtgctggaatccagagccctgacggtaggggagtgattttgcaacacagttgcatttcacatcttctgacaggattccttgagggagggttggaccctggcacctggccagctccaggaagggtggccaggcccctcactgccccatcaagagtacttggtgttggagatcttcttccagagcagagtcttgaggtggctgagcaccagcgagtgatgggcctccacctggctggccagcccgctcagcgtggtacaggtgcgcagctgtgtgcccagctcctcgcggaggtcggcgggcgcgccaggcagcaggtagccccgtagcagtgcgcacaccttggccaggttgggctggatgaggtcgcccttgcactgcctcatgagcctgtcacacggggccctgcagtcgcgcccgtaggtgcagtcggtgctgtgctcgcagcggcggccctgcaggaagcggcgcacggtggcctcgggtgccacctgctgcaggtcggccatcttgaagtcgtaggtggctgtgtagcccacgttggccagtgtggtctcacacatgtagaaagtcccgtaagagccgtggaagagctcctccacgaactccagcaggccgatggcgatcttggcccgccaaggccacgcaggccccagccactgctggagagcaccctgcagggcaggcggcagcagtgggcgcaacaggggtggaagggcggccgcgtgccaggcgccatgcggcacgccctcggtgaggtagaggtccccacagtagcccagcagtctggaggcgtgctccttctcctgcagggacagcagcagcaggaactcgttacgctgcagcagggcccacacgg

SEQ ID NO: 160836 - DNA, 1000 bp, Homo Sapiens
ttttttttttttttttgtcatagtaaaacatttatttgttaaagtgatatagattattcaagattctacagtctgttaaatcatggatggcaatgtaagatggattgatacagaacttgatgccaatgtaggctttttttcttttttaaaaaaaaaatacttgtaggccagaagaaaaaaaaatttggttttaaaagaggatgaaccatggtctaatggagccagttccgccgtcatcagagactttcaccttggctcctgtagacaatttcttctatgacaccagttcaacaattagcctttgtgaattgaaacatttttgaattttatccagtaaaaatatcagtggcaaattttttcaggagagagaggagaagtggtgctcttcagattaactccagcctctgtgtttcctggacaatctggtcaacattagtcagcaaagcatttggctttatatgtgctcttttagacgtgggcccctctgtgacagaatcgggaggacggctagctaactgcaaggcagttgagttgttcctgttagtgttttgggattcaacatttgtgacggcttcattctgtggttctgtacttggctttgtgccagtctttcttttctgcttttgggacacagaagtgcttgaagtccaggaaggaggcaaagcagaggtagtggtagaggagtcctgactcgaacaagtttctgaagattgaatcacattgtcactggtagctttacaacactgggcattctcttcgtgtcccacagcttgtttggacacggactggggcagcgttacactacagccttgtatttgagccccgttagtttgggaataaacattgctaaccttggtgaccttgtgttgcccattattgttgcaaaccttataccggatcatcagaataatgatgaataccagcacagatgctacaatgattccaccaataataataatcatggtgcctcccaaaaactgggactgcatgaaatggcaac

SEQ ID NO: 160837 - DNA, 1000 bp, Homo Sapiens
ttttttttttttttttcggtatttttagtagagatggggtttcaccatattggccaggctggtcctgaactcctgaccttaagtgatccaccctcctcagccccccaaaccgctaggattacaggcgtgagccgccgcgcctggccttcataactgttgacatacaagcattacagtaaaaattagactggaaagactatgccttgatttcaactttaatcacaattaatttattctttctttaaaaaaaaaatgtaatcccagaactttgggaggccaagtcgggtggatcacccgaggtcaggaatcggagaccagcctggccaacacggtgaaacccgtctccagtaaaaatgcaattagccaggcatggtcgcgggcgcctgcaatcccagccactcaagaggctggggcaggagaatcgcccgaacccaggaggcggaggttgcagtgagccaagatcatgccattgcactctagcctgggcaacaagagcgaaactccatctcaaaaaaaaaaaagaggctgggtgcagtggctcacgcctgcaatcccagcacttcgggaggccgaggcgggaggatcacgaagtcaggagatcgagaccatcctggccaacacggcgaaacccccgtctctactaaaaatacaaaatattagttgggcgtggtggcgggtgcctgcaattccagccactcgggagactgaagcaggagaatggcgtgaacccaggaggcggagcctgcagtgagcgtagcttgggccactgcactccagcccaggcaacagagacagactctgtctcaaaaaaaaaaaaaaaaaaagaatcctccggcattatatctccagctactgtggcccaagaatatatctttatcaaaaaatacaaaatccagggaacatgcaaatatctgaagaagaaaaaaacactgcaatcactaatgcatacagtgaagagttggcccagttccagagtccgctatgtttgatagtttgtgca

SEQ ID NO: 160838 - DNA, 1000 bp, Homo Sapiens
cagttgcagttgaactttattcatccgttcacacctgggtccctcccggcccccacctaccctggccctgcctactcagggcttccaagattgggtgtcggggtggctttgcttatcctccagatgccttcttcccaggatgtgatccgtgccctccaggatctaagggatgaggactaaaggggtctgttcctcctccaggcagctggcatggaaccgtccgtctcagcggctgcttggtggtggcggtgtggatgggtgtggctctctgtttgctggggggtattctgccaggatgtataggaagccacccagggctgccactgctgtggctgtgttgtgggaggagcagccatctaggggagagagcccccatgagtgctgggtggcaagaaccttggccctttattcaacacagtctcattgaaagtgcttttcagccagacgcggtggctcacacctataatcccacactttgggagcctgaggtgggcggatctcttgagatcaggagttcgagaccagcatgagcaacatgatgaaaccctgtctctactaaaaaaatataaaaattagccaggtgtggtggcacgctcctgtagtcccagctactcgggaggatgaggcaagagaattgcttgaacccaggaggcaaaggttgcagtgagccgagattgcgccactgtactccagcctgagcaacagagcgagaatctggaaattgtttttctcgcctcttcactctcctcgaaaaatgctgctgatattgaatagctttagataattcttcatcttcagcatcaggctccccgaagcatccttcctgctgtttctgccagctgagaatggcctccagccaccggagcttgtagaagtcggagaagccgcccattccacagaacatgactggtccatctgtgtagagctccgtcactggggcagcctttgggggcaggaaactgtcacacagtggcaggtaaaatacaggatgcccagttac

SEQ ID NO: 160839 - DNA, 1000 bp, Homo Sapiens
ctattataaagagtctacaaattttcctttatttaaaaaaaaaaaccctgaatttgaaaaaggcaaccttatttatttacttctcctgtttccaaattcttgttactccaagagtacagacagttatttacctaaaatgcaaaacctccaaagagttcacacggtggctggcactcaggcacacacatgtcagtgctctactgggacacctggtacatgatatccctattaaagagtacacagtacctttaaagaggtcattaaacagaacacggacaaatttgccacgctcacatcctgaacaatacattttgtgaaaaacattcgctaatttaggttcttccaaccagaagaaaaaaaaaagccaagtctcccacaaagtgcccccaaatccacagctgagtgaaggtcataaagagttaaatgaatgtaaaccaggccctatcattcgtctcctccagaaaaagatgaaaagacatttctgatggccccaggtgctctcccacgaggagacagtctttcatttgaggttctgaagcggcctcacctcgaacccatgcgggatcttccaagagtgcaattcccacagctccacttgctcaaggaagtctcggtgcacagaaggaagcctgcagcctcccagtaccaagaaaccggcagggcaagtggcagaagccagctctcgggtgagagtccttactccctgttgcattcgttccccaaagttttcgaatttttaaaaagttcaaacaaggattcgaagcgcaggacagacccttcccctggatcccaacgccctttcggctcctccgcggcccccgccaggcagcgccggcgcccgcccgcgaggaggagggtcccgcaggtgggcggcctcctcaggccggggccttctgggacccccaagtgccgtgcaggacgccacgaagttgcgcccgagcccgcggggtccggggagccgctgcccgtgacagccgcgctggcttgggaggctcttcgg

SEQ ID NO: 160840 - DNA, 1000 bp, Homo Sapiens
cattggtacaaatgctttattgaaactaaatacataatacacacaatgagatgaagacaatatagaagtccgcatagtcatcataatcccgttccttggccggttgaggcagctcagtggctgagcccagtcaagccaacccgcagcttcactcacgacttcaagatttgatgctaattcttttggatttctacagttattaaataagtgtctgagtggactgtctttgttcctttgtgttttgagggctggctgggtaggagtgggggtggtttgtctgtggcagtgaatttttgccaggagaggaacattaaatgccaaaggtaggtggcagtatttcagtctctgccccagccgacaggcagagagaccttcacaaataataagacccaagaaagactgggcctcacctaggcttgtgttccaggaggtgctgccagtctcttcattacagtcaggctctgaggttggggaagtggaagtttccagcttttcatcctcatccctgagggctagaatcagtcagcactatctaaagagagatgtggctgtaaagtggtcatctgaaggtagatacgcctggatagttctggtccaatgcggcgagaagtggatgtcacaccttccccacggcgcacctgtatgtctgcgagcaaattctggcgttctttatccgaaaaacactgctgataagcctgtaccaggagctgtggggagggataggcattcacaactgcactggccatttccaggctgactcggttcagctgctgaatctgtctcctccagactagtgcgagtcccctgccagcaaggtccaccttcacccctccagcccagtcactctccagacagaaggagaaggtagtttcatctcggagcttcttgaagggcgcctcagccacagcctttgtgaatgcgcatgtgaagtcggccagctctttccagctctgcacaatttgagcctgggcttctgtgtgtagctgcagatccaccaatg

SEQ ID NO: 160841 - DNA, 1000 bp, Homo Sapiens
ttttttttttttttttttaccctgcatacaataaatatttattggataaataactaagcctgatacccttttcaatgcgttatacagactctatcatcacaccactaatctaagttctcagaagttaaacattacaagacttcagaacaacataggcgtctttggctccatttaacagaagaaggaccatagtgatcatttaatctctatgagtctgtcttatcttctggaaaaggggcctaacaccatttccttttgcaaaaaggtagctgccttgcttccagttctaccatcctctagcaacccatctttctcttatttgatgtctctgatcagctcctcttccagcacaaactggagaaaggggatcctttctgttttcttggaggcttctgaactcaattacaggtctgcattaaaaatgtatggagaaagctggtgattagtttgtacatatggacaagttcaaggcagtatggtctacttctgggaaggcctggattccatttgctcctgatggaaaaaccctagtcccagcagtgtttagaatgaactggagaaggcagatgggtaccagattcaggaagaggtactgatagaccaagaccagttctttctgttttaaagatgtgttatctcaatctcctccaatgctccctttggaaattcacagaagattagggctccccacagaaacagcagctggcctgggctggtcttctgactaactggagctgaatacaaaaagtctgatgggttgactgagtcggtgactgccaattggagcctgaagcccccaaagtcttctctagacttgatgatgaagcaccagttacagttctcccagctcgccttccattgcccgcaccatgacatacagctcggccagacccaccacagaggcgacgatcaatgcagctagcacccgcgaggccatttctgtgaagatatattggcttccaaggtaagtgcagacgaaggcagcaaccaccgtgacaat

SEQ ID NO: 160842 - DNA, 1000 bp, Homo Sapiens
ttttttttttttttttcaggctcgatggcatttattctgcaccctgaccaccctggcctcaactgaggttggggtttgatcctgggggagattttctcttgtttaccttcctggcttgtgagggctttgcccctgtctttttggcctggactgtgttctctctcttcctgggcgatgatgattccacaatatcctcgctggacagttctccctgcccccggccattgtaactgtcctcgctctccagctcttcccggctttctgggctggactcggacatcctggccagctgtcttgcgcttaatgatcggctcacgtctggcggggaaggctccaatttaaccgggcttttcttcttagtcaactggcctttcttggcttttttcttcagctttgccttctcatccatctcctccttgtctttctctttttcctttttcttctttaccttcttgatcaccttgctgccctgacccttccctgtggggctctcagagcgccagatggtgatgggcgctgtggagtcaggggtaccagtggccatgctggtgcctaggtcaggggaggcggtggcgggccccacctgtgtcgggatggggggcttgctttcctcctcctcctcttcctcttcttcatttagatcatctgccccacactcatggtagagtggatggtggatcactgccacagagacaggtctgtagcttttgcaccagccataccggaatcgctccacatgctcctcctccggtgtgagctcaaagcaaggggactcgatgacatgggagcaggttgggcccgcgccccgggagctgctgctatcctctgaagagtccttcagcctagaattacagttgcagtggttgacagagtgtaggtgcaggctgtggcggacacagtcagaggcgaaagggtagatgatgtgcccagtgcactgcttgtgtctccagcagcacttgtcaggctccttgcagtcaccgcggcatctgctctcatccca

SEQ ID NO: 160843 - DNA, 1000 bp, Homo Sapiens
atagattatgtatattataaaaaacacaataaaaaatagacattttaaagggatgagattaaaatatagaaagaaaattcccatatgtttttcctgctgccgctggggttgtgtgtccatctttggggacctctgagggaggccctggagccactgagaggggcggtggtcgccaggggtctggaagatggagtaaggaggcctggaggggccccagggaggcttcggggaggcaggggtaggggttacagctccgcgccgctggggaagcggaatctgcgggcggaggccggggcaccgtgctgtccagggcaaggggaacgcagtcccgcggcatccacgacggaggggcccggccgcggggcctggtggcccggggagccagggcatgggcatccggggcagaaggactgcgggcgcgaagcttgggaggcagggtacttggggcccggagagtcgctcgggcctggctccggcagcagtcgcgacaggtcctccaccaggtgccacttctcctgaacctgccacaccagctgcttccggagcctgtggatggccctggcattggcctgggtctgggagacgcacaccgtcaggacaaggctgagcatgatgaggagggggaagctgaaggcgtgggagcccaggtagtggagggcacgctggccaatgggcgggagcccaagggccaccagctccgggaccacttgccagggtgctgagtagttggtgaagaggccgcagtcccaggaggagtggatgctgctgaccacatagcccaggggcactgcagccagaagcaggcccaggaggagcactagctggaagaagaaggtggagctggaggcacggaagggccgcgaagatgccctggagttcttcaggagggtgtacttcttgatgtagaaggtgaggaagaggaagacgctattcagcaggggcagcagggggcagtagaagaggcccatccaggtgaccgtctgccccgccacgatgtcca

SEQ ID NO: 160844 - DNA, 1000 bp, Homo Sapiens
ttttttttttttttttttttttttttttttttttttttttttttgagacggagtctcgccctgtcaccaggctggagtgcagtggtgcaatctcggctcactgcaacctatgcctcccaggcccaacgaattctcctgcctcagcctcccaagcagctgggaccacaggcacccaccactatgcttgggtaatttttgtatttttagtaaagacagggtttcaccatattgtccagggtggtctcgaactcctgaccctgtaagccacccacctcagcctcccaaagtgctgggatcacaggcctgagccaaaacacccagctgagattcttcatatagctgattatcttgccatttctaacttacaagctttatccacatttcttaaccttttgtttcactaaatgggacaggaagttttaactcttgtatccatgaagcatcttagtaaaataacagatattccatttgcaaattatgctccccaaaaaacacaaacacatatgtaaaaaatgttataaagacattaagtgtccactcaataactttgattcaaactatcttcatgttcttcacttcacaagataaagctcttaaaatggactttgtgaggttccatgtatttggtcagtcatgagaggaagaataattcagagtgagaggaaacaagagagattctaggcagccctcagggaagctgaggaggtggctccctgcctccgggtccctcagaatgtcccatctccctgtcagtatcagtgtcccagataatcttcttctgactgggacatttcccaatttgggaacagtggttacttgccaaattcacatttacggccaaaactgtggctacagtgtcgacattcatgcaagtggggaaatgggcatgtggcccctgaaaaaagattctggattccataatctcaccttgctggcaagaaactaccatttcagcagaaagtgcaatgacagtgtctgcacagagactggagattatctc

SEQ ID NO: 160845 - DNA, 1000 bp, Homo Sapiens
ttttttttttttttttgtattttcattttatttaaccataagtcacacacttaatatttaacttattggtcctatccatttaaattaaattactaaacctcattttataagttactaaatctcatgttatataaataatagaaataacactttaagtcatctattgttcatctcatactaatcatcaattaagtctatccaaattcttccagaataaggagggaactaatagcatcatttgcaggttacagactgataaactgaagtgcttcttgggaaatatttaatataggtcttaagaagagagccagactcctgaattgcagcatgttccgtgtttcggattggataacagaacagggcctggggccagagttgaggcagggcacattttggtcccacaattagctgatcaacctcgtgactgaggttaacacataaatcacacctggataagcacctccacacatcctatgcaactctgtgggaatttttaatacagctagagagggattccagtatacaggttacaacaagtcaaaacatttcacagtagtctaaatagctgaagagtttaattatgcaaaaaaatccttctttcctttgagaacaacagcttctttccaaaatagctgctgtggttcttttacaaatataatataaaaggtgcctcatctctaacccagctttgaagtaatgctatccagaggcagccctattgacccgctttccttatggcaaagtggactcgcgtcctacctggccagtaatttagcacttagcaactgacaaaaaaaattgagcaaaaaatttagaaaaaggttttggtaacaggaatgtactttcctgctaagacagtttatgcatgtttttacaaaataaacttattttaaaataaatgtagaaggaatatttagctttcattttctgttagggatgaagaccttcactggttcactgaccttcctcttcttcctggagcactcagaactttgctgac

SEQ ID NO: 160846 - DNA, 1000 bp, Homo Sapiens
ttttttttttttttttttttttttttttttttttttattttttgtacttttattgaaaaggtacatttaaaaaaatacacagacattttaccatttacaggttgcagatatagatgctctaaaagagtccactctattttgttgttctatgataactcttgcccctgatatcacaaacattccagtcttgttgatatcggcttagaaaggggggcatgggagcatgacctgcaatatattcagcgaacagaaagacaaattgttcaattataaatttttttatcttctgtacattattgcattagggagccacaaaattatgtagcatcattacaaatgaaaacaggttaaaaatgaagaagatacttatatagaaatacatggattcattgtcttcttgcagaatgcacaagaggtgcaaaaatgtgcaatttaggaagctctttttctgtttgtatacgtttgcttagcaacacaaaccagtgaggaagctacaaaataagttaaacaaaaatagcaaacaggtagtaattatagctatgttatatggctttctatttcatttaaatatctccaaataaaatgtgaaataaagaaaatacattattttatcttttattctcttacagagaaaattcaaagctactttgcttcctaacatttacacagcaactaaaaatgtttaattcagacaagagatacagatctagtactacacaggatacagcagtacttgggtcgaaacagtacacaatccctgtcaacaacagtacaccaaaaagagaactttgtgatccgttggtaagatagtatccacaagtaagcacttgtgttcactgttttttgttccacactagaatacacccagttggataccagagttatttacagacatctgaggaagatcctagttttcaagtctgtcaggaaaatattccatattgttttaagccagatcatacccatggaaaaatagagaatggttttctttctttttctt

SEQ ID NO: 160847 - DNA, 1000 bp, Homo Sapiens
aatatacattcttgatttaatggaaatatttatatgcagtgaaacataaaacaaattattggttgtattgctatatttaaacaattttcttaactaaaatataattaagaatcccaaaattgtcctagacaactattttagaatcaaaaagtacatgatcacaagtacttaaaactataataaaattaatatttatctgtacatccataataaaagttactattttagtttgctaacaagaatgatttttaacaagggtgatctggtttaaatagctgatttcctatgtttccattattattttaaatatatattgacatttatgtttaaggaaacaacagagctgaaccagtgaagcacatttcatgataagcactaaagagaaaatatgagatcactaaaatccccaaattacttcataagggaaacagtctgagggatattattaaaaatcaatttaagtacatattggatttgtgaaaggcttatataagcgtaagttgaatttactttaaaaaaaaatacaaaaacaaacattctataattctccccaagagacttattcaaatacgagtttaagtaatagctgcagagcctggggtgagaaagctgggcatggtagtgcatgcacctgcagtcccagccctttgggaggcagaggtgggaggatcacttgagcccaggagtttgaggctgcagtgagctgtgattgcaatattgtactctagtctgggcaacagaatgagatcctgtctcaaaaaaaacatttttttttttagatggaaaagtttgcagaaagaggcactaatcaatcatcaaacgtaattttttttcccctgaaacacagcaatattagattgctgttcttttcgccttctgcttgcttcccatgaaggatgaagaggcagctgcaattgctgttttgtattttcaagtcttcctgatagcttcttattaaactgattcttgatctgaggctcattctgtggaaaatctaggg

SEQ ID NO: 160848 - DNA, 1000 bp, Homo Sapiens
tttttttttttttttttggctccttctagttttattgggttctcagaatgttcaaagtatccacctcacaccccgcgcagaaatcctccctttgcagccaggattatgactttacagagggaaaaagatatggcagctactagtggccagtgtacaggccccagaagatggcagaagttgttctaatgcttgttgaggatattgtaaggtcaaagaagcaacgccaacaatcccaccgttgtcacacccctgctgcagccccctttaggacaccatagaaattctacacagtaacacggggatgacaagaggccacatactccatgctggggcataaagtgggcacgacaatttttcactccttggtctgagtaagcgagctttgtggcatcaaatcattatgtttgtatgtttggaaggccacgccatctatcctcccacccagggcaggaatttctgctcccacttttgctttcctggaggtgaaataggaagaacaaggacccatgctcaagtccccaaagaatggcaggatgccctcagtggaggcagactgtatttaaatgcaattcacctctttggggtctaggaaaagccacccgtaggttcatttgctgggaaacacggtctgcgtgcctgaggcagtggacaccagggttgtggccttggcaagagctgactttctccggaggtctgtctgctgtccggagtggcagccacttcggtgggcaaataggacggtcatctctgggcccaaggacgctgcttcaggctgggacgccttgagggtggctggctgttcaggctttccggaggtgggatgggaggtgtaatgtttggtgggaggagggctgtaattctgaaatctcacggttttgacttgcttttcgatgccatttcttgagttttctggtttcaccaggatggatggtggggcagatgcgggcggttttggcagaggctcactcttgatggggatttctttgtcttccataatgag

SEQ ID NO: 160849 - DNA, 1000 bp, Homo Sapiens
ttttttttttttttttttaatttaatcagtaactttattataacaaaacctgtatattacccatttaaactcatgtgtaacattcagtgatgtgagctgtattaaacccaggtattagtgaaaatttgcattgtaaaacctggtaacagtagacatctatgggtggtcagtaattcaaggacaccttttattttaaacaattttatataattcatatcaatatgcaaaattaccataaaagatacaaggattaatacatatttacatttttagaaatagttactctgaggttgacagctgtcacttttctaaatatttacagaacaaactgaaagagacatttttcatagtcagaattgttcgttaagtcttgctttccagtaacaattatatagtgacttcttatgcccaacatgtgagagttaaagatcagtgggtgttgggcatggtggctcacacctgtaatcccagcagtttgggaggtggaggtgggaggaatgcgtgaactgaggagtatgagaccagctgggcaacatagtgagacctcatctctagaaaaaattttaaaaatcagccaggtatggtggtgcatacctgtggtggtgtagtcccagctgcttgggaggctggagtaagatcacttgagcccaggcagtgagcttaagctgcagtgagccatgactgttcccactgtactctagcctgggtgacagaatgagaccctctctccaaaacaaataaaaccagtgggcatttaaaattgcattctcttagtatctcaaaattctaggtaacaagctgtagccccaagtttaaatgtaatatcaatcagcaaacatgctctaagctactggactgtaagaaagatatttactgaacatttaagacatcttggtaacccaagatcttgagtcaaacccattcttagatgcaaaatattatcagacagacactgggaatatcttcatgctttgtcaagtcaattccacagaataaacaa

SEQ ID NO: 160850 - DNA, 1000 bp, Homo Sapiens
tttttttttttttttttttttttttttttttttttttttttttttttttttttttttttttttttttttttttttttttctgtatccagcaggctttattggctttttaggggagctgtgccgaggctggggggctgggggcaggggattaactctttccctggggcagcgctcctggctctgaacccatcaggggattttcttgggcaggggattaatgatcccactctcgatgtattcgaagactgtgtatgggtcctggtccccattgagggtgatggccgacccatacaactgctccaagtcagctgagttcctgtagaacaggtccattttcagcttgacctgctcttcagcatcctttgggttctgcaggaggcgagcctggatctccatggtgggaggtggcttgtacatgaggtggtacctttccccagtgactggatcaattcttctcagagtcagccgctccatgatggaatcaaatggcacattcaggaaaaacaccctgttgggattgtagcccaggcggttcagcaggtgtgcctggtcgaggtcccgcgggacgccgtgtagcacccagcctttctggatgcagtcctgctggtccaggcgctggctcagcaccttcatgaggaggctgtcaggaactgccatctccttttcaaagaagggctggatgagctcgccaaacgtggtcctatctgccacagcctctttcagcagttgcccacagcagacattgacaagcctgtatttctgggccaggagggcggcctgcagacttttcccactgcccacaggcccgagcagcagcaccctcggggtgaacggggcattagtacgatggttgctttggacataggtcagagcctggtagaagacgtccacacatggctggtcagcactgatgactttgaggattttggggtaggagggaatgaccctgacgatgttcctatgatactccagcagtttctgagccgtctccagctctgag

SEQ ID NO: 160851 - DNA, 1000 bp, Homo Sapiens
aatgctgcccgataaagtcaaagcaaggcttcctaaatgttagaccactacacctcagataaggaaaggccacctaacggacagatttaaacaaaaatcagacatttgtctatggaaggtatgattgaatttttgcgtaatgaccccgcaataggatctaaatcaagcccacaacaagaatgcacattcaagcatctgaatgcatgatctgttaatactgaattctatatggtgatttcactcagcaaagtactggtttattctatataagaccaggattaaaacacctacagtgggaactgtatcttacttaagtttgcattctggttctcagaatctcagaacataataggtgtaagcgtttgccaaactgagtccagcattcatgatttcaggaagctttgcatccgtgacaaaactgttgcctgagactcaggggagctttttctttggtctctaggcctgtgattaatttctggctaatcaagttaattgacacagatctgtcacagtttctcattgcagggtcaagagttctagaattcatctattccacagttaagccttctccaaagatttgtgcctgcacatcatcatcaagttaaaagaagaaagatcatctttgtgatgttgggtatttgcttatgttaactgccggaagcacatgcgcacgcacacacacgcaaacacacaatcacttcataagtggagaacagaagtgaaataatacgcaaagcctaaattacacagctcccaagttaactaaagaatgacactgaaaccataaggtaactccttctgattacacacaaacttattgcgtgatggcggaaagcaacttctatgacccaacaagtgtaaaccaaaagtgttctttaaccattagcttgacaaggtagctaaaaatagtgtggttaagactaccctgtttaattctgctcagtgtacctcatgacattaggaggcagtgaggaggagatggatatgctctctccaaaga

SEQ ID NO: 160852 - DNA, 1000 bp, Homo Sapiens
ttttttttttttttttatttttttttttttttttttttttttttttttttgcagtggggagcgatctggcattgaccatcaggtttctgggaacagagttaagtagaaggaagggagggcagcagttccttggacccagacactcagtgtggcaagttccatgtgtgctcaaggcattctggcttcacgggaattagaaaccctaggagcggatggggtcgtttttgaccgtctgtgtcttcctttttgcgctcagatccagttcgatgagacgcgttatcccagaagctgggctaactgacggtctggagccccagcgggtaatcatcaaaggccgggtttttgtaggccaccaggtgcgtgtcgcagcgctgcaggcccagcgtctggccccgcctgcagagacatgcggacagcaccacggtgctggcgagcaacaggccgctggcggcgcacagcccagagagcaggagcgcgaagctgggcttggtggtgaaggcggcgcacgggctcctccagcccgaagaccgtggctggctcaagcccgccctgttggccgccagcacgcacacgcggtaggtggtgcccggcgacagcccgtacagagggtgctgccgggccgtggcgtagatgacccccaccaccgactggttccccgcccagccctccgcagagtagcggatctggtacccatgcactaccgagttgggggcacaccagtggaccagcgccgacgtgtccgtggtctccgtcaccccctgcagcctgggcgggtctgggatggtgtcttccccgctgaggccggggcaccggcaccgccaccgcctctgcagctccgcgcacggggtctgcaggtgcttgcagggatggtaatcacaggggacgtcctggtgaggcgttcccacctcctccttcctcccttcctcctcctcactgtagtcgtccagcagcaagactggaatctcgccctcggaaagactcgggttgggggcttggggtg

SEQ ID NO: 160853 - DNA, 1000 bp, Homo Sapiens
tttttttttttttttcaagagggaaaagtttattgcaggttggggacacttgtaaaaggcaaaatctaacaatgagaacgaactatagggctcgccagtttagaagatgagcaggtaaaacaaatacacggattatgtacaattattaaaaagagcagggtggtggacaaaaaggaaaaactgccagcagccttccagaaggttcacagagtatatccagggagcaccttcccgcccagtcctggctgcctcgggcatgcctcctcctgtggttacctgccctgctccagatgaaatgcagatgaggaagcagctaccggggctcaggagcagagctcattctgctcggcaagtcgctggcttgcagggaagcagccgctgggtgccgcatgcgccaagcctctcattaaaaagcccagagggcaagttcacgggcatttcctaacacacgtgtgggaagagctgggggaaacccacaccgcccagggaagaagtggcttcttccatcgtctgtgtatgaatgaatactgagcattgtctctggggagcctggtgccccaagccgaatggctgagcccgccgccctgggcctctgagcgcttctcaaagcctgcaatccgtgtccaatgaccaaattgtcctctcaggcgctcacttcttctattagaaagccagtcctcttagcccccatatcacctctcacaggacacccacaaaaggacaaatgcaattctaagtctttcgtaaaaaaaaagagagagagagagagaaaagaaaagaaagggagtgttctgagtctacttaaataaggaaaaggccttggttcatccaaagtgtttccaaagtgtttctataaaaatgcatcgaatgctggaataaagttgcacattctcctggtgaagctgtaaaatgtccaacaaactgaaaatgacgggatgatctggaacgagtctctccgaacagctgttggcagaacggatgcagcctttgatgcctccag

SEQ ID NO: 160854 - DNA, 1000 bp, Homo Sapiens
cattttaaaaatcattttattgtcatttcatggttaaaaaaacatacatgacatgactataaagtaatgagacgagttctcaggtgtgggttggattactgagtctcattaatatatagtcacaatcctgacttgagcttggaagaaaaatatgccttcgctatatgattatcaattttgttacttaaaatttattgagtgccaacagagcactaggcacatatataacacagaattatacagtctctatgttgtagactatattatttacatagatttctcaaagataacattaaagcatgtatttacagaactttagacaaaaataacaatactgtaaatcagcaagtttctgtctagcaaggagcaccttttcatgaatgagagggttttgcagaacttattgtgcaaaagcactttaattccattacacagcaagtccatattattatatagttctataaagctataagaagaaaaacctaagtgggaagccatgatcagtttcattaggtcaaacgcatttaggaaattctctgctgagactgaagcttaaaaggctacagtcatatttacatattatagcagaaaagctagaactacagcatgcaattcaatgaggtggaagaatggtgaatatgaaaaccatttttctaaacctgcagtttgttctcttttctattaatttaattaccactgcagtttctgattttgagaagacattatctttcaaataaacgttgttgcacaaatttactttttaaaagagatttttggataagtacggtgaatagaaaattccccatatgatgtcaactaccaggtgcttgtaagtttgagggctctgaaggccatcctagggatacccacatgatttcagcggtgtctgttgggcagtgccagtcttggaaggtgggccaagcataaattccacaaccttataactaatattagatgaagtttctcaaacattcctttgagacatggcaggacagcgcca

SEQ ID NO: 160855 - DNA, 1000 bp, Homo Sapiens
gctggtagaaaggactttattcagaaattggtgccaggacgggagggagccatgcggacagtcgcgctgaagcctgagcccagtgctgccccggggtcagtcctgaccgctggaatgttgatttgcactgagcactgtctgttagatacaaaatctgaaaatgcgggcgtgggtcagcaaaacataatccatataaaagcctaaaaaaaagtgaactgcatttcgtggccaggacgccgacttcctctcatgttacatcgaagcggggcccggatgtctccggtgaatttatgtgggaaaacacatcttgacattaaaaatgcagcgatttgtcacaggtcacagttttcctagaaatgccactagctggctgctctaaagaatgactaattctaaaactcaaaagcacaaccctgggtcttgtgattggcaccgtgagagccccacggagctggggccgtgcccggggctctggtcacccagctgcagaggccaatgtggagctgactgcgcgggactcccatggccctggccaaggggctccacaccagctgcctggggtccaagaacctgagcaagggcaaggggccgtggaggcagcgcacttcctgtctctggcgaagcgtgagtgtgtggcgagctgtggaggcagggctgcgggcgcacatgcatggctgctggaggcggtgggcagtggcggtccctggggcatgagatgggtgggggcactctcagggacccccgccacagagcctctgtcttggagctgctctgagtgtcctttccaggaagcagggcctttgcccgggcatgaccacctcaccaagggctgttctaagctggggggccctgggccctgggggagcaggcccagcccaaggtgcctgctccagcagcaggccttgggcacctgggggtctgggctggggaagaggggcactgggcagggaaggggagagcggttctgggtctgggttgtggggggtgaacccaggcaggg

SEQ ID NO: 160856 - DNA, 1000 bp, Homo Sapiens
ttttttttttttttttttttacacattttcagacatcatcttgtttattacaaaacttaaaacaccttccaggcaagatccaaagcaattttatcctaacattgttcaccttcatctgtagagtcaaatgtatctgccagcttgtgttgacaagggggaatgcttcccatttggtcaaggttgagggacagtaaaggaatcttgtattctaatgagtacagcatcctttcattgtccaagccatccaccttaggctttgaggttcaagtccaggtctggagaagagaaagtttcatacccaaccttgtggtctttccttcggtagtacattcgtgtcagcacagtcattagaaaagtctccagtatgaggaggtggcaattcatcacttgagacctggttttagaggaatagggaggcgaacaagcaatctgcccaccgttggccaagactgagaagatggagggctgtagggcagtcaggatgaggagaacctggaacagagcaaatttggctcccatgttctgctcacccaggtgtagcctggcttgacgggaaatgatgcccagggtccagagagccagcagtgtggacacgccgaggaaagtgttgatccatagagctgtgctcccctcagaaatgtctgctgggtcatagatgccgtcggggatgagaaacaggcccaccagggtcagcgttatcttcaagaaggcgtattggaaagggcccaacatcagcagctgaagcttcttcctggtgagcagcagacgtggacagcaggggcagcagcagcagcaggggcctgtgtggaccatcatcggggtgtccctcagcgtcctcagcactgcctccttccccccaaagccttccaccatgaccagcatcagcaggtaaaagcacacggcataaaacgaggtgatggtcatttccaccagcaccagggaacgagggatccagagaccaaagcagcacagcacagacaccaccgtgggtgccgagctc

SEQ ID NO: 160857 - DNA, 1000 bp, Homo Sapiens
atttttacatatttattaaaacaagtttcctgagaagtttgactaggctatgttgttgttaacctagtttgcttaaaatgtacgaaaatgcaatcaaacttacatatcttttaaatattcgaaagtcagattttgtcctgattgccctatccaattagggcaaattagtgagggtttttttgttttttgttttgtttttctaacaatagtctgaaacataaaattaagtttgggtttaaaaacaattcttgaaactgtcataaacatatgatatctattgattaaacagtaataaaaagacacaaggtacaagaattgaggcttggctgttctggctgtatactaacttcatataccctgacagaataaactatctttttaaaaagtgctttgtacactgcacaattatagctttaccaaataaaaactcaatgacatgtcgctgaaatttgcttcttctagaatttgaaattatttaaaatactgcatgagaatatttttatcatattatataatatgacttcatcaacatgaagttccaggaccccagatgcctctctgagaagttcattatttgatagggttggatcaaatgtaaaggtccaggtgttcaaagatcttagatacctaaagagagaaaggggcaaatggaggctcttctgagagtcaaaatgttgatgagaaacaaactgaaagtagcacacataggcagaaaaatagacaagttatgattcagaaaacaattgtatgcaattttggcataaatctctgagagtcactgtgggccatgagttgaaaaggaacatgcaagagagcaaggaaaacacaaagcctcattcagatgtgctggtgagaatatgacagaaaatctgttgaagttgtgtaccatgaagtctgtcttttgtcaaagttctatgcagtcccaggatagcgtgatagcagtggttaaacacaaccagctagttatagctttcattgtatggaaagacctctctggtct

SEQ ID NO: 160858 - DNA, 1000 bp, Homo Sapiens
cctgaatttacaccaaagctaatttttaatgaaattggtttacagaagtaaaaaacaaaaattggaaagcaaagtaataaaacttagtttatataaacaggttgaatgatatatttatcaaatctcacagacatcaggcaaattatagcctggtgacaaaagtgttcatagtgaattagttactcttgtaatacttctataattagttcatcaggaatttcatccacttcactgttataactgagaagactgttctctgcagcttcagctaattcagcatcttcagtagcttctaaaaaataagcatcatcaatgccattatcccagacagcatcagcagatgcacctgttgacagcctgctaggtgatggtttatgaggattctgggtttcattgctcctagtttcatctgcttcatctgttgtaaactcttcttcctctttgaaaagaaacaggagacatacttcagcaggtaatgggaaacagtcagatttgaagttttctgctttacatacagggtcatgacatttttgataccaaacttcatttttcagatcaaccagaatcattatattattactcttatgggctcttccaatgttttcacaccaccgatatttacaaatatcataaaccagtaattcttctgggaaaaagtagttccaacgccgaattcctcctttaatgccatctttattcaccaaagaaagaacaaaatgatcaacttcaggatagggagaacactgaaaaccttcaatggtttctactgaagtgccgatactgttaaaatatccaactcctttttgtttattctgagatggctcacatgtaagaattcgtaaagtatctgagaacctgacattgctgaccaaagaagagagaaaatattgatattcgtcagaaacatcttttgactgtataggaaaaaatttgttatcttcagtaacctccaaagccacacgctttccaatttttgatgatttatatagccgaaagtttc

SEQ ID NO: 160859 - DNA, 1000 bp, Homo Sapiens
ttttttttttttttttttttttttttttttttttttttttttttttttttttttttttttttttttttgctataaaaacagacaatcagcgtgacatttaatggagttagttattattgcttctatttagtatcatcacagattactcatcgctgccatgaagtccataaaatgtgtgactacctgattcctgggcatctaggacagggtcttttaacctgtcaagtcagtttcattatggccaattttctagcagtggttggggatggggagaggagagctttgatttttttgtgtgtagaagaactttccataagcctgtttggctcatggacatattttacaatgtaacctccctcagtcactcagaggggatcaagaagggccccctaaaaccaggaggacagatctagttgggcagcaaaatctggctatttctagaaatgctccctctccctgcaactgagcagttgtcccctacaagccactaaagcccccaatctttacctgtgaacccatctcctgactctgtggaatgcctgcagaggcatggtagggaacaaccgttcagatgttgatgagccatgctaggcacgtctgtgtaaatcatggccatgcattgggatgaagaaactttactttggaatctgtttaatgtagactctttttttttttgagatggagtggagtgcagtggcgtgatttcagctcactgtaacctccaccttgcaagttgcagcgattctcatgcctcagcctcccgagtagctgggactacaggcatgtgccaccacacctggctaatttttgtattattagtagagatggggtttcactgtgttggccaggctggtcttgaactcctgacctcaggtgatccacctgccacagcctcccaaagtgctgggattacaggcttgagccagtgcacccggccgactctctaccagaaacttttcttccaatatgaaggaagcatggagtgtaggctacagtcact

SEQ ID NO: 160860 - DNA, 1000 bp, Homo Sapiens
ttttttttttttttttggagcttttctactctttctgcttctggggaactagttgcttcttgatcagaattccatgcaggttaggggttacgaagtagggtttttctgtggatccatcatttctttccagatcttcacagaagcagatgaaaattgtttcaacacacattgcatagacgctgaagaacccatgtgcaatcaggtaagacccaaaaatgactgtcagcaaaggtacccagtagtaatataaagatgctggtccttgtgcaatcactggcagtctttgtgtgaagaataggaaggccagaacacctatacttccagcaactagaagtttccccaggaataatacaaagtatgtaacttcatctgtaactgcaactttcaaaacatttctcatcagcagattgaaagcatcttttgctgacctgcagaagtttctgccatatattgcaatcataatataggcatttctgtttaaaaactttattgcattttccaaacaccagaagcagcatctcaggcagcactgtaggaatttagacaatgtgttctgggtacgtttaagacggtggtccaagtattctagtacaattttaaacatttgaattaatgcaataattaaagatccaaatgctagggatcctgtgtgatatcgtatggctcgtccaaatgcagtaaaaagtggatatcgtgggatgtcatcaggttttttcatggcccagtaataagtagcgaatgcaccagcaagggcgcactgacctaatgcaatgacgaagtttataagccagagaaagacaaataagttgtatacatggaaggtagggatgtactgatggtacaagctctttccaccatagaaagcaaagttacacagagccccagggcaagctttggcaatttcagttgtattaaaaatctctgggtcacaggtttgattttcatgtatacaatgcccccctggagctatgactttgtatacaggtacccccgatgtcgc

SEQ ID NO: 160861 - DNA, 1000 bp, Homo Sapiens
ttttttttttttttttgctaagcttttttttttaatactcttcactgcatgctctgtctatatgcatgcgtttgaataataaatattaaatatgggggacgcacagaaccataaaattaaaaatgaaaccaaactgaacattaaacaatagtacatggtagctggagaaatgaataagggcaaaaaataaatttgaggtaacaatagtggcccaacaccactgatctgaaatatctgtaaaaattcaactaagtgtttggagattcaagtaacaaaccatctgctccaacttggtcagacttcccagagtccctgctgagtttcagtccatgagccggcactcacatagctccttgtaaatcctcttccgcactcggggcatgtcttcttgtgaaaactggaaaggctgctctaaggcgaggcacttgcagtactggagcacaaagactccacagtcactgtcgtttttctgttgtggaatacacttcgtaacagcagtctgccaaccctgaagaaattcaggtctatttttttctctggcttcagtcagcaaatactttcttatattctctacacaaaacttaaaatgaatgccttgggaatcataaaatgaaataattcgattagagagtgtcacagtaatgagagaccagtggacttccaggtgaataggaatcaacagaagactctttttaaacaaatccacctttttagtccatctttttactccattatatcctttggttaccagctgtctatgaaaaaagctgttgaagaagtgaactttgtctgggactgcatccattatcagctcaccatacatattaatgacctggtcattcagccagttctgaccatccagagtcgccaggtcgtccatatccagcatgtgtttattatagaagatacggaagttacatttttgatgtctggcccgatagtttgttatttccctattgataaatggttttctattagaaaagtcttcattaaagacatc

SEQ ID NO: 160862 - DNA, 1000 bp, Homo Sapiens
tttttttttttttttttttttttgggttaaattaaagcacatctcatttattcactgcagtttaaacacattcatgtttcacaaattggtatttattgattcaacaatcataaaaagattacatatttccttttgacaactagactatgttagaattagagaataaatcatacagccataaactgtaatttatttaaggaagtgtaattcatgtgatacatgggaatcaaaattgctcacaacaaagctatcagtgattgtcttaatccttaccgtttaaaaaatatcttttgtatagaatgatatttaggaaatagagatttaatgaaatcttgctttagtaaagaaatctcataaggaagtatatgcctttgatcacaagctaccggtactcaacgttagtgttgaaaaaggccaaattttaaaataagattaatgtgattttctattgaggattcagaaaaatgttgttaaaagaatgttgagaaatgtctgaactcagaaatgtctgactggaaactatttcagtagtggattgattttatgcatcttactaactataggatgaaaaattcagatgtatatagtctttaagagccacatctgagcactctacatctgacaatgctttgaagacaacaattctgagaatgacataatttttacaaagcttttaaaaatatattttaaaataaactacggccggacacggtggctcacgcctgtaatcccagcactttgggaggtggaggggggcggatcacaaggtcaggagatagagaccatcctggctaacacggtgaaaccccgtctctactaaaaatactaaaaattagccgggtgtggcgatgtgtgcctgtagtcccagctgctggggaggctgaggcaggagaatggcgtgaacccaggaggcggagcttgcagtgagccgacatcgcgccactgcactccagcctgggtgacagagcgagactccgcctcaaaaaaaaaaaataaataa

SEQ ID NO: 160863 - DNA, 1000 bp, Homo Sapiens
tttttttttttttttttttttaaaatttaagccacatggtttatttccttctgtggtgtggatgagacaagccatctcatctaccaggcctggtgaacaccaggctgacagtgtctccttgtcccctggagacgaagcccaggtcctgtggtaaccttctgtggtagccttgtccttgggctatgggggtggggaagggagtgctgagaggcacagggaggtcccaaactgccactgctgtgcccctgtcgatgctgactgtggtggtgcctcaggagtgggctggcggcagctctcccctgcaacctcccctccattgggagatggtagggggtggggggcggggccaatgctgacttcatattacagacaaggaaaatgagggtttccaggaagcagggggacaatgcctggcctagacccaggacttcagggagcctggggagctggaagggcctgatgaaccttatctggttcaacactctagtttccaaataggaaacctgagttccatggatgtggcaacagatgacaaaggacagagctgatcttggggccaggagacctgcggccaggccactaccctgctgtgaggccttggcctggtatcggcacctctgtggaatgccagagtcagactcttccattctggaggattccgggctctctgaccttcccgaggcccgagggtcagggcaggcctcgaacctgagtctccaatgaggccaggatttccccaatgagcagagaaatgcttagatgcacaaggtgggtgtcctggaagggtgacagggctcagggagctgaaggacacacacccctgacgtcagcccggtgtcttttagaaagaaagcactggggaaagtgtgggagagatgtccctggggacacttcactcagatgccggagtatgtgtagatgtggtgagggagggcagctgggatggggctggcccctgatgaacaaggtgggggtggggagaggctgggcccagagggaa

SEQ ID NO: 160864 - DNA, 1000 bp, Homo Sapiens
tttttttttttttttttttttttttttttttttttttttttttttttttttttttttttttttttaaggaaaaatagctttatttttaaaagaaataaattctctatttaaagcatacatgagatagtatctttcatttagtcctaagcttgattatttatgctcattgtaatattccagtgacattctggacataaatttcaagtatatcaccatatacttattgttaaatatcaaacaaagctactgactgtgagggaaaaatttcagtgattttttttgtttgtttttttgttacttaccctgagatactcatcccacagtatatctgagatttagctgaacatttacaaattttaacaaattttttttctttccattgcatgcatcgatatgccaaattctgcacttcaatccaggtaaaataatgatagtgtttgtaaaccagatagtgaaaaccagtgtgttttctaatactgcccatgatagacagagtgaaatcacagcataaacagtagccaggaacctatactgcaaacatttggcttcaagtatcttgcaacaaatagctactaatatgaccatacacggcacatagaacaccacagtcctggattgtagcatgcctgtaaaacccattaaagcatttttttctcaaactttttgttcattattaccctccttcccaattacagaaattaaattcaaattacattaaatagttttaactacaaatttcttcccaatgagataaattaatactaaggaataagattttgttggataggatgatattggaagtccacaagccatatctaatattttttcaccccaagaaccaatttttgtccccaattgagaatgtaatgcttaaagttgattaaataaattaaatagcctttaacattattagaaaaaaacctagtgggtaacaatggaggttgagatagttgacttctagatcatcttttttccatacttgctgtatgaacagagaata

SEQ ID NO: 160865 - DNA, 1000 bp, Homo Sapiens
tttttttttttttttttttttaggtttcagggcacagtttattaaaaaattttaagtaactgcaagtcccacccccgattccagtatctgtcccctccatatctcaacagaggggctgtctatcatatgtgggtgggatgggaaaggaagaggtatggtcctactatgcaagttactctccagccttcagcttgtgctgtcccaaacctgagtccctctgaccaaggtaagttgttcagagagcagtggtgccaccctgacagcactttaggacagtgccatctcctgagatcactagtcacattccagtcattgtgaccaatatattagttatcagtggtggtcaaaggtagaccagaggcacaggctgttgagggaagaccctctattaaagaaggttctaagaatgaaacatggaatgctcaacttgttaaagtgctcagctacaacattaaaaaagtgtcgggaaggtgtctattggtgagaaagcaaggtacaatctgaggggctcctggaaagatacaattttaaaagtacacaaaaggacttctgcttaaatcattccagcaatgagagaaaaaagcttagagcttagcctctgaattacttaagctgtaaatcaaatgtatctctaggtggagaccaactccttcaattcctcatggagacggaataaaacatttaccactgtcttttgctctaactcttctctcactaaataattgaaaatctggtttccttaatggacatcaccaccacaaaaatgtccaccatgggcaagtgatcaacttaagtatgaatggcctataaaccactttcctgcagggttggctagccaaaacctggagtgggacgagaaatttgagtttccacatctgccaggctgagaggcccatatctaagaacaagaggtccataatgtatctattctcttggcatgattacaagatccatgactggtgtgccatggcagtgagggaaaagtatccatcagcagcag

SEQ ID NO: 160866 - DNA, 1000 bp, Homo Sapiens
ttttttttttttttttttttttttttttttaccagtatagaaatttatttgaattcaaaataatatggctatatttataataatataataattatctaaagcaaatatcatcattggctctgaaatgcatctaaagatgtcattcttaagtcaaaaaatacgtagtaagaatgaacaagaaagaaaaaaatataaaaacaagtctgctgagtgtcgggagttggtgagggatatcctaccatattgtgacggagtccaaatagaaaacatgcagcaacagttctcctgctttatcagctccctggaaaataaaccagtaaccctggtagtgcagtaaccatttggttaacaggacaaacttcctgatggacacagatagtaattcactgcatttcccttctctaacttctctcttcacaccaattccttttctttcctttaagatgggtttcatcctgttgacaaaagatttggttttatttgtaaagtaaagcagataatatcctgattgaagtattcaatgatttagttgaggatgcttggggatcaaactttgtaaaaaggtcaattaagctagttagcagagactatcagtggcttgcagaaaaaaaattcggataatatgtttgttaaaaagacaaaaagaataagcggtgaaaaatcctagggattactgtgacctagacaatcaaaagcagataggtgacctttgattaaatccatttacttgtggagtgagctaaaaggaggctccaagacagagtttggttcccaacagtgtccgtggccaaagggcacactcagaaggtctcctcctctcgtaggaactggaacacggatgagaagtctttctttgagtagccctttgcacacatcatcctgtagatctgatgggccagactgccaagaaggattgggctctttgtgctggtagcagagtcttgtgccaatcccagatccttagccatgagtgttgttccaaatccaccctgatagttat

SEQ ID NO: 160867 - DNA, 1000 bp, Homo Sapiens
gaaacaaacctgcttcctgcagcgaagttacaaaaagccgtttaaaaaaaccttcctaattgaaatctagtgtccacaagtaggtaaaatcatcacttatcagatttttttctttttaaacaaaaacttcagctcagttattggagttgattgtcttaacaaaaatagactccggaaagttgcctccgttccgccctgagggaggcgcggcgctttgctcacacgaaggaggagaagccggtgagcggagttcgcgcgccggggccagcgggggtgtagacgccgcccgcgctctgcgtggtgatgaccgggtgcagctgcgcgcccgcctcggagcccgccaccgcctcgtacctgtgcggcgcaggtgcgcggccctgggccctgcgcttccatgagttgtagtaggtggggtcgctcatgtagtggttcacgaaggagtgcttgggcagcgcgtcctcgtagtcagagtccgtggcctcagattctgatgcatctgccgacttctccttgaggctcacgctctcggtcagcacggcgccgttgtacttgttgcagatgtcctcgtctgagtagtgcaggccgccggggctaggccggggtggggacctggtcccgttcttcttggagaaggtgctcttgacattgaggtggcggctgctgagctccagggcagcaaatcctccgttgtccagggtcacagactcctccatggtggagatcccctttcctgtgctgcagttcttatacttcttattctgcccgtgcaggacgagggcgaacaccaccagcaggatgacgatcaggctggacagagccatcaccaggaggaaccaccactcctcgtagaatggggcttccacttgagctgacacagccgtggaggggttgctgggctccccgtagcccgcctcattcacagccaccacccggaactcgtaagtcactccttgccggagcttatccaggctgagggtgtaggatgtggcgctccgcggga

SEQ ID NO: 160868 - DNA, 1000 bp, Homo Sapiens
agtgttgtaattcacttttattttttttttctgagatggagtcttgctttgtcacccaggctagagtgcagtggcacaatctcaactcactgtaacctccacctctcaggtttaagcagttctccctacctcagcctcccaagtagctgggattacatgtgcccaccaccacaccaagctaatttttgtattttttagtagagacagggttttgccatctaggccaggctgatcttgaactcctgaccttaggtgatctgcccaccttggcaaagtgctggcattacaggcatgagccatcatgccctgcctgtagttcacttttaagtatattttttaaaagtaaaaatctgaagcagctgccacccaagtgtagaatagataaattgtgatataatcatagaatgaaaccagacataaccatgaagagaactgaactactgctagacaggacaacgtggatgaatctcacatgcaggatgctgatccggacaccacaagaaaaaacaaaagaaggtgcctactgagttttcttctttccagatgaccaactcttaacttactcatctgtttttttcactgttctgcttcttttgaagaagatttgaggtgacttacaaaggtgtatggcatatttataactgaagaaatctgggtgatgttaaaacgagggcaggaaaataaggtggaaaccagatgtaaggatagtcttcactatttatgtcaggaattcctacaaactttctatggtgaacagaatagagcttcctagcagtcaatgcaaagaagaaacacaacaattccacaccccaaagttaacagtcttgcttatcagaagcacaggtagttctgaaatctgatagaaaatgttcctgtatcatttcagaacacgcaactatgtgatcaaacccctttctatttgtttaaaaatttgtcaaacatcccatgtttgaccctggatgtctgaatcccctcagcccacattttcccccctacacca

SEQ ID NO: 160869 - DNA, 1000 bp, Homo Sapiens
tttaagaattttaagtacattttattaacaatgtatccctttgataagattatgcttcaggaggcttttaatgcccttgacataaactatacacattatacaaaaacaagaaaatcacaacaaaaaaaatcaaggtgagcaaaaccatttggggacaaatcttatttaaattatacacaactcaatgaaatattcttacagaaaaaatataaatactttttctttctatgttacagttatacaatataaatcagatttcaatgtctgttcagtgacctacaaacaccagaacctccaaatatgtagcagcgtattactaaataaaaaagaagaaactcatgtggttagagagcattaagtctgagatttttttcacaattccttaccacttttcaaaactagtttacaccatttgttttacaatgcagctttagggtttctgacaggtatttttgtaacaattacctataaaatttttttcactccccctctctgccccaagactttgcattttgtgctaaatcaaccaagtagcaaaattgaaaggtatgctttttttggcataaattatatttttgaaattaaatattctataaagaaagtaaaacaaaatgtgcaatttatgcatgctgtggtgcagctatccgatacttacattacaaaaatactccaaacaggaaaaaagtccacattctgtgagtcatataaacctactaggaatgaaaaataccctggaacttggaactaaaagaagaaaagaatgctcctagaaagattctcacagatttcagtgttctttgataagcactgctattaatttcactggtatgcttttaaatgagattctcactgtaatgacactcttgagattaagatagtaacagtgtattttgttaatgcagagacaatggagacttcctaacttacattttggaaaatctgaaatgttggttcattccaaatagctcctctaacaaaagtctctcaattttaccttttc

SEQ ID NO: 160870 - DNA, 958 bp, Homo Sapiens
tttttttttttttttttttttttttttttttttttttttttttttttttttttttttttttttttttttttttctttctaacttctttattaactttattgttctaatttgccttccagctacagggctcatttattattctaatttgctctgtctacggaatttatttaaatttagcaaattattaggaaattaacatgttggtacttaagtcttccttctggaaatgtggtcaaaaatgacagcttgtatgtagagttctgtcaggatagtgattctagtagagttgtcacctggctgcgcctttgggtccacattaagaatttttctgtctcttttgtatctgaaaagtaagccttctggattatcggcaatcacttgatagttgggacttgaattactaacagcaatatcagcgtcccagttgtaaaagcttatatctgtaggccttggaagaagtcttttttttccagtaaagtagacttcaaaatcttccgtctttagcctgtgggcatagtcgatgtatcctgatatctcttgcccatgagaatttctgtcacgaataaagatcacggaactcagttttccactgcgattgtcttcttctctcattgccagggccgtcagaaaattatcttgtaggtctttaccagcacttgttagcgtcttttgctgagctctttcagccagtcttgcaatctctatagccgctttccttgcttcaaaatcttcccttttcactctctctccagtccctcggtagcctagctccaccaactggcgggccagggtttcatcctccaggtagtacaagtccacagtagtgatctgcgagtccaggaaatcttcataggcgttgaattgagtgacaatattgtccaaggccttcagcccctcttcctgatccattgcggtatcctcggccgaagcgtccctagcaacggaagcaggagggcag

SEQ ID NO: 160871 - DNA, 1000 bp, Homo Sapiens
ggaggcatgtactttattgagtagagacacatacacagacatataatttctgtaactaatacattcttaaatgtagctggctgtaaaagcacatgaacaagattactactgagacttctttgtatctcctggttgcaaacctctctcagaattatgaatctttccaaacccttaattatacaagtcaaaacaaaaagtttcaaagaagaaaaggccattttaatttgaaagccacatttcgccacaagaaacaaaattaagaaaacacaccattatatggcataaaatgtgtggagtatacattctagtgtcatttttcccattcagattttttcttgaagtccattaaagtgacatactgggtccaatgtgggccccctattgtttcagaatgctatggtttttgtttgcgcctggttttattaaagctgggcaaacacaggagcaaacaaagaaaactcccaagatccaatagaaaaaaaattagcaagaacattgaaaaccaaccacctgcacgcgagacataggattcattcagctggaaagccactccatggtctggagtgactacagcatgaagattttaaggtgtgacacgaaagagtccttgctagattcagttgcccatgtatacacgaatatgcataagagaacagaaatcattactgactgttttgacttccttcctcaaccaaacttactactttaaccccagaagaataatgtggggcaatgcatttctgcaggtggcaaagcttaacaacaattttttaaaggcttcttgatactgctttccaacagagaaactctggagatggggaacctcctgaatttcttctctgtctcaaaaaagacagggagatatacagtgcaagttgagtatatgttgaactagagtttgggtaaatgtctagaatattttacaggaaaagacatctaaatgtttatgtgctccaactttgggaataagaatggttataaagcgaattgccgagccagt

SEQ ID NO: 160872 - DNA, 1000 bp, Homo Sapiens
agagtgacacttgtttattcacggaagataagtatagattgttttctcatgggagcctgagaagcatcttcagggagggagtcggggagtaggcccaaagaattgacttatttggcaatttcagcaaggacccggagctgtttcttgatccttggctgccagggccctatgacctgtggcctatgttttcgtggtttcgagcagcacggtgggaaagcaggcgttttcttttggcctactttggtgatggactttgcaataaacaaggggttcagctttgcaagtcgaaagtcttgaatagttaactcttctgggttctcaggctctttctggaaccttgtgggctctgccttcacattggtcttaggtgcctcatatacagagagaaccttgtttttcagcttgttttggatccagggatcaattgaggcacaaaggattaatgtttcttgtagactcttcttcacagcctggtggttttctgcatctagtaagtccaggagcaagtggaacacttgtggactgcggatccccaggacacccaaagagatgactgcttcctggcgtgcagtggcatctgggttcatcagttgtgcctccaccaagttcatcatcgtaggcttcaacttgagctcttccacagtttgagccacagcctgcctcacagcaaggaagggttcattatgcgtcttcctcctgagcaggttaaatgtgagttcctctagcccctgtgcctggatctgttccagcccaatggtcttgagcatttgggtggcttcaaagcggtcctcaaggacactggaagaacacagctggtctaggatggccttgatgactggggctgagtgcacgtgcatcaccttgaccagcatcctaagtgccttcatccgctgggtcttgagtccttggcacaggcactgcaacaagaactcttggaccatgttgctgcaaggcctcaggaaacccaggcacagggctgcctccagagatgcttcactgg

SEQ ID NO: 160873 - DNA, 1000 bp, Homo Sapiens
cattatatgtctcttgtatgttttgaaactcttgtatttatgatatagcttatatgatttttttgccttggtatacattttaaaatatgaatttaaaaaatttttgtaaaaataaaattcacaaaattgttttgaaaaacatttttggattgtttcattctttgcttgtcatttatctgttgattagaccactaaagtgaaggattcaagctaaatacatcaacctttctatttaggctttatcagctatatgtaaattcaattctatcaaaattttctgagtgcctcctcagtgtgtctctctgatggttcctgcccggtatggctggcatgaagaagatccacggacttgcgaatgctaacgcggggcttggggatgggtttggagggtttgttttcaaagctttctggaagtgtggaggagtgtcccccttttcttgcttgtagtgctagctggtaagcgacttcgaatgcctgtcccagggttaggatgatttcataggctaaattcacatcaaaggcagtaaacacatgacagtagtggtgattagacttcaaatcttttgtgatataggcaaatgttgagaggtcttctgggtcctgggcagcacaggagatattacgaatttcatgctcagcaattatgttcttatttgttgcatcaataaatttgactcctttatatgagacagaaagaataatagtagggaccttcttcatttgctctgtagacttctgacagttagcccgcatttttgcacaagcatcttgggttgattctgtccccctaagctcttttatcagcatagaacctaaataaaaagctttgtaatcacacgactggaagataagcttttctgggtgatgctgccagtactgtaccggggtagaggctgtggcttcattcggaggtcgcaaggtaatggaaggttctccccagtctcctgtctgagccatctgcctctccagttttgatcggggaatatcatcaaagtagttt

SEQ ID NO: 160874 - DNA, 1000 bp, Homo Sapiens
gtttgaaaggctctttaatagcaagcgaatggtaattacatggtcggatgaggtcctcactctcaggggagggaggagggagcagaggtggacagggtgcagtataggatttacactgtttgaagcatctaacgaagggcaacagtttttggcaacccaattcacagttttgtaatttacaagagatttctttgaaaggaaataggaaggcaaagaaagcacacataccctaccggcaacacttctttgcctaaaaaaaaaaaaaacaacaaccaaaaaacaaaaacccaacaactattccttgcttttgcttcttgtgtagatgactaaattttgctctcatgctcaaattaagactggatcacggatagtgaagatctgccctagcattgaagatttacttcctcctcttcagagctgacatttgtactgcgcactactcttatctttatctgcctaggtgtcagaaggggcttagtaaaaaatgaaacttgagaaacaaaacaaaacagaaaaacagggaaaggcagtttacaaagaacagactgtcagctttctgtctggtatcaaacaacttgaatacagctctaagtaaattaaaacatttatttttatgtggcctggcatctacttttaatcgcttgtgcctattcagccttatagtgctttaaatggggtttctaacatgaaatgctcatgggtactatattttcataatccagatttaaataaaaatataaaagacaacatattatgttaaataatatgttgtcttttatatttgcccagtgagcagaagctatagatattttaccatggacacccattgccatggagaccacaggctaccagcattctggcaggtttcagaattactctctataaaatctaaaagacttcagcttcttgtgcatacctgttatcactaaactgggagaagtgactgggtctttatgaaaaaggatcagtttttaattcaaagaaattttaggcttctccg

SEQ ID NO: 160875 - DNA, 1000 bp, Homo Sapiens
gaatgaagtcagtgtccaggcaaagctgggggcggcaggaagcccagagcgcaaggggcagtcagagctggcgggcagcttggggtctttggcctcaatcggaagtcactgggggtgaggtctggcccagagcctctccgcactgacacctgaagagggggaagatcagagtcccacattcttacagaccccaggcaattcatcatgattaaaaaccatatcatgaaattgacaaaaataaaaataataatacaagaaggatagaaggaaatgtgatcacgttgacccgtggatcattgttctccccagaacctggaaacacagatatgacccccccaaccctcctcacccctgattccccaaaataaagccaagagaggcagagaaagggataatgaggtaaccaagtattgagaaccccaagagaaatcctgagagaaggaggagggggccagggaccacctcccagaggtcactgagctgagaccaccccagagagcccccagattgggagcaggcagaggggtgagggctgaggtaggcccgaggtgggcagggggtacatagaggagagaggggcccctctcctggcgcccccatcctgtgcgttggctgccggcgtggagtgtggttgaggtcctttctgggggaggagaaggcagatggggagaggagccggctcagtcagcctgggctgagcctgcccttggctggaaggggcccccgggctgggtagtgtcctcgtctgagtacggagagagcagtgaggggcccaggcccaggggctcattcaggttcaggagtggggtgctggggtcctgcaggctccctggggctggtcctcctgtcagaaggaaactcaggctgagaggaaagagcagaaagttttcgtgttctgggctgggggaccttttgggaggtctcactcccagcagctccactccctcgtcctcgtcctctgagctctgggccagggtcctcttccgagccccagccatgg

SEQ ID NO: 160876 - DNA, 1000 bp, Homo Sapiens
tttttttttttttttttttttttttgacgctgagtgtatttatttatctacgcgccctggagaccggcccctaaatttaaatatccagcacggggccttggccctcctggccgtgggtggttattgggacgggtcctggagcccttccagggcagaggaacccagagcccggaggtgggatgcccctgagccagcagctgccgatagcaacaaaaggtgaggaggagatgggagccaggcactcatcccaatcccagagacgccaagcggaagggaagatgcttcgggccccaccgcaaggctgagggttggccaagctgggggtgcacacatgtggaagaactggaggcccagtgccatgagcagaggctgtaccctagatgcccgccccagtgccagccaacccaagacaggagaaagagtttggcagtttcgcctctgaggaatacatgcctggccctcctgtgaggtgaggcggtaggggggaaggcgcaggctccgaagtctgagggcttgccggagggggagtttctgagccttttgcatgggtgcatgccccctgccccccagcccttcagaggctgatgtggaaggcatcctgcagccactggtcacgggcattgtgcgtctggggcacagtaaggggtggcgggtcaggaggcaggctggcatcgggaggctcctcgtcgtcagacaggcccgcatccggtgggtaggagctgtccgaatggagggaggatgacaggtcctggcagaagctcaggtcttggcacaggtgtttgtagtcctggattgactcgtacaggccccacagcatctccttgcgcagcgcggccagcgctgagtcgaggttgacaggacgacgcgggccggctgcgggtcccgcgttggcggcgccggcggcgtggcggggcccgtccggggcgcgggcggcgcggctcagctcgtcgtggatgcggctgcgctggctgtagacgcgctccagctcccgccacgagcc

SEQ ID NO: 160877 - DNA, 1000 bp, Homo Sapiens
tgaagtttcaggactttactttttctgagttaatccaggtgcatgagacttttccatatacacggataggctttgtacggttccattttgggtcagtggaagaattttcacaacacaaatgacattataaagttgtcttcgctggcctggtactggggaccactggtcaaagacaacgtgagacattgcggggacttcctggagctgcagcaaccacagcagagaacttgtaatcaattttttctgggagaacatagcagaggagtaagacaacatttatcctagcttcggataggatcctcttccatctaggcagatgggatccaagagacagcagagatcctggagagaggtgatagaagagggagacacaggcttggtgtattggatcagctgcagctggtgctccctggagcagcaggctgcagcctggcagccctacaaacagacggtccttacccagccacactgaacccagggaaggaaaagagggatgcgcccacgttacgcgcgcgcgcgcgcgcgcacacacacacacacacacacacacacacacacacacactgtcttaacccttacctttgtcacaaaaaaatgctgccatttaattactcagaactccagcattttttggctattttatttctagcccttggaagcttgtttcaagaaaaagacaccatatcataaacatcagatatcagttcactgacatgaaattattaacaatacaactctcaaatggaatctcaagtacttccagtaaacattcagttaagattttgacaaatattttcatcctgcagtctgtctcatactgtcaaaaaaatgtctgactataacgtaatagaactgaggttctaagtaccacacaagcccaggaacacacagctgagtgtcgctccctttcacgcagccaccactgaaaagcacagtgcttttacccccagacatcttgtaaactcctatttagggacactcgctcgagaggaaccagctg

SEQ ID NO: 160878 - DNA, 1000 bp, Homo Sapiens
tttttttttttttttaagatagaaagattttctttattaatgaccccaaccgtatttctttagatacaggagttttgaactcaaatacttaggagaaaacaagttatgactgcattatcctgcaactcattaccagtaatatattgcaaagcgaaacagcttggaaaagagggtgggagaaaagggaagtgagggagggaagataaagaaaaggaattaagttgatcaagtggaattcttttttttttttttttaattcttgggaactatgaagtctttgcaagcacagctcgtttctgcagattattttccaaacgtgtacaaaatggaaccaaaacggagaatcccttaagaacctgaagaggcgcaacattaaaagctacgattatccagtagcaagtgttccagccttcagttgccagccgcttcctcctcttattcccaagattagcgggatgaaaacgtcttccccgtgattgttttcatttcttttttctcggcatctgggcgtgcgcggttcagcaccttgaggaagtcagacgttttcgcccgcatacgtgtgtgaatataggccttagagcacttgatgtggtagtgcaggtagtcccggaacgtgtggatcaggttgatggtgttgtctcgagcactggcattggtgtgacgagggaacagcacaaaggtaatgtagccaatgttgtcacccacagcggcgtctgtgtctttcagctccagaggaggttccctgtggctaaagaggacctgtggggctgtgtggctggctctgcgtccttctttgaactcctgcatgaacacctttccaatgaccacatcgtcgtcatccttaaacactgtgctgaagactactgtgactctgtcctttttagactcaacatacatggtctcatcatccctataatggataactgccctgttctctccttccttgccctcttcttggaattggaagtatttttcaaagacagaggcaaaacaatttcgc

SEQ ID NO: 160879 - DNA, 1000 bp, Homo Sapiens
tttgatcagtaattccttattgtttattctcctcttacaaaaagacacttgggacaaataaatacaaaatggcatatatcatatttagcaatgggcaaatacacattttcttggtattctccacaagaataaactaataaaattttcagaggcatactcttctacccatctcttaccctctaaaaaaaaaaaaggcaattattttaattccctgtaatttttaacaatgaattctcaaaataagtaatctaggactattcagggaccaagacatctgaatcaacaagttaaaaaaaaaatgtctgtatacacacacacacacacacacacacacacacacacacgatgttgcccagaagctccaattaatgaagagtcttaaaagtttttcatttcatatagtttgcatgaatagagcctgttctattctaatctcaatggcaaataatataaaacagaaagctgaacacaacatgtgtgtgtgtgtgtgtgtgtgtgtctacttttctgtcctaagagaaaacattaaatacaggtatatttaatatacagtgaacataccatgtgttttcttaaagccaacaaaatcctgatttcctatagcttggaggtgatacagaaggcagaagacaaatatcaaatttagctaataaaatataccctgcctattggctccagcaatacactatagagtttgagcaatgacggatacccaagtgtatatgttttgttaaaatttatcttcaggctaatacctgaagaggttggctaatactttaaatcaaatattcttacttaatgatttatccatcaaatggaaatatgtacaacatatttcaaatcagaaaaggggtgaattttccccctgcccttcaaaaaaatatttttaaaaatccacttgaaataatttcttatttgatgctttttaatcactttccactttatgacaaccatttttctagaaaggcagacaagaatataaaatgactaaggggtcact

SEQ ID NO: 160880 - DNA, 1000 bp, Homo Sapiens
ggtaccagttttatttataattaaccacatacaaatcacttttctacaaaataatggttaacatctattccttaattcacagaaatatcacaaaaccaaaatccttcccacgatatattactatttagtctaagctttaattcaaaggttgagaatgacgaattcaagaatttctttcatacataaattgctttccttagttctgcagatgggtaatctgtttgagataagcactgtcatgtttcaaccttagagaacaaaaagctatcaacaagatagtggtaaagaaaatgctagccaaaaaataacactattgagaaataggtgcgtattaagtgcaatacttacaacatctctgatgtcaaatgaccaaaatttagccttagggcactaaagcacatttgcccttttgaagcacatactagtatggcacattttatttcactaaaagtgatgttaaacgtgaatgtcttgtagactatttaaagagccagtcaaatggctaaaaaaaccattgtttttttgttataactctttgtgtctccctctttccattctcatcttatgatatttcactcaaaaatttagttacccaccccaaaacacatttctctcccttctgccagggtgtaagaaatgttagcattctgtcactagaaaataaacactgaagaggaattagcatgttaatgaacaaagattaaggaaggtaatactaacaggataaaggaaaatgtagaccataagcatctggtcattcatcatgtacatgtatcatgtcaaccattatatattaaatcttcaagaggtaagtacttctgttttagtgtgtttaacaatgtcagtttcgtgggatttagtctctgttccaggaccttctcttacattatggtaacagaaaaacaaagactggagcatggtttacagagaaatacaaaacacatacaaacatcataataaaatagccatttatatcactattagagaaatattttagaga

SEQ ID NO: 160881 - DNA, 1000 bp, Homo Sapiens
tttttttttttttttttttttttttaaagtatccaggcaattttactcatagttctgtttagttccagatagcaacagctgattgttcaaagtgcagggtttttggatattcaagtaccacaggatcggagaaaaggagtacttgaaacctagagttgcgttttcacttgagaagacacactttggaaacacctatccaacagactacaaatataggctattaaattaaaaatctggtttcaaaataatacccacttaggttggaaatatctttctccaaactcagatccaacttttgaattgtttggtatcaaaggcaaagttagagggacttgggtttaaaaactaaaattacaagtgagtgcttaaaaaaaaaacaactcaaaacatctttttatcaaataagggacacacacacacaaaaggcaaacgatgatatctacatgcttagactgggagagcagctcccaggctcccctggagggatgttctctcaaacctcagtaaactgagtttgtcattgaactttgaacctggtagtgagctcagcaatctacctggtccaagtcccccattttagaggtgaagaaattgaagtccacagcgactttgtccagggtgaaaagcagagccagggcacagcccagatgctcagcccacccagagcccttctgagacatcacactgtggtcacacgacggcagctccatagccggccttgctgctctggagaccgtgggagctagaggacacccctgattatgaatttcaataaaacgagctgcaaagatgtttccaatttaagggcgctgttgaacagcatttccaaaatttgcttggtgatgagaatcatctggggcacttgtgaaaaattaaaatccccaggctccttcccagacccagtgaatcagcctctccgaggggagggacctgggaggctgaatttttaacaagtgcctcaggtaactctcagcagcagcaaagcgtagggaaatggtct

SEQ ID NO: 160882 - DNA, 1000 bp, Homo Sapiens
tttttttttttttttagttaagcaaagaaaactttatttctgctacacgtaacaacatattgctctaaggaacaactactatattcgttttagcattaatgtatggattcaaaaatacatgtcagcaatccctgcttcccagacaaaacaatgctgtacacagactatcaggtatatggaaaaaaaaaaagctgtcaactgtccacagggaatgcgtccagtcacattttcagtcagtcagctgaggattatgtcattatttagtctttgttctcaagaatcagtaagttctttgccgtttgttagattcttctcttggcgaatctgccagcataactttaagtctcaccccattcagaatctttccatgtagagtggcaatggcatcattagcacttattctatcggcatacttggcataccccacattttttcctgacacaaggtaaacttcgatcaggttaccaaaacgacagaatatatcttctaatacgtctaaaggtaaaggatgaggattaaacacaataaaaagtctttctttcacaggagtttcagcaggagctttttttttgcatgatggaagtacaacatctgtctggatttgaggcaactgtgatccagagcttcctccaaattgcataaattgttgctgacttgggttattccacaccattgatgcaagctgtgcagctaccatctgtgttgccatttttctaaggagactggaaaaaataactgataatttacagaaaactaaaaatattcagtcttttaacagtagcttgttttgtgtgactttctcacctgagaggtcaattgtttctatttttattcttcaagtcctatcaatcatgtacactcaaagctcggctttagacactcctggaatggtacttactctgttgcattacttccatcatcaatgaaggaaacacctattcggttcccaggagggtactgaaatccatgtaatttgtattttgcataaatagctgatgct

SEQ ID NO: 160883 - DNA, 1000 bp, Homo Sapiens
tttttttttttttttttttttgggatataagtatgaatttattgacatgaacttcctttagctattactctaacacaggggatcaaagagctgaagataatgatactaaacccacaggatctgaagtttggagggctccctctccctcagagagaaagaagagagagagagagagagagagagagagaaatttgaacaaatcttttaaaaagaatctggagaatgccttcaactataataagaagtaatgacagtttgacaatttaagcatttttttccagaaacatatatctattccatagataccaaatcgattaccatataattgagtttgaaagtatacaaaatatttgttcttacatactgaaattaaaacctaattttaaaaagtgcacagtaaaaacagcataaggaaacctacaatatccatgacatacgtattgttttccatttactgccgacatcaacttctgtatttgcctcactggttacaaatatgttttaaatatttcaaggccgtttccaacactgactagtttactaggtccaacaatactttagcttcctgaaggcagccagcatggacgtggtctcagccctgcggctctgtgcagcaggagcaggtctggaaagaacagtcgccaaccagctatttcaaaactatcgactcttgttctttttagaattccccttactggacatctttagtgtgtcaatctcttctctctgtttagataatgtctcattcatgctgcacaggtggtcactcatcatacttaactgatcctcgtaactcctcttggtagttgtcagctcatcctgaagtctgctgatgttctgactggcaagtttcatttcttctgtcaatgcttccttagacttttcagccaaggccagtcttttagacagtgctcggcactcggcataaaaatgcactgacttactgtcagccagctgcaactgagacgtaagttccactatccttgccatgtagtgattt

SEQ ID NO: 160884 - DNA, 1000 bp, Homo Sapiens
tttttttttttttttggtatcaaaaattttaatgaaaacattaatcatataaattaaatagcaaaactatttgaaaggaattataattcaaacagatttgacttactgatatttctctatttgttttcataagaactgattattttcagctgaaatctatttaagattgtggtaaggagaaacgagattaaggtacatagacctcataagccctgttgtcagcacatattcttcataaatactcatcttccttttattatttttaaaagacacgcaagttttacgaaacatgccaacttcagttaaaagcttcttacataagaaatagccacatgtgaggaatctagcctggcatttgttgaaaataactatatattctgaagaacacgccccatgacatttattgataaaaattcctcactaataaaccaatttctgaaatctaattacataccttcatgtcacaatttaagaggtctgttagagaatcactttttttaaaaagcacaaagttaacagtaacaagaaaagtactctatcataagtaaccaaaacattaagaaatatttctcttactgcagatatggctcagtctcatctgaattatttttttaaaagtgttggtttgaattattaaatgaaaaaactaagtacaaggaagcccaatgaacaaaaacacgttactctgcctctagctaagccttatgaaatattttagtttcagtcatgccttcactttaaacagtagtatactgccctttctagtatactaattaagataaagtttaacattctgtccttctaacaacagctgagagaatacagagatgaatgtaaatatatatcatgttctataatatacattttctaatatttcaaatttaacaacttatctaaatccaatctgagttacattaaaagatcaaaactttttttaattgacatcatgggtgatgtaccaggcaaacactacaaccacaactccacacactgaaatgag

SEQ ID NO: 160885 - DNA, 1000 bp, Homo Sapiens
ttttttttttttttttaaattacttcgaaactttaattacagatacttttccacgcaacatttctgaaatgaaagctttgattctcccctttttttgcataaaggctgggaaggtggtttggccagaccgtacatctttttgtatatacatatctacacctgtgtctcttctttattaataaaaggtgtcttgatcacagtcccaaaccaactctgcattggattccagcatataaaactcagagagtaaaacaatttcaaaggaagacaggctgcaaccacaggaaaatggcaggaaaagttgtagcttgatagttgtttcttctaagtttaactcagaaatataataataattaagagaaaaaaataagaggccctagctttcatccctgctaccaaacacgctcgtccagaactctaggctgtcttaaagtgcaattactgttgtgaagttgctcaggccagggatcaggctggacggagttcaaagcagaaacttcaaacactccttgctgttcatgactcaggggctgggagggagggagaggagaaaaagaaggacagttctctggcattcaagtgcatcaaaagaataaatgtcttttcttttggtaaagcaaatctgtcaatagtaaggaatcctggtttggaaaaaatagaactttctaaaacttctatctgcggatgttccaatgcagcagagggacaaggcaggcaagtgcagccagcagcagggaccaggtgtgcctcccaggggcccggccatacaggctgcttccactgtcttctgcgaggtcctctgccctcggcgaagaggaggcacactggaccaagggcatctggtaggacgtggctctcttctctggcctgtctgggctggacccgtcgctgggcctctgaccgttgaacagcagatagcgcccccgggcatcctgttccattttgaagatctcgtactccgtgtgaggtagtttgatgcccagggccacgcagccattgg

SEQ ID NO: 160886 - DNA, 1000 bp, Homo Sapiens
atgtgaaggttgctctcccccaagaaactttccccgaagaaccctttctattctttaaaacaatcagacacatttacctactgatgccctagtagttacacatcatcacgtggcttcttggttattgaaggagtttgacctctctgccaggctgcgacatgcacagcctaggaggcacctcagtgcttcgcattgtcctggatacaaaacagttgcttaataggtatgtgttggattggactgaatggcaaccagccagctccaaaattccagccaccacctggtgaccagcattttttctgcctttgaaatagtgggtttggtgacttgaggatatgctcgtggtggcaggcagtttgggctctggttggtcgtggcttgggcagccctgctggaggcaggccacaaaaagtggcagctcccacacctgggctgcacaagagatggaaggtgagtgcttcacgcaggcaaacccaggaataaaatagctttggactttatttaaatgtatccattccaggagcataggcctggaagaagcccaggccccaagaagttgtgactgtcccctgggcttcctatggcaccaggcattgaagcatgtcctggtggccgggagtggctggggcagagggcggtgaagagagtggctatagggagtttagggtgaggacccacccccgggcctagagggccacagtgcgcaggctcattggaggatcttccctccggccacctctcctgcacctccagaccactgtcccgatgatgcccaccacaaggccgactcccgctgccactgggacagcccagtagagcacctcgggggcttcttcagcctggtctgggagcaatcggctgttccgcagggtgtagaggtaagggctctcaggagaggggcacttgagtttggctcggctgtgggtgaagttgttggaggtagtcttgcggcccactggttccagcatgttgttccagagtgcgatggccatctcggcat

SEQ ID NO: 160887 - DNA, 1000 bp, Homo Sapiens
ggcagagtgaaattagggccccaagttttgattggcctttcacaattcctaaggctctgcgtatgtgtgtatatactacccaggcctgtatggattagaaattgtacgtgtgtggcagggagcaggctccctcccgctgccacctcagaagtctgtgtccaagactctggtggacacccctggctccactggccactgaagcaagccaatggcagatcacatggaaagcctgctggccagactagaaactaacaaagctaacacactgtcactaaatgcatcaggcttccacacagggcagggcattctcaacacagggggaaagtctagcctgagctgagggttgctggagaggagcagtcacaggagataacttgtctcgtgccatcgtgttcaggtcccttccgtggccttccacaatcaggagccctcatctgtgggccagaaagacaggacagcgctggcaaggccacttccaaagtctcagtgccatggctgtcccatgtgcccagcacacattccactttcttctttggggccttttcataagctgactcagattacactcaagctaggagccctggggccccgttcagtgactctgggcctctttgttctggaacattacatcttaacgtttagctcttagaatctgaccttttcctcaagtttgggaggcatcttattcactataatttccaagtattcacattgtctccttctgaaacgaagggaagtgttttaactgtgcaccacaaatcacaatgtaagatgccacctgctgtccatcactctgcagagccagccacttccaacatgaacatactaatttattcatttatcaataccacaaagctcgctctctgagccagtcactcttgcctcgaccgagctgctagcagctctggggaaggcaggaccaaatggcaatggagaacgggctgcggcttctcacagggtggggcgggcctggtgcaccctccccgagagcactggagaa

SEQ ID NO: 160888 - DNA, 1000 bp, Homo Sapiens
ttttttttttttttttttttttttttttttttttttttttttggtttttgttaaaacatgaaaaaaaattttattgttttagacaaagaggccacttttggaaaataatacttttttttttttagttgaatcaggtgaagacagagttaaaatcacataggatttgcatttttaaaaaaggaaagcactaggattgttggcactggagtaactatttacactgaacagaggtttggccttttacataacatcgatacaatgcattttccaaagtctgagaaataacaaggttctgtctcgaatgcttcacagaggaggttcggatttggggacaagtgtcattaatgagggccatggaagttcgtcagcttcagagtcacatgcaatctgatcctgggcggttccgctgctggggagcagctggctacggaattgaaagctaatggggaggggtggggcagcctctgggacaaggcctctctccgcagacccgggccttacaggttttcaccaggttggtactggggctctgtcgcggtaaagtagtcttccaggaagctctgcaagtactcaaaagtggggcgttcttcagggtcctttttccagcagtggatcatgagctcatgcagagagatggggcagtcctgcgggcagggcatcctgtagcctcgctccacctgctccagcacctcccggttgttcatgcctgggtatggcactcttcctttggtgaccagctctgtgagtaagattccaaaagaccacacgtcagacttgattgtgaacctcccgtacagggctgcctcgggggccgtccacttgatggggaactttgcaccttgtcttgctgtgtactcattgtcttctatcaatcgggccaatccgaagtcagcaatcttgcatatgagtccattccccactagaatgtttgctgatcgcagatctctatggatataattcatgcgctcgatgtaagccattcctgcagccacctgtgctg

SEQ ID NO: 160889 - DNA, 1000 bp, Homo Sapiens
tttttttttataatgctaacattttttattgaactcttctcaaggtcttttgtagaaaatacacattcatgcttacccaatctaaatatggaaggacctcatgatcacttaagttgtattcctgattcttttatttgagattcactttaagtctaacctagataataatcaatgtatttttaaaaatttcttcacctgtgttactgaaaggcctatctaaaattcttgacatacattctggacaactttatattgttttgggtgttttatttctttaagaaaatagatgctcctctcccaactttactgtttttcacacttttttctattttgtttgcctagcccacagttcccctatgtattctggttagatagcattgcaaagaaaagaatcaaatttaaaaaaatacaaagatggaaaaaaaaccctccagaaaaccaatgtccaatgtcctaggaatgctgagaataaagtgagctggaagaatttggcaggatctggtcccatgggtatttttccacagtgtacaatagactccactggctgtagacctaggttgatagggctcaggggtaagtttggttgagttgtatgggctttgtgatgagtgcagggatttctacttttggtcttgctgccatcaaagctaggtcatgacagcagcaacggtctctcttcttagttcaatggaatgtctagtttctgaacttggaggtaaatcatcttttctttattttttcttggtctttgcatattttcggcttcctcgatggtctcaggcaaagctttccctttagtttctggaagcaacagcaccagacctccagcaaccaagccaagcacgccgaaaaccatcagcgggagctcaagccagatgttagtgagccggtagaccaggaatggcgtgatgatgccaccaatgtcacacattgaggaacagatgtggacgccaagattcctaatgaatgtggggtacagctcagcattgaccaggcagac

SEQ ID NO: 160890 - DNA, 538 bp, Homo Sapiens
gaattcagagaacaggggacccccagggccatcttcttcccccgagtcccactctcaccaaccccagctgggagcgggtagcctccctgttcagcggacccggcgaagggtggagggacactcaccaatggcccgctcgattttgccaagcacctggttattgggtatggcccgtccgctctcatagtccgcgatcacctgtggcttctcattgattttcgtggccaggtccttctgcgtaagccccttgctctgccgaccttgctggatcaccttgcccacctccagggtcaccctgtcatggtgcagctcctctgtctcccggtccagcttggccgtgttcttggtaatagaatgttgtttgttctggccagcagcccatttcttggaagtctccacatcttctcctcgtctctgtgccgctaagatagcctgcttggatttggcctgggcggccgtagggcccttcttgcgcagcaccgtcaccgtgtcccagtcgctctcggccatggcgggcgaagacgagcgtccgtccggc

SEQ ID NO: 160891 - DNA, 1000 bp, Homo Sapiens
ttttttttttttttttatggtgccaattttaaatagttttatttaagacattgcattttccacttacaatacagtgtttataaagtgcaatgttatttccttcccctgtgcatatgttccatattcaagtattgagaatgcccagtaacttactatagcagcttaactttttaaaactgccacagaatttgctacgaatttaggtccttcaaatgttttaaatgtgtggaacaatgctacatctacacttggttggcttaatcaacctcttcaatggtgggccctgaggaagcaccaccagagggaggagctccaccaccaggaaatcccccaggcattcctcctggcatgcctgtgagttcaaacttgccaagcaggttgttatcctttgtcatggcacgctcgccttcataaacctgaataagcacaccaggctggttgtcagaataggtagtgaaggtctgtgtctgcttggtaggaatggtggtattacgcttgatgaggacagtcatgactccaccagcagtttcaataccaagggaaagaggagtgacatccaagagcagcaaatcttgaacattctcagacttgtctccagacaagatggctgcctggacagctgcaccataagcaacagcttcatcagggttgatgctcttattcagttcttttccattgaagaagtcttggagaagcttctgaatcttggggatacgagtagaaccaccaaccaggacaatatcatgaatctgtgacttgtctagtttggcatctcgaagggctttctctactgggtccagggtgccacggaacaggtcagcattcagttcttcaaatcgggcacgggtaatggaggtatagaagtcgattccttcatagagagaatcgatctcaatactggcctgggtgctggaagagagggtacgcttagcacgttcacaagcagtacggaggcgtcttacagctctcttgttctcactgatgtccttcttatgcttgc

SEQ ID NO: 160892 - DNA, 1000 bp, Homo Sapiens
ttttttttttttttttttttttttttttttttaaattctggacaacagacttattatttcaggtgtcatatttgaaggtaggagcaacaatacagatgggcagacattaataaatgaaaaccacaaattaaaattttcacacttattacccagtcataattggatgttatgtgtatatatgtatacatacaagttataaagctagctcatttcaattccatattctttttggtgtgttaacagtatcaaaccaacatcagataagcagcaaaaggattatgattgattgagtactcagaagttaatcaaggatcacgaaatctggttttgacatctaagtatttctacacaatgaaaaaacttatttactgtgctctatatagaaaatatcagatgtatcttttcaggtgtcattttaaaattcaattgaattgttacaatttgaagctaaatgtgatttgctttgttttattagaaaaaatactcaagcaaggtctacaatcattggtcaattaagaatgacttacaagaacatgaggcaataaaataaaaatacaggtacaaactatgtatctgaaacacttctatttggcaattttataacaaatcaaattttaaaaagaacaaaagagattgcagattacttcgcagatacagaataaagcaattgatgaagtgcttaagcaaaagaaaacaacaaaaaaagaaaacacactgcttttctttttaaaaataaaatcacattgctatagatcaaatggataatacccttattaaacaaccattccagaatgtcttatagtagcagtgcttttatttgcacttcacttaattttataagactcattttcatgtatatagctctttacccccattgttaacgaataaagtctctcataatttttacacttttaaattttttaaagcaaatgagaaatgatttatgtatcgtggaacctttcccattttggaaccaaaggttttaattctatatttttgt

SEQ ID NO: 160893 - DNA, 1000 bp, Homo Sapiens
tttttttttttttttttttttttttttttttttttttttttttttttttttttgatagataatatatatttattaaatgcattaatgtgtgttttataatgtacctttatcttcccccggctgactgttgcatacttataaaaaagaagttaaagaaatttcaagacaatcaatatgtaccataaacgactatataaatattacaaatttaaaaggctgtaaagcatgggcagataggttttattttcaaaatgctgttcttaacacaaaaataaaggctttactatttacttaagacgtgtggtagcttgtcaaaacaacccagtgcaactaactactaggctttcggatctgccttgagggtcggtctgtggcattttaaatgggagaatcttggttaacagcaaaccacagaacatattaaggtaataagtttacccataaaagcaggaactttctatataatactttgggacttagacaacaaaaatcctttgttacatctgtctgggtttaagtgtctcatcttgttgggtttgcagtaaaagttaaggagtggtctcctttggaaatgatcattaagtataaggtcttttttataaagagagtagtcagtcactaggtaaacttaaaaccaaattcagaggttggggacttaaattagaatatggatctttgcaaaggcggccacaagtgggaaaactggtaataagagcacttctgtattccttgggactagagttcattgtacattttaacagcagctggtgtagaagaatactcctgaggcactgaagaagtaatctggatgaatgaataaaatgtggggataatgcagaaagtgaagactggtcctttcttttctaaactatttgcattaaagcttgtttgcaatgaatcctatcttgtacagaaaagattccatttgcacatgttccaagtcttgttaaagaaatcacaagagagagagcatcatttggacattttccttgcacaaggt

SEQ ID NO: 160894 - DNA, 1000 bp, Homo Sapiens
tttttttttttttttttttgacgttcttgaaaacatgatttatcacataatatatacatttactttgcttgtcacttgaaatgcctaagaaaacacaaaatcaatcttaaactagaaacttctattgaatatgacatgaagagagcacatattccgacaatttcaagttcttttcatagccttccagtcctaataactcagcgttaacatcttattctgttcagcactatttgataatttctttcatcctcatgggctctagtattgatgtttcatcagtctcaattttataaaaccatcctttactttgtaataaagcaatgctgagagacattttccataatgcagggggaaaaatgtggatcaatcacaaactcaaagaacgttacagttataatgctttcgacatttttttctacttctgtgatgctttttcaagataagcttccccctccccctttttttcccctccacctgtgcactgtcttatcgcgatatactcttgacttctgaaaatcaagttgcaggattggtatgactggaatgcagaggttctcttgaagtagtgtcaccacataactattctctattgataaacttatcgcaaccaagttcttctatcagagggttgataacttcagaggcagtcagagctatcgtaaaggttaaaatatcgaggtccaccctgtgaggatttcgctgatattcggcatcaaacgctgcttcccttgctctgcaggcttccacgaatcgcctgcggcgttcttcaagctcttgtattctgccgggagcaatcgggtaattttccagatagtggcggagaaactgctggtaattgatgcctaaaacgctaagtgggtggcggagacggagatagggcaacgcagccaggcctccgttcccgtgtctggacctgggcctgccctcgggaccctcttcgtccactggctcccccagcaagcgggcgacctccgccatccgggcttccctggccgccgcc

SEQ ID NO: 160895 - DNA, 1000 bp, Homo Sapiens
cctttgacagtgaccatttattacacacatcagactgggggaagaccattgacatagctgagcaccaggtagggtgtcctgggtattcgggcatgagagcagcaggggcctcctgacgcgggcaggagaaacatggcacccaccaggaggaggaagaggaggaagaggataaggaggaaggtcagaggctgcctggatgcaggatcgggggcccctggattcccctccagcctcacatcctggagatgaggagatgcttgcctcttcttgtcctgaggcttccggagcagggagtgtctttggtgacgtgctaagcgtttctggtggccgaggccagactccagcatgtcctgtcgggagtgagaggtgtctgcttcctggagaaccagcaacaaagaaaaacgtggttgggggagggccaggatagggatgtcatagagatgagattctgggggagcagagagatctcacaggacagacaaaggcagagccaaagaaaccaagagaggagagaattatttattcattcattcaataaatgtgtaatgagtttctgttacaagccaggaactgttctaggagctgaggacacagtggggatggaaataggcaaattcctggcctccgtggagcttatatttgacaggagagagaccataaattaataagtaaatgaggcctggtacagtggcttatgcctgtaatcccagcactttgggaggccaaggcaggcggatcacctgaggtcaggcgttcgagactagcctggccaacatgatgaaaccccatctctactaaaaatacaaaaattagccaggaatggtggtgcacacctgtaatcccagctactcgggaggccgaggtaggagaatctcttgaacctgggaggcagagtttgcagtgagccaggattgcaccactacactccagcctgggtgacagagtgagactccatctcaaaaaataaataaaaatttttaaaaataagtaaatgtgcaaa

SEQ ID NO: 160896 - DNA, 1000 bp, Homo Sapiens
aagatcgtgaattttatgttctgtgaattatcgcaattaagagagagtttgggagatgtgaggaaagtaactggaggctcctctgagcgctgccgtcccagccacagtgacacacgcctgtgggtgaggaaggaccatccctggctgctgcttccggggcctggccggggtgaccaagacagataaaagtccttcggccaagccccgtttttatcccagtttcacaccgcgctgctcaagggcctttgctgctagggctgtttgaagtaccccacaggtacccccacagaaaggaaccctgcaaaattaggacactccaccgcacatggcccttagctagggagagtccgggcctgcacgggcagctgctgctgctccaggacacctggcccgggggctgctgttggccctgcctgccaagtggaggatctgaaaggaacaaagactcttcacatggtggctgtcactgaagccgagctgtcccctgaccctacggcgaggctgcccgcgggactcgtgccgacagacccccgactgggctttccgtccgggcctttgctggctgctggggacaggcactgccagctaagtgagcagagacgctggaagggtttggttccacacggtcaggtcacacttcagcgcagccgcccacgcacgccacggacatctgtgtgcctggtgcccagcctgaccacacacccccgccccgagggatctcactcccagactggagggcacagtggacgcaccttgagggtggtgaagacccagtccttggcgaggccccgggccttccagaacgtgtcactgatgtagcggttgagatgttccatgctccacaccgtgtgctccttcagcagcatgtacagagggctcttcttctgcatgaactggttggtcaagtggccgccgaggtcgctggaatgggggtcgtaaaggctaagggtgaggcgagcatagccgtggccaaagaagatcatgtagggtgtggtgcagg

SEQ ID NO: 160897 - DNA, 1000 bp, Homo Sapiens
attggtaaaaaaggaatagcagatttaatcagaaattcccacctggcccagcagcaccaaccagaaagaagggaagaagagaggaaaaaaccacaggaagaaagaaaggagggagggagggagaggaggaaggaaggaggagggaagggaaggggggaagaagggagggagggagggagggaaagaaagagggaggaagggcagagggagcagggagactgtagatcagggtctgaatggagatccggtcctggaagtaaatgatccaaggctccaggtgctgggaagagagcaggaggggagggcggcccatggcactgccatctagaagggtagtggctcttccacaggaatgttgaggatgacatccatgtctggggtgcacttgggtctccgaagcagaacatcctcaaatatgacctctcggggttcccgggtctgggcttggagctcttccacctcggcccttaatacaggcatgttctcctcaaactggtcaataaattctctgaacctttgcatgcatttcaggaagtcctggctttcccacatcttctgtaggagagcctcttcatagggacgctgggtttccgccaccacagaactcagaatttttttcttcttcttctgaatcttgtcggacaaggattccaggacctttctgcgcatctcaccgaggtcatccagctcatcctgctggctgtccttaacctgctgcagctggcgcataagagtggagatctggacagacttgatggaatactcatggtccatgtaagtgctcaggaagttcacttcctcctgggtcttctcaatcttggcattcagctgctctgcctgctgctcaagatagctcatcttgcatttcttcttttcttcccactcctgaagctcagatttcaattgctgcagcctcttcttgtttgagtactccaagatgtcgatgatggtcgccaaggtgtcctgctgctgcagcagggcccgcacgtgcagggtcgtg

SEQ ID NO: 160898 - DNA, 1000 bp, Homo Sapiens
tttttttttttttttttttaattgtaaaaggtttatcaagaaaaaagattcaaggagcagcatccaggaggagaccatgacccccccgggggcaaggggggcagtggtgacacatgtcagcaccccacagcaagctgctggaccacaccctgacctgggtggggaggaggcagaaacccctcggggatgtaaacataggtcagagacagcacaacctgacggggagcaggggcccacattccagcgaggcagacagagggcaggtgggcatggaatccctcgcatggctgggcaagcaggcccctgtctttttcctcttaggtttcccattgtgcaacaggaaggatcttgggaagacagtgccacagagcccaaggaccctgagatcctgggtttggacctgcttcgagtgtggggagttattgctggtgaactcaaatatacagtcacttttgagagtcttctccaggaaggtgtcaccagggatctggggcccagggcttatacctcagcaccttgagtccgaggaggggaggatgctgcaatggtcccctgcccgagataagctgagggcccaaaagtggaggggagtcagaggcctacaggagggagatggcctgtagccccctcctgcaggggacagggtgatgtacggacagccagcaacatgggagcaagggagatcccttcctaccacacaggccagaatccccatggaaagcgtacctaacttgcttggaaagtaagggagagaagagggagatgtttgcatgcctccataactttgcccatgctgttcctctcccctgaaagtccttctcccccatgtactgtctggcaggcccttgtcattcttcaaaacactgcccaaatgttgcctactctatggagtcttccctgaccagtggaatgctgtggtcccttctatgagcttccagaaatccctcacttaaacatcagtcatactgcattgactctgtctgtgtctgaccccgacctt

SEQ ID NO: 160899 - DNA, 1000 bp, Homo Sapiens
ttttttttttttttttttgggagttattaattctttattaggattcaggtttcaaacaaggtagaaggcagtggcaagaggggttcaggtagggggatgatgagggaacaccagacttggctagttgggccactgccagaagccaaatgggaaccctgggctggaaggggtgtggagaggggtggacaaggggccagcctagaggagcagacggggtcagcggatggtgtatcggacatagggaacctcgacatcctcgccgctctcgtcgttacagcacagctcaagcaccagcgcccgcacgtggcggcccagctttcgcttcgacacacggctcacaatctctgtcatcggctgatccaaccgttccttgagcttggcagctggcatgaagaaggaatagagcatggacacgccctgggacagcatggtgatctctaatttgtgctctgtcttaaaatagtcgaggaactgtttgagggtcatctcctcaccattaggctgcagcccttgtacctcaaagcgatcccacaatgtccactcttggttatagtactggtgacgtggtgcggcaaggggttcagagaaaccaaagaaaggcagggccaagttgaggaaaccattcttgtaggagtcaagctgtcggtgcccctgcacaaccttgtacagctccagacacacaaggccaaccacggctgctgtggtcgtggcaatggctgggatgatcttccctgcaatcagcttgctcttgtgccggtctgcagaaggaatgtcatagttttctgcccggaggttggatgcagccacgatgaaatccatatgaaagttgctgtcatcatccttctcaaagtcaatggggtacatcttgaatccagggagcttgtctgggctgggcagagtggctttgagctcctctagacgactgtcatcaacagaggcattggcgctctgcagctcctggtcagaaacatggatcttgacgccagacttgggggtgaat

SEQ ID NO: 160900 - DNA, 1000 bp, Homo Sapiens
gagttactctgatgtttattttaatgcatcttagtccacacagttggtataaaatcagaaaatgcaaagcaaaaacaaaaggtctggagtcttagcatcagaagggcaccatatatacatctacagttggtggccaatacaagtcattgccagacagtccttggaggcacagaacagcctagacccagccaagctctaggaactcacggtcccaaggagtctagacgcttgttctgatgctccgaccgtaagaaaaatgtgggagtgatgaaggctttatgatttactcattatagtaataatagcagcctagctaggtacaaaagcagttataaaccatttatattacacagaattattcaggtctccattctatcttatgttgtaaaattgttaattggatttccagtgagttgtttagatgattagtgataataaggaatggtaaatccatagcaccatttcaaagacttgttgtcactgatttctcatttagatgtgtgacgaagatactccacctgtaagggcaagtatgccaatgccacaagccgtgtttttgcaagggctccagtttgggcattttgtccgtgtgcgcgtaaagcttcacacagaggttcgggcagcggctgtttctgttggatgcactgggtcacccaccagaaaagggcttttggacatttggggtttctacccacactttggttttctaaatgaggtggactgggagggaggtatcttctttcagatgaaagggaaggggcgagatggagttatcttatttctgggtaaaacaaaacaaacaaacaaaaaacaaaacaaaaatactgagctggattatactgttaggatgtaaagttccttagctacttctttaaggctcaacacgaggctgatggtcaacataaaaagcaaacaatactatgtacatatatgtaaaaagtgttataaataggttttataaaccggagatattatatacatcttcaatcaacagcaaccc

SEQ ID NO: 160901 - DNA, 1000 bp, Homo Sapiens
tttttttttttttttttttttttttttttttggatgctccaatggctttattaactccctctttccgttgtggcaggacctcattagctgcagagctggaagggaggccaagaagctgtggtctcagtacgggtcattaaaggggtacagaggatgccctgcatcccttgggactctcttcccatccaccgtaagcataggcacaatatatctccaatttttgttcagggcatttagctgcttcatctcttctgggctaaaggtgaagtcaaacaccttgatgttctgaaggattcgagaaggagtgatacttttggggatgcagatcactttccgctggacctgccacctgagcaagatctgagctggagatcggccatacttttcagccaatgccaggactactggttcctccagcaggacaggctcatcaggatcacgccatgcacgatcagaggagcccaaagggctataagcagttacctccaggccacgtgcttggcagtgggcaattagctcattttgagccaagtatgggtggcattccacctgcaagacagctggacgcacggaggccacactgagtatgtcatcaatctgccgactgttgaagttggacaggcccagcgcctgcaccagccccttagccaccagtgcctccagagccttccaagtctccttgtagtgggtggagtcgtagcatatagtcccatcagcattcttggggaaggggttgtctccccgctcaaaggcataaggccagtgcatcaggtacaggtccagatactccagctggaggtcagccagagtcttccggagggcaggctccacatcctcggggtggtgcttggtgttccacagcttggatgtcacaaacagctcctcccgaggcaccgccttgcctggtcccacgtcctccttcagggcctccccaatctcaggctcattgccgtagatagcagcacaatcaatgtggcggtagcctacgctaagggcatac

SEQ ID NO: 160902 - DNA, 1000 bp, Homo Sapiens
tttttttttttttttttttttttttttttttttttttttttttttttggcagttcagaaattttaatgctgctttgaaaaatacttctgtacaatattatctttctcataatgaaaaaaagaaatgacatctggtatgtcaatggtttgctgaaagcacagatattttttgtttccttgttttaggtcttccaaaaactctgctttgagcttgttaagttcttctgctagaagcttcaagttgtgaggaagcacttgttcatctcaccccgtgctcaatggcctcttctcgattctgcaacactgcaaccagccaacctttgcgcttctgcacttgatgtgttcattgcctagaatgatcctccagatagctgcatggttcgctcttacccatctttgcttaaatgtcatctctgagaaggcttcctgattaccttttgcttccttcattgtctgagatacaatccttcggagtgtctgatcagttttatgaagaatgttagttgaacaaataattctgtctgtgtccttttgttccatattgtcctcagcatattttactggattttccaaagcagtgagcaataaatcagtcacttccaggctggcctccgaagcacatgctggactcggaattgtgaggctgttgtgttcccaagcatttttctcagggttgggcttttctagctttcttcgcatcaggtggatggtctcaggaggcagtgcctgtggcctctggccattcctctgtaaacaggtctcaagaggacaatctaaaaagagctggcaaaagcccaatgaatatttccgagccagctggtagacttcatatctcatactctgataataaaaattgtcatccaaaaccaaaaacaaaggtctagaaacagcagtttttgttaagaggtagcaagactgggcctcaaatgctgcagaaaatatcagatcttgatcctttaagcaggttataaaatcttcccacatggcttcagtcctgttgg

SEQ ID NO: 160903 - DNA, 1000 bp, Homo Sapiens
ccgggagacttgatctttattttgtacccagtctggttgaggcagataggtaaggggtgtcctgaagggaaggacagagatgccaacagtaccctgggctctgcctgtcctgcttcgtggggcccagggcctaggcagaggctctgcactctttccactgtcctcctgaaagctggatctgaactcagtgctagccccaggccctactgctttttcattattaccctgattttcttagctgataaaatagctagagattccatccggtgtgggtgatctgaagaatgattgttagctctggatgccagaactcaagtctaggtaacttaaaaggccagaggttggggcctgagccagcagtgagcacataataaatcctttttttttttttttttttttagacagggtttccctcttgttgcccaggtggggttgcaatggtgcgatcttggttcactgcaacctccacctctcgggttcaagtgattctcctgcctcagcctcccaagtagctgggattacaggtgcacgccaccatgcccagctaattttttgtatttttagtagagacggggtttcgccatgttgcccaagctggtctcgaactcctagcctcaggtgatccacctgccttggcctcccaaagtgctgggattacaggcatgagccaccgcacccagctatttttttattattattattattattttaaagacaggttctcactctgttgtccaggctggagtgcagtggtgtgatcctagctctctgcagccttgaactcctgagctcaagcgagcttcctgcctcagcctcccaagcagctgggacaacaggcatgtgccaccgcccctggcaaatttttaaatttttagtacagatgagatcttgctttgttgtctaggctagtttcaaactcctggcctcgaggtatcttcctgccttgaccacccaaagtgctgagattacaggtgtgaggcaccacaccctgcgggtgcac

SEQ ID NO: 160904 - DNA, 1000 bp, Homo Sapiens
aagttgaattatgacagaaatctttattaaaatgtgtctttcagtaatatgtttagcattcaatatacacacatacatatgtacactctttgacacacctcatggattgctgccatcagtttaaccaataaattaaaactaaaaagagggaggggaggggaggggaactaacggcaaacttttcatgttttatctggtaagaaattgtgaatttctcagaatttccctgggcaaaaacctgtgaccagagaatctgtgaaataaaatacataaatctctaccccttggaaaaaaaaaaaaaaaaaattccaaaagatgcagttacaagtgtgcttctcagaacaggagcattcattccacttcatactctggcttctccaccttctggcttcaagacagtttgtccctcggctagggcagagaggttcatatgggcacttgggctcggtgcaccttgggctctgggggtcgaggggcaggctgcagtatgggagcggggggagccacactcatctgaggtgatgtctggcacatcgtctgactgtgcatcagaactctctaggtcactgcggatgctttcaggctgggccaggctgatgtcccaaggtttgctggccaggcagtctttctgttcacagctttggtgtctgcaggggggatcctcttcactgcctccgccaccactaccttcttcttcattctctgccatctgagcatgaacatggagcgagtcctccgtgctgcttccactcaccagctgatagtggcttggtttggcttcaatgtccacttggatttccatattgttgcattctctgtcctgtgggttgtaggaactgattatggaaccggccatagcacgagtgcttgcgttgtcactaattgcaccaagactggctgtgtctttggggaaaatttccttttggacatcggcttgaacttctaacctgctatattttcccttgccactggagagaatgccgccactcagcgtgccccc

SEQ ID NO: 160905 - DNA, 1000 bp, Homo Sapiens
gcaaattagaattcttttaatataaaaaaaagtactaaaatacccacgtggttctgctgtgttatttgccctaaaggaagtgaggggcagagtgaagaatcccagtgcagctcagtgggcccagaaatgggcctttccgtaggctaaggcgtgcccactccacctccaccagacttctatcccctctgctgttcccagcccccaattcctgcagcaggaaaccccagtggtctggctttggcactgggagtagaaggcacctgaagggctggctgggtgagtgaggacaggtgacctttaaaaacaaaacgacaccgtggggtggggaagcaggtcatgcagctgtggcagctggcagggcccactcctccatggcacaggtgggcatgggatggccacttctccagaagtgaggaagcccagatcccaacagaatactttctcaaaattgtttttggtacgaaataaatggaaagaagatatggggtggggtgctgtggaggccgggccagccaccctccccagaccttagatcatagcgatgctctcgggggcacagttgaggtgggtggaggtgctgctgctcccggaggacttgcaggcccggccaggggtaggctgcagtgcagccaccagtgtgtctgaggagactgccccaaactcgtagctgaaggtgccatagaaaatggggatatcgatgacacacacccactcacacagggctgccccatgttgcagctgagaactctcatggacaaagaagactccactgaggaccagggtgataaaggcgatgacagccagcacacttcgcagataggccacagccaggtccagcggggcggtggccccttggtaggagagagcacagtgcaggcaaacaaagagcagccccgcagggaaggccacgccagctccaacgtagtgcagagacctggcatgatccacctgaaagttgccaaccaccaagaggcccgcagcgttggtgcagcctgtgatg

SEQ ID NO: 160906 - DNA, 1000 bp, Homo Sapiens
ttttttttttttttttttttttttttttttttttttttggctggagttttgctttattgaagttgaacggttggggccaggctgcgaaggagactgagagcgcgacaaggccctggacagatgcccgcgcggggaaggaaggctggcttaggagggggcgtcagctatggtttagcagcttccagcgaccgaaacctacatcacagccgcagcacacaattccaggaaacctggtgctcaatattgggatctcaggaatcaggaccggcggctggggtgaaagcctagcggtcagagcttaggagtgaggcagaagctgttagagactcttcgcaagtgaccccggggctacatatggatgattcaagagggagtctcctcgccagaaagttcacatgtttcactccttctggccttcataccaacccattgttaaaactggaagtccctccacctggggtcactgactccactgttttcagataggatggggaccctgcactggagactgctctctagcccctgggcaggagaggcacagacactgctacgcacgcggagcagggatcaccagcgctttgactgactttgctcgtccaggaggctggggacatgcgtgcccatgctcagcccaccccctctgtagacacaattggtcgcccattctgtttataggaagtcttccatcctgcaccagcagctgtccctagacagggattgggagacatgcaagttgcttggcttcctattaccttgtgttgaaaacacaataggctttgggatcaggagttcattccagttattttaatgttatttactagcagtgtgccctcgtgcacattatcaaactcctctgactcttggaatcctcatttttcaataataactcacaaagctgtcaagcctaagggttctaacagctcgaacagcacctggaacagaagcaatagccgccactcagaggttacttcttccttctccgccttctctggatcacctc

SEQ ID NO: 160907 - DNA, 1000 bp, Homo Sapiens
tttttttttttttttggttttttttttttttttttttttttttttttttttttttttttttttttttttttttttttttaactttcaaaatgtattttaatctcattccaaaaagaaataaaatttctagatacaaatacatctcattcaagtcactttttaacatacattctgcaacttaaaatattataaggattcaatattttcatcttttataatctcaatatattatatatttaatatataatatatatacaatacatacaggtagtcagcaggtttacaaagtaatttctttaaagtctgatcagtattgataaatattttagcctattaaaaggaactagttaggatcacagaataaaacaaaatatggcaggtccaaacctaatggcaagattacaaatgttcatatggccaatcattttaaaagaactctcaagttgggtggaatatgttttaaaacaatactcttgctattctcaagcagcagtagttatatattttaaccatattcatctccattaaatttaaaataactatgcagctttctttactgtaatatacagtagctatctcttcctttctgttggattttactgtttcaagagtaactaataaattaccaacagaagagactttagcccctttccctcccctaaagcatggctcagtttgaagattgttctataggcagccactatgactatcaacagtaccataaaaccattaaaagcaatcaataactagagtcatgtgagatgtttcaaagactgctggaggtttctgtaaaccagggtaatcagaaatattacccttgtagatagccctctcataccagtaaatacaaagagttaaaattccaatgccacagtgtaacagttaacaatctattttgtaattttaaatattactacattaattcaccctgagaatacagaggaaacatttaatacaagacattctgatatgtttttttttcccattgtatttgctttct

SEQ ID NO: 160908 - DNA, 1000 bp, Homo Sapiens
gacagggtctcactgtgttgcccaggctgcagcgcagtgccgtgatcttggctcactgcagcctcgatctcccaggctcaaatggtcctcccatctcagcctcccaagtagctgggactacaggagggagccactgtgcccagctaatttttagatattttgtagagacgagggtctcattatgttgtccaggctggtctcaaactcttgggcaaggagatatattctcaaacgatcctcctgcctgggcctcccaaagtgttgggattacaggcgtgagccccggggcaccgccaggtgctgtttttttcacacccactcagacttcctggctctcaggtggggagcaccactggagctggcaggcgggtcagggggctgcaggctgctgcaggaagggggcgcggccaggcggctgggggctgctgagggctgctcctcggatcctgagcccctggggtcctgggcggcctctcggtggggcctgccccggggctgtctgcccagcttttcgctggcggaggatgtcacctcactctcatcctcatccggaatcttcgtgtgccctgacaccctggatgtacgcctggggctgccagccccctcccctccggcgcgtgcacccgggggcgccggtgccccctcttcctcccgcccaccctcctcgtcagtccggcgtccctccgcgtggcctgaggctccgctctgcttccggatggaggggcttgtggggggtcccggcctcctgcgcatccgccgccgcaggctgcagaccaggtcggcgaggcccagcagaaaagacagcgcgccgaccgcccagaggaacagcatcagcagggacttctctgtgggccgcgacacgtagcagtccaccacgcccgtgcacggagggcgcgtgcaagggaacttcttcggggccaggaatccaaagagaaagtagtgcaaggccccgaaggctgcctccagcagggtccggaggaggaggtggatgatgtagccg

SEQ ID NO: 160909 - DNA, 1000 bp, Homo Sapiens
tttttttttttttttttttcactttaaaatatgctatttactttttttacagttataaaaataatacattatcaaaatagacaacttacaaaacacaaaaatccaccaagggaaacacagcaaaggcccctgatcccaccatctagaaagaacgagagtctttctggcccgaaggcaccagctctgatgaaggcacaatgaggagatgccagcacagacttccccagacctgaggtgacgctacaaacgagcggtgcacagccacacacgcaggtttagagttcgggaggaggagacctaagtcctgtcttcaaaaacaaaaagcaggccgggagtggtggctcatgcctgcaattccagcactttggtaggtggacgtgggtggatcatttcaggctgggagttcaagaccagcctggccaacaaggcaaaaccccatctctactaaaaatacaaaagttacttgggcgtggtggggggcgcctataatcccagctactagggaggctgaggcaggagaatcacttgaattcaggaggcggaggttacagtgagccgagatcgcgccaatacactccaaactcggcgacagagtgagactccgtcttaaaagaaaaaacaaaacaaaaacaaagcgagccaccgtggagatccacctgccgctgctcccgcgggggtcacttctctggctcctgcagccggcagcttaggcagcacaacacaatccactaggacattcgggaatggttttaaaaccaaagtggattcatggcgaccccttaataatctcctggactgctttcggacatgctttctggaacaggaggggtgtggagagccagcgtgtggggacttcggtgaccctgggggggtacacaggagggtgtgtgaacacgtgccatcacatatgaccaccactcgcctcgtggggacccaccgaaccatccactctgctcatctgtgcccaccccactgcctctgtatgacgcctcgtaaggac

SEQ ID NO: 160910 - DNA, 1000 bp, Homo Sapiens
gcttgttactttcacatgtattgattaaaaaaaaataaaggggagggggagttttcaacgtcattcaggataactattttcctggtataaaaagacattattctcaaacaataactttctaaaaaaaaaatacatcatgcaatcaaagttttaaaaagtttcactgaatgtttcaaacctctgggaacaaatcatgtagtaaccattttgaccagtttttgcctgaataaacgcaaaatcttgcaagtcaacacagatgcaggctttgctgcaaaaagaaccgctgatcagagccaaaaccagtttccaaggagggcacctgccagaaaacaggggcctcagcagagagccagaatgactccgtgtgttggcacaaacttctacgcctttggagtctgtggcagctgcacacccagcagcaccacctctgcccaagcaaaagccagtcctttactggagaaacagggaacatcacggttctttctcctcaattacttttaaagtcccattaaactaaaaagcaacaaaaaaatccagaatcccatgcatctgcagctgtaattaagacttgcaaaatttcacgtcatctaccccttaaagcctgtctgtttcttgcactaataatggaagcacagttttgatacctttgagagttcactctctagctaaaccagccacaaaatatcgcattcccaaacaagaacccaccagagcattacaagaggcgggagaagttaattcagcgcaatatacaattccccacatgttcccaacgttttaacatgctcgcaataagaaaaaaagccggtttctctggattcagatgtggtgaaatcgttttcatcactgtcaaaggcatcaaccagatttgggagtttgttaaaaggttaaaaattcatacaaaacctgtgtagcctgctgtcgccgagttgcctccgtacccatagcttccatacccagcaccggcattcatgtagcctccatggttggcgccaccaaa

SEQ ID NO: 160911 - DNA, 734 bp, Homo Sapiens
tttttttttttttttttttttttttcaaaggcattcaggctctttaatgtctgaggatggggggaagaagtcaatggtgaggcttctctgggaaattctgcaggccttgtagttctctaagcccctctagcaacatgtggatatgggctttgatattcatggagtccttggtgaggctgttgctgagctctgtgaggagagagctcttacgatcaatgaacttgagagcttctgccagtgtcaactccaggaaaaaaccatatcccagggccacatagatgcgtgaagtatctgggaccactgtgtcaacgaagaagttacagcccaaatccacctgcatatataactccgagtgcttagcttcctggagtcgctcaatgacatttctcagttgaaggtatttggccagctgctcatataccttgtctcgatggtccagcacctttcgcaagtcccgctgcagcacgtcactgatgaaggtctcgtagcgcagcactttctcccccgtggcctccaccgcccgccgcttagggggcgtcgccatgatgggctcctggggagtggggagggggaagaccatgttgaccgatccagtttggcctcacacacagttcatctctaccctctcaacgctgggaatcggcttgtccggctcaagctggaggttcagccttccgcccctcccaactcggggacccgaccacccagggacacccaagcgcggcctttacctc

SEQ ID NO: 160912 - DNA, 885 bp, Homo Sapiens
tttttttttttcattttacaacatgttcattttatttctatcaccatggggcataccctttggggtgtaaaacgtactctacaccctgttggctatttatctggggttagacttctggagacttttcagatagacttgaagtctctggccttgcctgggaattactggctgcccaaggaagcactggagaaggcggtggtctccttgcccttgtggtcctgctgtggcgcattttgattgagttcctggttcggctggtcagagtggctggatagtgttggcccactccattcctcaggtttttttgaagcggtggtcttttagggagagccttttgttcctggaacttccttgacgggtcccttttcccttttgggttgtcttgggaacctctttggtgttgatgggtggttgttggaaaatgggctggaggctcgtggtttcctggacatcttcaccagaccagtgtctctgtacagtctactccagtccacctggtctccccgagcttcccccaggacagtgaaggcaggccagcaggctgtagtcgccgacattacaagcaaatttgggctgctgtgctctgcttcccaaatcaaccctacatatatacttggaagatatgtaaaccgtatttcttcaattcagtgaataaatcatttaggaccaaaggtttgccaagtgtagctctggctggagaggagctcccgtgggaaagtgtctgtcttcttccagaggtcaatacgatcgtgggagctcccgccctgcagggagctcctggcctgggacccgcagccattctctacaaggggtgcagctccacctccatctggatccccatccaggaagaatccagttccacccctgctgtgaacccagggaagt

SEQ ID NO: 160913 - DNA, 1000 bp, Homo Sapiens
acgctgagcgctagaacactgcagctttattgatagaacaaccgcgtccgcaactagaggttacatttgggggcttggaggtgaaagagaggcaaatggggaacagaggctggggtggagacagacagcaaggcaaaggggtgaggatggggctgtgtgactaaaaaaacaaccccaatcatttcacccattaataagggggtctcctgttgtgcttttaccttggtggcggggtgggctggggtggtcagacatgtgggcctgggcatgaggagttttggcttttctcccaagtctttgaggtctcagggctggtgcagccccttccctccctgacccttctcctgggctggggataaaggccttggtgagctggctactctagggcaggaagaatgcatggagacctagagggccaccagagttgggctgagatggtgattatgtgggtggctgggaggatggcgggagggggccaggaaggagggcagtcctatcctaggagggtccctgggaaatgagtgcaggcaacaagagggcaaggggtggggtgggcagatgccatccctctggacctcgcctgtacaatgggggcaccagcttagatgctccctaaggtcccttctagttataagggtcaagggatccccaggaaagagtggtccttctgccccaacacacacacacacacacacaaacacacgcacactccacacatcacacacattctcagacacacacgcacagcactgactcgatagagaggcgggtgcttcccggcctttggaagcatggaggactccgctgaaccctgaacccaacctcagccagtggctctgcagggactctccagagcaaagaccctgggaatactccccagcccctcaagctgcccagcgagaaaaaacacaaggattctgcacgccccatccgtgaccctcccggtctttggggaaaccaagaggatgagcacatgagaacatgctgaccttcactccta

SEQ ID NO: 160914 - DNA, 1000 bp, Homo Sapiens
tttttttttttttttaatagatatagatatagatttatatttatatataaaatagttttttacaaaaaaatcaaccaaacaaaaaattaaaatcaacttaaaaaaacaacaaccaaacaacaataacaaaattcaaacaggagcagagatggggctgaggcataggggaggcccctagcgctgccctgaggaggagggggtgagaggctgaggcactcagtctcccttctgcttgggtgcttgcacagtcccattggccagagcagtggggttgcctggggatgaggcatttggtgtctgggaggtgcctcgagaggtgtgtggggggcgcaggtaggtgctgaagagtttcccatagagtgggtcatggagggagaagttctggaactgacagagggagaggccttggctggatcctgcctggcacagctcagcatgcaaagctgtggcagcagggtggggtgaacccagcagcaggtgcaggatggtgctgaagccgtctttgtacagcaggcggttgggaccctctgcttgctcttcagcaaagagctcaaaggccagacgagttagctcttccaggctcctgcccccatccagagctgctagtgcaagggccacatctcggaagtccaccaaacccttggtatcctgctggaagtagccaaaggcaccagccaccgtctgaggatcagagagctgtagctgcctggcaaactcttcctggctgatcattcgactccggcctggctctgccccagcgtccacatagccagcggacagcccagccttccgaagcacttttcccagttcccagagctgtggttccaacgccaccttcagccggcccaccacaatcacaggtaagctccctacaaactcacattcggtggctggaatgcccagagcctgtgccatgaccctctgaacattgttggcatagagggtggggtccctgctctcctcagggctggggtgatacacaggaaggaactccacatcc

SEQ ID NO: 160915 - DNA, 1000 bp, Homo Sapiens
tttttttttttttttttttttttttttttttttttttttttttttttttttttttttacaaggatagggtgacactttattactcctgaagccccaccggcagaacccacaggccaggcagaccccatggacccaggtgcagaggcccgacggcaaaaagcacagggtaggtgggtgtgggggcaccagcagggacaggaggctgactgtggggacaggatgtctgggtccccaggctttgactgtggggacaggtgtctgggtcccccaggctttctcgggcgtggggggactgccttgctggccctcccccacaaaggttagacgcaaagcagagcccccagtccctgccccttctcatcggggcagggtctcccgtggatgaactcccagctccctccaagtccctcatgatctccctccctccacccacctggctcaggcagggccaggcatgggggcctgtattttgtcacccttcggccttgggggccccagagccgggcccaagccagcaggatcccaggaggactgggagtggggcctggtggggactggaggcttctgggaggtcggagggagcttaagggaccccaagcatgttgcagacagaggctgtacggacccattcctcactgcccccaccctacgccctccacatcttcacggtgtgcagcctgggctggcctctccggcagggacgcccaggcttctcgggggcaggcctctgtggctgtagtactccaccacctgcttcgggacctcggccagcacgcacttggccagcgccgcaggggatgcgttcttgagctcccggaagggcacgaactgtacgatgtcccggagcgcgggctcaccccgtggggagcgcaggacgccgtcgtcgccgtccaggacctgcatgtcggtgaagtcggcgttgcccacgcccacgatgatgatggacatgggcaggcgtgaggcacgcacaatggcctcccgtgtgtcggccatgtcggtc

SEQ ID NO: 160916 - DNA, 1000 bp, Homo Sapiens
gcccttccaaaaactgcttgttaagtttcaggtacacaattaacctgcccaattaattttgcagaaccttgaaataaaacatgttttacagtaagttcacacacaggcttaatgcaaaccagagtaatgcacagatgattgccaagaccatattgacaaattgtgattagattataacgcatagtagcctgccttacattcagcaagttcaaacaggacacaaaaccagtcaactgaacacagagcagctctcttcagaagcacttccaatgagtgatgcagagatttcaaaaatacaaagcaggcaacttatatacagcaaatcctcacactgcctggacatgtgccacttttttgttgtttttaatatatttttccttcctggttgctaatttagactgaattcttaaggatttatcttgatgacttagaaaaatacacctgtcctttctcactttgtttcaggtagtacagtcatgaaattgagtaagtctcttaaaaaaatgaaagtccacagatcccattgtggaaggtttcaggaacccctccccaggtaatgatcacgggatcttcaacagctcaaggagtgctccaacagctccaaaataaccctcgtgttccgaaaaaagtgctttcaactgccccttggaccaataatccaaagcatatgccaaaagccgcatggcgatcgtattaattctcaagaaatttccaacaaataccacctggttaatgttttcattaagggcacacattcttgctattgagccaatgttgttggtgatggtgatcaaagtcgctctggccaggtcctctttactgacagcctctcgcttctccttgctcatcatgtttccaaagcttgaagccacagcccagcctggcagtccaaacctctcatagtcccctccataaatatctcgtactagtttatccactttggtgctatctccacgagatgccatttcaagagcttcttcaaaagtggtacagccagtaa

SEQ ID NO: 160917 - DNA, 1000 bp, Homo Sapiens
tttttttttttttctttataatctattttattaccattaatataaaagtaaacaaatagaattttgtcagtgcacgcaaataagagacattcagaagtcaagaagtgtaattttaagactgcaaaaattaatgctatgccccttaataacagaactctccaggcttattttcatgattcacgctgtctaccacaggccctcctaactccagtggagaaggagtttgggggttctccaaaaacttgcaaatttacatattaaaactacttgaccacaactacctttttgtaactgactgctttcaagttctttgtgtttaattccatcaaaaactgcattataaaactggtaaggttattgacaaagaaacaagaacaaacttccatattgcagttgactacattatataatttcaaataaaataaaatcaattcataaaacaaatttagtggtgtggtttgggaaatctttaaaatgacgtatttttaactatcatagttattatcataattaattatcagagttatgttacttttccctcaaaacaggccacaggcttatttttatttatttatttatttattgagacagagtctcactttgccactcaggctggagtgcagtggcgcgatctcggctcactgcaagctctgcctcccgggttcacaccattctcctgcctcagcctcctgagtagctgggactacaggcacccaccaccacgcctggctaattttttgtattttttagtagagacagggtttcaccctgttagccagatggtcttgatctcctgacttcgtgatctgcccacctcggcctcccaaagtgctaggattacaggtgtgagccactgcgcctggcctatttaagtaaaccatctagagaccatggatctagcaaactcatgtctaacacagttggaacctaaaactcaggtatataaagatatttcaaagatttatatacacataattcctaagaaaggccttatgtaaga

SEQ ID NO: 160918 - DNA, 1000 bp, Homo Sapiens
gtttttaccacaatttattcatccattcccttactgatggtcttttttttgtttgtttttttggtccttaccaaaaaatacaatatacattagtaaacatataatcttaagtgctggcgctttttactccttagggatagattcccaggagattcctaggttgtaagagtatattaatgttaaaacagactcacaatgttgtccaaggaggctgttacaatctacatttctaaaagcagctatgaaaataacgttttcccctcctttgtgagtaagtaagatgacaacttagacaaaagcttattgggctatggatgttctggataaatttgttcagaaagtcactcaatatatagtgtgacagcacatcaatgatatccaaaaatattttttaaaagccggtttttggttgccatttataatttccaatacatgatttgtgattgatagggaaaggctgaacttaagaatttgaaatcaagtctataaaagcaaatctttgagttacacaacaattcttgttaatatctggagagaccactgaaaaatctgatttttataaaagtgtaaacatgtaaaggaaaagtaataacttataactcatgttccaaagggaaatgttttaggttggcaacagcaaaactcaaggaagtagaaatgcctcctttaaacaacaaaatagtgtaaaaatttacttctaaagggggttatgcacgtgaaaaatttaaaaagcaatgaaacagttgacagttatttaaaataatttttcctccaaagtctctgaaatgtaacatttgtgaactacagaagcatcctaccatttttgctagacaattcatgaaatattaagggaaacaaggaaagacaaaaacaggtggtttctgtctgtgttacacaatattttggtaacagacatgcatttgtatgcaaatatcccacgggaaaataagagcatgacgaatggggatattgtctttacacggcaaactcttattctgtg

SEQ ID NO: 160919 - DNA, 1000 bp, Homo Sapiens
ttttttttttttttttctgtggatgatcaattttaatacaattatacattcatgctgtggtggtaacaactttcacattatttgtaggactacttttctcaactcatgacaaaggcacaatccaaaagtataaattaacattacaataagttttaaacaaatgtggacaaaggaccaatctgaagtattaaacagaaaacatctgaatatggatcaacttgaatatattttcattccagaaaatattttgtcttttcaacactgtctcattttgctatgatggcagttttgtgtacctggtgacttactcttaatacccattcaacatgtaacaattataattaagcattcacatactggatagacaacctagatttttaaatatgtctgattttttaaaattatttttaaatgaattattctgctaaatgtcttacttttccatttcagttaatcatgtgaaaataaatgctttttcttccccttatagaattcagtaactcagctattttactttagatacatgtgaatttagccaaggattattaaacaaatagaaaaaaagccatccaatcatagtgcttaaaggcaatgtaatatgtaaaatgttaaaatcaggctgatttatttccttgatgggaatttttggtctcaaaagaaacgaggtatttaaagaaactgaagcaacataatactactttgtctttaaaaaaaaaaaaaaaagccatttagagatgctgttctgcagtttataaaattaagtgttaaaacaccaaaaagaaatgttatttttaaacatttgttaagaatcctttctcatgaatctctgaatatttggaatgtatttatggagtcattaaaatataattctgggaagaaaccaagaaattaacatttttattctatatggctttataaatctaggtcttctgggtcattaaggtattaagcttcagtgtcttttttttttttttttttttttttagtcctaaagcagcat

SEQ ID NO: 160920 - DNA, 1000 bp, Homo Sapiens
ttttttttttttttttttacctactggcaacattttggtgtttatttcctgtctttttccaaagcatacaaaaatacaaatatatacatataaaaatgcagttacattgttgacagatttgatattttgccttcttcactgaatataatggtcttgtgttgttctcctgtccccttatatactgtcagaatttatattgccaaaaaactctttcattgactgaatataccataatgtaaaataatttagagtatttatgattttatagcttttaaagttatattttgtatattcattttttttgtataaaatgttaaaagttataaaatggaagtatataacatattttgacaactgatgcttcccagcatgcaattcaacaggttcaagccccctttatgcttccctaactcctcaaaggctgggaagggacagcaggttagacactgcacgaggatattacacccaggcattgaaggtcacattccagaaggtccagttgaaagtgactgagtgcattttaagtcacacatggataactgaaggtctgtttgtaaagttcacatgctgaactcctacaagctgtaaaacagagttgataggtttgtgatccaacctattcctatcgcggtgtataaaatggatgttgttacctggacctaaaatgagggttccaccttgctgagctgggtctccttgaaaatcaaagagagggccagtcactgcccgccacaggctctgaaggcttcctgagagtagatttgattttatgtgggggctctgtcctgaggaagcaatttcttcacctcttttcattcccaatcttttataaatttctctctcaggatcgacatagatttcatgagaatatccagtcagcttgcaaaaaggctcaatatgatggtaggatgactgtccaatcactataagggtgacatttgcttcttgtaagaaactcctggggattttggccagatcctctacgtattccttgcagatg

SEQ ID NO: 160921 - DNA, 1000 bp, Homo Sapiens
ttttttttttttttttttttttttttttaaacttgaaaatatctttcaacatttatttaaccataagcacacaaaacatgaaaatatcaaactgaaaactagtcttaaacttggaatcaaattactttgtcaatgtgagaagattcaggcagctctcagtttataaaataatctacagagacaaatgatggggactgttttaattagcattaaaaagtattatgctgaaagcaacatttagattttttttggcctcactgtcagtattaatttattatttactgcattaaatactacacacaatgggaaaacagtattttctattatatcaggttatatattcccaagttataaaaataaatctttctgcaaataaaaaacaaaaacagaatagtctgcattataagttttaaaaaatatggcaaactaacctgatatcatgacttttttttggccatgattatactgagtctttaagttatttattcaggaagttaaatcaaaaatctttgatccaccaatgttttggatgccaaattcttttgtcctactgtattacggatatatctaaaaatctcttgttgtagatatgtaaggaaggatgctaaaataaaattttggcaagccaaatccacaacacagaagaacagcagatcaaaaataagaagagtagcttcatttccataatacaggacactgctgaaagaataaccttcatcattgtaaaagatgcttttttccattggttccatgaattccattccaagaattctttcaagaagcaacttatcttttataaagtaatccatttccttatgaacatggtcaatgaaggagccaagaaatttattcatcatatgatatgcttttatactctgctcaaaagtacttgctgatgaactcagtagtctagcaggaccatttttccttattagtgtctcatgaattctgtcataatgttgtctcatctggttagaaattgcaatctcaaaagtctgac

SEQ ID NO: 160922 - DNA, 1000 bp, Homo Sapiens
tttttttttttttttttttttctttttttttttttttataagttcaaagagtaggttttaatttaataagctattgtgtatttaggtgaaaaccaattaaacttggaattgcattacaaatttgaaattgtaatgaagcaagtagcttttatcatgaaattggaacataaatataatatcaacaaaaacataagaaattcctattccaattaagtctcaaaatatttgttttacaggtagaactcagagaagtgattaacaaaaaacacttagaattaatagctgagtagaaaacctaataatttctgattcacagagttagctgacaattgtgtagtagtttgaaaaaagctcttctccttgattgatgtccctaagtgcgacaagaacaacacatcgaagtgggctttgtttgtcatagctgtaggcaatgtttggaagatactgcttcagttctatagggaaaactgcaggcacatcaaattcctgataacagacattagctgctctgtcattggaacaattgttgacatactgtcccacagccagagggttatgaatttctgacgttagccatgtactatcactcatttttaaagggccgagtcgatccctcccattgcaagatctgtacacaacttttgatatccctttgtcattcccatcaatgagtaccccatccaggcatctaaaaataaacggatttccaatggactggaaaaagatcggctcatacttctgatatactgtaccaggatacatagatacgactgcgccttttggtaccaatcctttagtaacgaagacaccttttccagcagaaatcaatgagctagttgcttgggcaacactgaaacccaaagtcttgtaaagaatttcttctggtttaaaggtactttgctgttgatgtctgttttcacgcagtttcaccccttgatgttcaactgccagtaggtcttgatattttgatttaacagattctggaagcatagtcaagatt

SEQ ID NO: 160923 - DNA, 1000 bp, Homo Sapiens
ttttttttttttttttttttttttttttttttttttttaagtgattctcattttattcaagtgctctggaagtggtgaaggttttttgttttttgttttttgtcattttagggaattcttttttgtccaacaaataattctcagttgtctgcttttaaaagtactgtgtaatttctaaattactgtttttcaaaatcaggctaacacttccaactccctctggttggggttttctgaatcatctacagaaagatggctgctctgctgagagcctgcctgggaaactggtttgtatatcctgtgacccaaagcatccacttcctcaaaggtgtagccaggaggctcaggatatgaagctaggcacctgcccatttccttgggagtaaagctgatggtgtaggtggtctggctttccacagggacatttcctcgagggccagaccaatgaggcttacagcttttggtattgataggcaggtggggcacatagtgggcccgagtggtggtcaggcagtccaggggctcggtgggcaagtccagctggggaacgggcttgactggctctgtgcgcatgctggaccactgcttgtagtcatccttggtggtggaagagccttcaaagcgaccgcacttcttaatctgaagtgcaggtcggcaggactgagctggggcacccttagggcatgtgtaatgggcctgcactgttgtcagaagatccatcctgtcttcgggagggacgtaggtgatgggagctttggagaacatccggggcattggccaagcttggtacttatctcgaaactcagtggtgttacagaaaggcatgtctagcccaggaggcctggctagaggtttcaagctcttggcaggctcccccatcaggccccggtaggattgtttttgagtggtaaggctttcaaaggggatttcacagggcctgaacttctctgcttcatgcacaaagcgcttctccacggggtgggccacatagctcatcttg

SEQ ID NO: 160924 - DNA, 1000 bp, Homo Sapiens
tttttttttttttttttttttttttttttttttccaaaataacagaggacgtcattttattggctgtccacgggaagtttcatcacacacggaggtgaagactgtgggggttgtggcacacaatatctcaacacgagacctcatcgagcggccaaacagaaggtgaagtgacacccgacacgacggaaccccagccgccctctgcagccccggtgccacctctccacagacgcctcagcccagtaagctgagtgatgacactgtccattagtctcagttcgttgcactgtcttccaacaaaacagcacttgaaaattcacaaaattaaaaaaagaaaaagaaagcagcacttccttggaaatagcaacaccactgtaacacagacggcagcgtggcatgcagatccacacctggtcggttttttccctttaggattttttttttttttaattaacaaatggaatggcaggtctgtttcaaatattagtagcataacacataagtgcaattgcagtctggccacaagcgtcagaagccttccgtgtgtctgtcacaagggcgggcagacacactccgattccacccctggagggtcaccaaaagaaagcagccacttctctatttccattgttgtcaaagcactcaggttggggaagaaaattcaaatgaaaccaagctctcagcatccggggccagccaccctgtgccatcctaagtggtctctgtaccccagacctggggctgtcatctccaccgtggcattggctgggaaagtcgctgtgggacacacccctccgctcactcctgctgcccatggaggagcctctggtgtcccccggcctggggccatgtgggtcacacggagctgagcttcaccaggccgcgcacagagtcctcatgcagggagtcctggctggccaggcccagcacgtgcatggtgcggctgtgcgccagggggctgcccgccgccagtagcctggggggcgagggcgcctcatcg

SEQ ID NO: 160925 - DNA, 579 bp, Homo Sapiens
gcggccgctcctcatgcgtcaggggcctctttcgggccgccattgccttagcagcgccaagttctttctggggcaatcgccgctgttggtttcatctcccagcactgcccattggccgcagcacctcctgcccccacggtgcactcccttctgcggtcatttccttcccctcgtgtttcctagcagatagtgggaagagatgcaggcccatcgtgtgcacagaggttcagagtgagcgcactgtgagtggaaactgtcacgcaagcctcgggcatgacgtccttcccagacattctttcccatcgggcttctcgatccggggtgttggtgcctcccaggggtctgcggcacaggcagggtctaagtgcttccagcgcttccacacttcactcgaagtcacaaagcaggatctgcagaaacactctcccggtgtttgttcatcgaggtttcccgctgctgacggttgttttgacttgctcagagttgtcatgcacctttgccctggctatgtaaggagaaggagcctttatgcaatccaggaagcccgcgtcaggcccaggaggtgcgccagctctctag

SEQ ID NO: 160926 - DNA, 1000 bp, Homo Sapiens
catttgtctttttattttacatttaaaaagtggttattgctctaagtggatcagaggtaaggacccctcccctaaggagccttggccttgcagccccattcagcagggatggaagtcacaagacaatgagtggagcctcatgccctcccatgaggaagcccttagtattgctgacatctgccctttatcctgtctctcctccccagtgctgtcacacttgggcaaagcagagtggtggcagacccagccttgagagctcttgtagaccggaaggaaggggcggtcattaggtgatggcttctggctctctggcttggggaccaatgctcttatcattcatttcaacaaatatttactgagtaccaggcttgcactaggtgtggttctcccacacccatccttgaccaccaatggaagatgcagatgtccacctcttcccatgcaggcatctggcagccgtaactcgtcagtcctagggaagagtctaccttccctcatcaagcaccatttttttaaaccagaaaggggcagtggagagagagacctgtcacctcacaccactcaggctctaaggaaggacatgaggaccctgggtaactttcatggaaccctggatgagatggcaagatatgaagaccccagaggccagtggtgatagccagagctgctcttcctgtccgtggtgaatggctcaggcctgccttccagcagcttctactccagaaggggtgttttggtagcccccagaatgccagctgtgatgtgacttttcagttgtccaagctagcatttctgaaactccaagagatacttcctaaataaattggaccagtaccttccaaactgatgatctttcagtcataagggtcaaagaagatagaggatgcaggcaaccagctcagtcttcgggggaatttctctgccctctagaatgcagccttctgatttttgttttccaaaagagacaaaccaggtaacatcttacacgcttgcaaaagtg

SEQ ID NO: 160927 - DNA, 1000 bp, Homo Sapiens
tttttttttttttttttttggccaggtgcagtggctcacacctataatcccagcactttgggaggccgaggtgggtggatcacttgaggtcaggagttcaagaccagcctgaccaacatggtgaaaccccgtctctactaaaaacaaaatacaaaaagtagccgggcgtagtggcacgtgcctgtaattccagctactcaggaggccgaggcaggagaatcacttgaacccaggaggcagaggttgcagtgagctgagattgcaccactgcactccagcctgggtgagagagtgagactccatctcaaaaacaaaatataagaaaacagaagaaaacagtttctggcaaacagtcaatataaaatgagaggaaggaggaggaaatcttatttcctctcatactgcaaactcactcagaattttttagaatcccaataaataagcaaagtctatttcaacttaaacaggtccttcaaactgtgatgtgcctcaaggggccaagatgattaacagccaggacatgtagactgggagactatgtacaacctttctatagtgacttccagtcaaggttttgttgtattaagagctgacccatagccagctgcagtcactgtgcaaaaatttagagaaactaaattttgcaaactttactttgcccactttttattaatacatacatagtaaaaagaatatatttctccatgaactttaataatgcaaaagcatccaaagattttaatgccaattcacattatactgtgatgcttttatagggaaagttcttttgtaaaagaatgctctctcccagaaaaagcatttgggtatattattaggatactgaagaatttctccacatttagaaacattccaattttattcctttcagaaaaattattaataccactcactcagacttcagttctaggtgtgattggtaagcctgaagcaagcattccattgagaaaagtaaaatgtgaatgtcatgatgaatggaatt

SEQ ID NO: 160928 - DNA, 1000 bp, Homo Sapiens
ttcttgtaagaagtaggaaaatatttcttttatttattaatccaatcaaaaatgatgagtgctaaactaaaattcccaaccaaaattccaaagatgagcaaaacgaatgccccaagctttttccatgacagaaaatcctctctgctaagtttaagataaaatagtcctgggaatataaaaatcaaacatgttgatgtactggcaccaactacaccaaatacatttctaatgtcaggaacatatattgcaagtaaaacgatgataatattgagtgctagagtgatcaaaaaatggcgaatccatgagaatggaaaattggagaaaaacatcattgttacagcttttctggcagggaagtggattagagggactgtcaaaagcacagcaaatagtatgcataacttcacagtcatgacaacaacatcatgtgataagtatttactataaccttttagtaattctgactccactttgtcataaaaagtgaggtacccaaagagtgcagatataaaataaatgagaaaacttaaagcaattgctgtattggtaacattctgcattcttttctttgaaggactttgaagttcacagtatatgggcaatattgaggtatggcagagaaatgaaaaagccatggttggtaaggcataagcactctctttggagaaatgaaagagctttggcttacaatcatctgtaacatttgaaatctggaagcctttctctacataatttaatgtcagaggacaagggatggaccattttttaattattaccacaagagcaaagaacatcataaagaaaaatgataaactacttgtgtagccaagaaagcctattttgggaagaagtgcaagagggaacacaatgccaacacatatgattattagtagtgtttgtccatcaagataccaatatctactatagtctccagtcaaaaattctgcaatagcagcaggaagctctgttttaataattaaaagataagatgacatagctc

SEQ ID NO: 160929 - DNA, 1000 bp, Homo Sapiens
tttttttttttttcaaaaatgaaatatttattaccgctttttgtgacttaacacctttttttttttaacataacgtcacagtcctcatacaagtattttaatgtaaatttgacaaagcttaaaggtaacagcattttcttctagtgaggaacacgtgctgagaaaagaagaattcatggacatacaataccaattccacagcagatctgatactagcaaaaacattcttttttttttcaattgaggtaaacacatagaatatctaacatgaaacaattaatagaccgaactctgtacgaagtttgttacagtattctcttgctcctttttatcccccaagctttgagtttctgataaagtcctagttatggttcaatgaccattaataacttttttttgtgttgaggaaagctgcccaacttaagattgttttgtccacaaccaaggctcagaactcctggaagaagctcctgctctgtctttaaatcttcattggcaagctctttgaagaagagtcccccaaaaataataataagaattggcttatgaagcacgaactataaagatctgtttgaaactaaaggacacatttatggaggaacaaaggccgggcatgaaaacacattcttgaagctggagttcgagtgatgaggttcagccaaaagttcatcatgatctccagtgtggttcttttctcattggcccaacaggtttaaaatatataccacagtctctcctggatggtgaattcactgatgaaccaaaacagtcattcttttgggaacaacacacatagtgtggaaaacaaggatatatttttttttctcttctaaaactatttgaggcaacataacggcgtgatcaacagaaatgtacaagtttaacttagttcctatatttatactacagtagttataactctcggagtctttttccagaggatctttacatggacagaattgtctcagtcagcccatgatttcacatttgtgttcttgtt

SEQ ID NO: 160930 - DNA, 1000 bp, Homo Sapiens
atataacttactttttattgaaagtatcttgcattcatgatggatgctttctgggttttaccacatattttaatgttaaaagttaaattattctttacatgcaagtagtgtgaataattttctccacatgggaacactaattataaaaagatgacatcccacatgggttaagtgtctttttaattgaaaagctaactgtccagttacatttctcccaaaaaaccacaaactgggtagtaactgagtctctaggcaatatatttaaaactaagaggattaaaaataaagaaaaagaaaacaagtcctcagatgcaatgaagggagccctgctacatacaggctaatcaatacagtggtactccttgactgcaggaggctggaagacatcctagtagctccactcagaacatttacttcaagaagcctttttccagtttccaactcatgaataaagataatattttgttaattctattccagaaaacttttttgcaagttgttttatttacaatgccaacttttaaaaggtcactaaagttaactggacaataaactaggcagacattgctttacaaaaaagagggaaagcccaaaatgccacttatagagaacccacagttcagttttattcagagcaaagaaaaaagaaactttccatcatactagaagaaacttggccgtaaggtttgggatctgtgctcaaactacacatgcaatgaggacaatattctgctaatacaattgacttgctgctgcatttgtctactgtttgtctaatattaacaattataaacagagcagtgcaactagtatttggaacaatccttacagtgttacagtgtcaggcacaacatttcacttctcttcacaccactggttctctttgcgtacctgggcttcctcctcttcagtaaagtcatttttgatattgaaggtcttgcgaatctcctcaggagttttccccttgatcatattggcaacagtcttgcatgtaacatca

SEQ ID NO: 160931 - DNA, 1000 bp, Homo Sapiens
tgagaatacaagaaccttttattttccatccagttgggcagcagggaaaggctaggtgggcccagcccgcccttccttcctccagctggctggagattattagccaggagacagcagccctggaacccagactctgtctcccccttgaggtcacagatgttgaagttggaatctcgctccttcccctgactaccatcctaggctgggcctcaagactagtgaggcctgtccccaccatccctggccttgttgtggggctcaggaactcagagtcccagtgttgagtctgggagcactaggtcttcatagttccaggcccagagctacagctgggctgggagcgtgtgtgtgcactgtaagaaggagctgatgatactggccacgtgctggggttcgctcatgtggacacagtgattgcctgggacttccacaaactggaaccgcttagggacttggaggcctcccaggggtctaggccagctgagttgtgaagttgcatggcagggacagggcagggccgaggccagggttgctgtgattgtatccgaagtagtcctctttgagggtggatttcattgtgtctatcatgaacgacagggactccttgtcagagtaattctctcttggatcaaaatatccgtggactgctttgatcaacaggacatgggcctgcagcttcctgatggaatgcgcacacagctccctgctgacgaagtcaatgctgttctctgcctctgcagcagctgcttcaggctgaacacgtgcgagggctcctgggaggcctctacctgcagcacgtgctctatggctctccgcttgtaggtcagcaagttctccatttcatctgattccaggagaaagagcggcgtgtccagcaagataagtttatccaccatctcggggaaggtacagaaaaacattccgcccacgacgccaccgaagctgtggcccagaatggagaatcgattccatttcaaggctgccacaactcttcggatct

SEQ ID NO: 160932 - DNA, 1000 bp, Homo Sapiens
ttttttttttttttttttgagtgaaatcaagtgcagttttatttaagaactggaaagaataatcagtatctgtgaaagaaaatccaatttagaatatttaaataaacatttatgtaaaaagaagagtagaataattactccgttcagttcctctccttgcaatgggataggctgcctctgctgcagatggctgggtcttccaaacccatgacaagtgccacggcctctgcagcagtggcccagagagtaggcacttcccagcatgacagagaggccgaggccttctaaccttgccaaaccactacaaaagcaaactagggtgggcaagcccaactacctaaggcaggaagaaagtgcagtgaagggacagtggtgtgctgtgcgtatcgtgggggtactcctaagcagctagctgttggcgagatcttacaaagcctgatcggctaacgcagcttcctggtttaggaacattttccccggtcgtatcaatcccccaggttggtaaatgaacagaagggatgaataaagcctactttttaggctcaaggagcagctcgtgaaggggtggcaggtgcgctgctgccttgttttctgtcctgctaagaggctcaccccgcgacctcttctgtaaactgccactcagcagcggcctgcaagccctcacgaaaggcttcactctatgctgtttccaggtagctttgttctgacagtacctattttccacttcagaatctccactttaaaacctgcaatggaaaaataaatctcttgacagttttttaaatcgagaaaattggtgatgtggccttggcagcaaatacccagaaagcctttacctcattaacctgattctccacgggccctgccactgctaaatttataaagctaaaaataatctcaagatcatggaactaaaaagaagtcaatcacttaccaaatcctgtccttaaggagttcatcttggctggttttcaaaccaatcaatgaacccgtaagcctc

SEQ ID NO: 160933 - DNA, 1000 bp, Homo Sapiens
agaaacaactagtgtattgatttggggaggagagaaggggtgcagatgggaaatggggaggcaagggctctttagcgtttgccaaaaccactgccacacccctccaccccctcttgccttcctcctccacggtgggtgccagcaggctctcccctttccagtgacctccctctccctcctcccagcaccccacttggcttcaacctccagtgactgcacagagcccacccagggtctaaagctagggaaggcagctcaaactcacctttcttctcccttcttccacctcccacctcattcccatctcttgtctaaataaaatacagaaaagcaagcgcagctggtacctgggagaatggactcaccccggggctgggggcaggggtggggactgggggcggggcaggcagaggaacctcagccaggtgtagtggaatcacagcaggccaagcccaggggcccggctcaagctgtcctctctctctctctctccctctcggaggctggcctggcagtgagcctgccgtccagaggaggctggcggagaagcctctatgcctgcctctcaggcaccatgtcacagggtccccggggtgggggcagcagccagggcagaaaagcagaagctagcctctataaaagcacccctttcccttggcttctagaggaagccctctttggttttaaggcagatgtggagtttcctggaagcagggaaaaggaagggaggagaaattaggattgagatagatgagatagatgcttttttttttttttgcttgtgtttttccttcagtataaaaccactgtagaaaataacttctcttagaaaaaaaaatacagaagaaaaaaaccaaagggttatttttctttggcttcaagccccctcccatgacgtgcagggcagggggtgggcatgaggtgaggaggacgcaggaagcctccacccccacccctgcctggcaggtcccagattacatgatgctgcagttctgggggc

SEQ ID NO: 160934 - DNA, 1000 bp, Homo Sapiens
ttttttttttttgaggatcttgaaatctttattgagccaattctctcaggccccaggccctgatgatgactgtcaccccaacccctttccccacaggaggcattcagctgaggccaccacacattacatacattcacgcacttcataaaaaacacctgagggagagaccctggctttgattagcaaataaggtatgaacctgggccagtgcccacattcacacagaccctggcccagggacatcctcctcatatgaagcattaaggcacatgctgtactgtgagccagcactccctgacctcagggtgtgtgaggagttggcactgtagagagaaaccaagactcttcctcaatgcctgccttattctgagcacccacccttagctctgataaggatatcctgagaccacattcaagatccaaaacctttcctcatagatgagggccgtcacccctgcaaacatgaccctgttctgtttgcagggtctccaagattttcacttctgagacaaaaattgaggagacttctgtctgcaccactcctgctgcaggcctggagcagcttctcagggcagccctggcccactaaggcccagtaatgagggcagaggggtgcagagccatacctggctacacccacaggtggacacagggagcaagctacttcgctgttctctgggctcattcccccagcacaggagggcctccatgcacactcattccacaggccccactggccctgtcacactcacacggcacgcacttggcgctgcctgctgtctgccttccacctgggggtacaagaggtcacccaagggggcaggcgtgcagggcctcttggatcttctggcggcaataggagtacttctgcaggatctggcggaggtgctcctcctcctcccgctgcaggatacgtaggaagttatgtagttcaggcatgctgaaggcgtcccagttcacctccccagagtcattttccttcaggacaaagctcagggcc

SEQ ID NO: 160935 - DNA, 1000 bp, Homo Sapiens
tttttttttttttttttttttaatcttaaaagaagttttatgggtatagatttaagaaaaacaaatggcaacttccagcaactggtatcagattaaactatagcttacattctgtgtttaaagacataaatctgtctgttcatatgttggttatgacttttacattaaaatatcatttaaacgaatgagcaatcagtagtataaacagagttacaactaaatttggataaaaatgttcaataattaactctagcacgtatacaaaattagaaagcctatccaagcacttagtaaaacacagaatatttgtcatatccatagtttattttaaaaaactgttaaaaactaaccatacaggtttattaatatacttaaaaagtttgttccctatgttgaagtaaaatacattagcaacatcttccggacaccatctttataaaagtaaaacttctagatcctgaaatgtactacagtagagtctatagtttacacttttaatcacagattggaattcattctccttactcccctacttcccacatgtggcagttattacttcaaaattaatgacattcactcatgttatactaccacagatccttaaatagagtacatactgcataattactaacagagccagtcttctctatttgttgtcacatatttcatataagcatttgacttaaagtacaaatagaaatactacatcccataattgtaaacattcaccaggagcttccatagtacagtaagtaacagaggtggcccaagagtcagtcaagtgttcttcactcactggatactgctgagattaggaaaactgttttgaaggcaaattatcctaagtcttacttgtatttctataaggatgcagttctggatatatactttcagttgaaaacacctgaaagtcattctatagtctacattaagcaccactttcacttacctgaaatattttgagttaaattcagcagtatgtacggttgttaatatcaga

SEQ ID NO: 160936 - DNA, 1000 bp, Homo Sapiens
ttttatagttaaaaataatttaattgcacattttaaaataactaacagtataattggattgtttgaaacacaaaggacaagtgtttgacaagatggataccccatttaccctgatgtgatttttatacattgcatgtttgtatcagaatatctcatgtaacccataaaaatacactcctactatgtacccacaaaattaaaaaaataattttttttacaaaaatgaatctcacattgatatatgtgtattaggaaaatattttcattaagaaaatatgaaatctgcacctctagccctctgactaaatacaaggcagattatccctcaaaagtttgataaacttggattaatatgaaataaatatgattaagaaatccatcacatttacatgatatttatacactattgcctatcttagattataaaccatggcatgcaatggtaaagtcttcttactgttcttgcaagttttcctttgattattcttgctaggattcaaatataccccaaagcacaacttttatttgaataaaaagtgatccataactttaaataaataagttcaaaaatataaatataaatgaatataaatattaatttatatcacatgtaggcataacacaacacaataaaaaagataactgtattgtgggtagggagaaaatagaaaatcaagtcattagaaattcaggtcttttttccaacacaaaacagaagtgctcaactgccatctgtatttaactgtaaacatctcattataaaccaaagaagcatgtctcatgatgtcaccggatgtggtactccctgaagcatttggcatggacacccttctggcacttctcacaccgggtgttggtctgtgagtggcagagggcacaccgggtcctcttgtcctgatggataatccagtgcccaatcatatcgaagcggctctcagtctccaaccgcctgcttcgcctcccttgagatgttgtgtcagcattgctctccagatacaca

SEQ ID NO: 160937 - DNA, 1000 bp, Homo Sapiens
tacagggagaggaaattctgttaattccacgtttattaatcacacagctctctgcagactagacactaaaacacacaattgtcaaaaactagaaaaatgagttatgtccacgttttaaaagcaaaactttataaatttcttaccacactcattcccaagttttatcccacaaagtatagcatgaaacaatgacaacatacatattattcaagtaaaatgctatttaaaatagctgcacacaggtaattaaaacactaggatccagtttttagaggaaaaagtcatgtggcacaatttcaagttcataattgaagttaacagtaaaacagatttgctcacatttgcttctgatctttatttctgctgtctctctttagtagaataaagaaatggcacttcacataaaatcatatttaaaagctactaaaatggataaacagatgcagatcagctctttaatgagaatccctgcatagctggaggaagttcaaggataattgttttttcaaggcaaatagactcttgttacgtggctaatttcatgtacattatcatcgctgggaagttcctgctgagaactcacggtagctatgccagaaaagtactttcttcacaggaggtgttgaaataatgccggataaatgcaagtaaggtcaatatctccctcttggtctagatcaggagctggcaaactttttctttaaggagacaagtagtaaatcttttaggctttgcaggctatactgtccctgtcccaactattcaactctgccaagaaagcagtcccagacaataccataaatgaatgggtgtggctatgctctaataacattttgtttatggacactgaaatctgaatttcatagaattttcaggtgtcatgaaatattgttcttcttttgattttctgcccaatcatttgaaaacatataaaccattcttagctcacaggttgtataaaaacaggtggcaggccaggtttgattcgtgggccatagtt

SEQ ID NO: 160938 - DNA, 1000 bp, Homo Sapiens
ttttttttttttttttgtgttgtttttcattttcttttttttttcttaaaaaggacttatccaaataatctggataataaatcgtttgcgtttcctaagaaactgggtttttcttttcccttgtggttttggtgtttttcttcttctttgagccttactagcggtctgaagctttctttctttcctttgcctttttgcttttggacaggagaaagcagtttgtctgaattgtacttgactcttcaaagaggaaaagggcgtggaagcagaagggggcttagggagaaaggagaaatcaataacggaggaagaaaacgagaacggaactaaaacccatggaacccagaagttgccgggctgagggtgggggggtggagggagggcctcctgcctgcccgcccccaaccaactgcctccagaggcttcagccccatcttggttcctgcacagagatctcaggccaagagagagagagcgggggtggagaaggaactctgggccctctaacaacagagtacatggattttctaaggctggtcatggtctgggggttggggaagaggaggaggagaggcaactctggctgtgaactgggaggaagcagaggccaaacatccccatcaggaggctgccccaggcctccctgcacctgcctcctgccagtccctgccagcccgctgtcccaggaggctcagcagtccccgtcggtggccacagccaccagcatctcactcttgcccatctcctccaaggcactcgccaggctgttgaggtccccatcgtcctgctgcagagcttcccagaggtccaggatcacacccgtggggctcgctttggtggcaaagtaattcaggtaccggtccatagagagcttctgtgctaacatccgccagtcattgccccgtgagttgggggcatctaggctgttgcatatcttctggcggatggacagtgggatcttgaaggcataaggtcccagctgggtggtgacagtgctgcc

SEQ ID NO: 160939 - DNA, 867 bp, Homo Sapiens
tttttttttgtcagggtcttatagaaaaatataactttaataaggaaattcaactaagggtaggagtactccaggaacaatggtaatccccacatgatgatctgattctcttctgggagcaaaacattgcaaccagacaggatggacaaggcatctaaaaacccagtatccttcaccttccgaaaggagggagggactgtagagttgcccaggaaaaaggtcaagagtcttccttctcctggaacttgcagttggtacaggtgtagaagacagtttgcccttcatcggctgaacgcatctgtctggtgtggtatgccattccttcatgaccacatcgagggcagcgcctgtcaaccacaggtccctggcactcaggcccttcctccaccgacataggcatggctgtccccagttggtggaacacaaccgaagtcttcacaaccttcccctcaaagtcccgaacgttgatgttgaagccacagcgaatacaggtgaccgtatcctgagccccgggcagaggcaggaccgagccgcaatctgaacagaaatccaggtccgactgaaagctggagcaagtattggcgaggtccatgacagacatgcggtcgggtctgaggagggagttggaagtttattaacaaaagagagaagagttcctgtcccagaggtcgtaactattctgtcccaggacctaggagtatataacccgaaccctcctgccacgcacgcctcctgcctctgcgaccaaggagccgaaacgcccggaattcccagacagcgtcgggtactaaaggacttggaaccctttccaggggccggtgagaggagttaaccaactccgtgggctagagcgccagctctgcgccc

SEQ ID NO: 160940 - DNA, 1000 bp, Homo Sapiens
ttttttttttttttttttttatttttcatttatttatttttcaagattaagtctcactctgttgcccaagctggagtgcagttgcgtgatctctgctcactgcaacctccacctcacgggtttaagcgattctcctgcctcggcctaccaagtagctgggattacaggcacgcgccaccatgcccggctaatttttgtattttcagcagagacggggtttcactatgttggccaagctggtcttgaactcctgaccttgtcatccacccacctcagcctcccaaagtgctgggattacaggtgtgagccactgtgcccagcaagaactttattttttaaactttaaactatccacaattaaaggggaatcttctttaacttgatcttttcttctatatttgaaaagtatctcatctttgtcaaaatttccttggcttcttcaaagtcatcttgttcaaaagcactgctcacattgtcagtaaattctttctgtttagctttgacaatggattcaatctctttcatggcagcttcactttcagcttctgcgagtttttcattgatttccattatttctatgaggaattgcctgtccatttcataatctgtcctttcaggaatctctattccatggagctttagaaggtacagtcctctgctcaggggggccaggagggtcttataggcatcattcaccagggtcgaatgcttctctgagaagtccttttcagtctgagacctctggctgaagaaatctgggtggacaagacgctgcagttgctggtacctgtgctggagcttcgctgtatcaactctgaaggaacggttgcagtccataaggctgaagtagtctcgagtggggtcaggtgcctgcagcgctcggcactgtgggcagaagaacctgtcctcccgcccggggccccatgggccgccgcagttccaacagcggggataattgcttcccgcctgcgacgcagcatcgcagcttagcggtctcctt

SEQ ID NO: 160941 - DNA, 1000 bp, Homo Sapiens
ttttttttttttttttttacgatagatcacagttttttattcttaatgtcacaagcaggagaaaaatctcacattcatactaaaaattccaactagactcaacaggaatgaagtctctatttgtaatggaaagtcccagcctcccgctgccgtccagtgcgtgtactgtacacatccacactcattctcactcagggttcccggaccggctgtcctgcctgcggaactgaggtaaactagctcaggtactgacactaggagggtctaccttacataaggtacaggtagaagcttgattgctaggcccaggcccacccagaccctccaatcctaacaggtatttaggcttgaggttcactccctcctcagctgcacacgcagccaggtattaacgaggatcagagctgttctgaggggtgggaaggagcagccccgccaccactcactcaccctcagtcacatcggggagggggcaccagttacatttacatcacattatttataaaataagaattacatttcatataacatggccagaaggagctctagtcccccaggaaagctgccggggacagcatttgagcctcttctttgcacaggcataacttaactatacagctaattcctagttaatagcatttatacttaaccacctcaatgaaccaagcttgaaggaatttaaaaggcaatttagcttaaatacaaaaataaatttttgttaaaaaacgtttaaatatttttttcttttaatttagacacacgcattcatacttctcccaaagaggttgggcgtggcagcaaggcgcttgggcctggggtatgtggtttcagaaggacggaaggaaaggatgggctgcagagggccctgtttgggaaaaataggattttaaaaatatggttcattaatttaggttttctaacatctactttgggtgatgtagcctccagtgaggtcagttaagtgggacagaaacggcagagggaagaggtctttgcttcc

SEQ ID NO: 160942 - DNA, 1000 bp, Homo Sapiens
ttttctcctcaggataattatttattattcatagtcatcagcatcttcattaattattcatatgatccttaattattatccttaacaataagagcagtaaatagcagaaaagtccttgaggtgcctaaggcccagggccgggtgcctccgggcagttagaccagctaatgccctcagggcagtggggggaccacaggccccacctactgccggccctgcccctgcccctctcactggggcccaggggactgcaggagaagatggtcccaagggctgggggaggagctgtgctttcgagttcctctccccttccacggtcagggcctcctgagcagggcctccaaggggagcggcccagcagcgccttgatccctgggtgagccacgtgtccacactgggcagccccactaactgcccgggtccgagccgtgtctgtgcaggggctgggaggtgagggcccccagctggcccggtagggagaggcgtcgtgtggggccttcttggggaagctctggggcccccgggggcagctcctcacacgccatgaactgggaaacctgagaaagcgagtccaaggtgagggtggggagggggctgacgggcaacagcggggatgtggaagtggggccaggccccggggtggtcacagcactgtaggcgggcgggaccagcgtcatctgcctctgtagcagctgcaggacagtggccatgtctgcactcagccgggtctccagcctgttgagctggcgctggagggcatccagcctgctctccacgtcgccccggggccgccgacccgggctggagagggggatgttgaggaggctgggggtgggggcggggcatcgagggagctcctggtactggcggccccgactgtccccccagaagctgaaaatgttggacactcctgagaaggcgcctgacagggggttgcaagtgtcgctgctcttctcgcagtcctccatcaggggctccccacccggcggctctccggggg

SEQ ID NO: 160943 - DNA, 1000 bp, Homo Sapiens
ttttttttttttttttttgccggggtatcattcattctattttatttaactttaagcagggcttgatcagaaagaagagctcagaggagtgaggcaacaccaacaccagggcgtacgatacacccgaggctcctccgacaccagttccagcccggaagggcttggaatggcctgccacgccggggcaatggagcgcgtgaaagccaaaccttgggacccgaagagtaatttgactgcgaaggcaccgtcatcgtcgggcaccccctgtagacgggcgcataatagctacatctctggagatagtgatggaaactggggtccgatagatggagagaaggacgtaggataaggcttcttgtggggtgaagaggcagagggcacctggagagaggtgtggcatggagaaccaggggttttccctagcagagggcggcttcgtggacttcggccaaccggcgggtgcttccctcgagcggccgctagatggtggtgctgttctggatgcttccagtgggccccgaccaggtctggacaatgcctggcgcccgtcccccgcccctcatctacacacacgcaagaattcggagctccatggggaacagaagcaagatatccgtaaaatcaaagtctagggggtgggaatgaaaagggaaaagtgaggaacggggagccaaacccaggaagacgcctctgttcctgcacattccctctcctttatatactcagctcttggctgtctccagtatgtacccaccctggtcttccaagctgggagccactttttataacacaatcacagtttcacaaaccccaggaaggttccatgtggagagaggttaagtttcgcccttgcccggggaattatgacactcagaatatccccttggtgtaaatggaagacacctgcgctatagcagctgttgtaggcccggtccgggtgggagggcatacttcttatacatcggaatagagtctcctgccttccttggccttctcgaga

SEQ ID NO: 160944 - DNA, 1000 bp, Homo Sapiens
ttttttttttttttttttcagcagaaatcacaaatttattaactcttaaatatatcaatcagtcctttaccattatggcaagaaatatatacagtgtcccatggtaaactgcagtgtttcaaaatgatagaagataataaatgtgtaattcatttgtggtggagagaacaaatcacaatttcctcacatcttagtgcggaagacaaacttgatctacagtaatacttcaacaccacatgctaagttaaaagtgtaaaaaaaacactctacatctatttttttttctttaaatacatgtatgccacgtatagctgcttcacaaaagggtaaaagaaattaaaaagagaaaaatgaggccattattttttcacagatctcattggcaggttaacatggctcaatatatttactgtatatatttattttaaatatatatgttgttttaaattgtgtaataattatcagaaaagcttcaacccatctaccatacatccactagcaataatatctaagatgattagtaatcaacacagagaggtgagatgagagaaaagaggaagggttgtttttgttattttgtttttcttttttgcttctgctttaaaaataggcttctgaggactgtgaattactatcgttaaaataacaatgatggagattccatgcactgtaaagcacttcagggaagagaacaaaaatcacaggaattgaatcaacaaaggaaaaatgagaagcacaaagaaaacctaggacatttccctttttgttttaaactgggaaattctaactccttggaggaagacaatgatactctgattcaagagagaagctaaaaaagcacaagtcacaaagatcaagttcaaaacacttatgagaatggcaaacatttgtaagcctctctaacactagaaaactagctagtgatgatgcagaagtgaccctttcattccccaaggcggaggtgagtgcgtttgcataaaaccccctctgctatcaagtt

SEQ ID NO: 160945 - DNA, 1000 bp, Homo Sapiens
tttttttttttttttttttggcaccattttgctgtctgtttatttcaactgtacagagaagcttaaacacctgtggaaaaacacgaaaggcttagttgtctcttaagttcatgtactttttagtgataaatacacagtatttaactttatacacctgataaaaggaaaatgcatagtagaaagggtcgggaatgaaacagaagcatcgggcattgaatcgatcacagagtagaaaaatctgcagtccccagaaactcggcctccagctggagaggggaaccagcgtaccctgaaacttccctagcaccttggaagcaagtggaggtcatggttcttccactcggcaacgtgaagctccccgctggaagacaagtgagagcgacaggccaggcctgtgtgtccacctgcacaggcattctccttgttccagaaaggctctgaggacggaagacctgcctctcaggaaaggccagaccagtagggagaggcctccgcagccccaagtgtcaacaaggggctcaataaggctttctgggagccactggcagctggtgggatggaagggggaggtggaaaagggcagaggaaatgggaagtggatggagggtttgtgcttccttcgaggccacaagtgcaggccacaggttgcttacaccaaattggtcccacagatgagctagcaatggaagaaattatgggcgtcctctttgcccactggaagagctgctcataacagcacctcctttcctgacagagctggcttttgaaaaatcaatgtgctccaagagtggcagctcaaatgctctgtgtttacagccatcttggcttatccttttcatgtggggcaggtcctttccacagctttctttggtgtttcttcattaaaagaaaaaaaaaaagtcatcaatgtgggtctcccccaccccactgcccccacagctgggtgctgcctgattgctggcattccctggaagaaatcttagatggaaggttccgtggt

SEQ ID NO: 160946 - DNA, 1000 bp, Homo Sapiens
ctaacttccttcaagttttcaagcatgggtcacaaacaaagaagacaagagcaccatacaataattactgaaaatataagcatacaagtgatttttctattaaaatactttatgaaatgatatgtaaaattattatacaggatgaattttattagtctctgcttttaaaagcttttaacaagaagtctgctgctagtcctggggacagggccccaatgagaaccttttgttccagaagtggaatctgttcccggactgtggggtgggtcctgaaatgctctaacacactttcctgaatgagattccacatccaaactttctgttgcttccgtcgtttggcagtcagctccccactggcaagcattaggtcctggaaatctttcattttatcccacatttcagagatcccctctccacttcgggcagaaatacgaattacctttggtttccagacttgtgaacgtttgcggagtaatttcagtgcactcacatattccgcttgtatccttcgagctggcacaatcaagtctccatcagatttagttacagctaccagatctgccatctcgattataccccttttgataccctgcagctcatctcctcctgctggtggcagtagtaaaacaaacatgtcaaccatgtcagcaacagcaaactccgactgacccacaccaacggtttcaataagaattatgtcatatcccgctccttcacacaacagaatagcttcatttgtggtccttgtcacgcctcctaaagttcctctagtaggagatggcctgatgtatgcattcatatctcttgataactcagtcattcgggttttatcacctaagagtgatccaccactagtacaagaagaagggtccacagctagcacagataatttgtgccctctctcagtaagcatttttccaaaatattctataaatgttgattttccagcaccagggggcccagacaatcctactcgaaatgctagtggttttcctttatt

SEQ ID NO: 160947 - DNA, 1000 bp, Homo Sapiens
tttgaagttattgagttggatttattgtccttgggagtaaaaatcatctggatttgaatattggcttgttgctaactgtgtggccttaggtaagtcacagaatctccctgagcctcagttgttttatctgtaagatgggaataatagattcgttgtatggaaagtacctaacattgtttggcatgtggcagactactatttagggataactactttatccctaaatacttagtgtgtatttcctaaaaacttcactgtgtatttccttaaaacaatggcatttattctcttacatagctttggcacaattaccaaaatcaaatgcctgctttcctcctctctgacagtttgggctgtcaggtccatttcactgggcctgctttacctcctcaccagcctctgtcctcttgagttaccgttttcttgcttcccatttcctgatggcagagcctatttgtccatgtcctgctgcagacagggtgttcattcattccgcaaatgtttactgagtattcaccaggtgtggctcttaggagagcggaaaggacctcctggactcctgtaaacccccattctttccaagtcagatagtcttctgctgctggtacctgggtgggcaatggccaccatgtcggcagctgtggtgccctctgtatccagaaggtctcaggttgctcctggcggtagtcgtgaggctttgttggggcaggagtccctgcttgtgccagctccattcggtagtcatggtgtgtcacagactcaacctcgaagagcttccttgtgggttcctgttctgcctgcacctctttacagatctgatgctgcaggagcatctccagcatggcttcacgcttccctcgaagtggccaatagacgtttcctggtggctggtacgagtctttctgggtggtgctggagggcatgggtgactttagttgcatagtcagcagtccccggtgtccgtgtcggaagaaaaaactctcagagccatcctgcatgc

SEQ ID NO: 160948 - DNA, 678 bp, Homo Sapiens
tttttttttttttgaaagttagggtcctttattgggggatgtcagcagagaacgtgggacatgaaaacaagtcttaggagtttgagaaggggctcccaggacaggctcctctgctttaaggagcctgtcctgggagaataagcagggccccagtatgtgcagaagttgtcagggggtgcccaggggtatggtgaaggagaggtagtccccaagggcaccccagcggggccggtagatctggaagatggtgatccaggaggtgagcactatcacccagaagaggaagcccacagctgagcgccagacatagcctttgatttggctctgttctgtgtaggctgggacaaggaaggcctctcggaagaaccagaagatgttgaccaaccagagaaaaggcaggaaagcaaacccccccaggtagtacttccggcacaggttcaatttctcctcattggacactcgctccaggttcatagctgcgctggggccgggtcgtcccaagggtctgcggggcaagacccaagccttgaccctaagtaacagatgcaaggatcacgaacaaccacgccccaggagagctcacttcctccggctggggtgccttagctactttcagttatggacgtttgcgcgagacgccccaggtttccctggagattgtagtcttctttgggcgag

SEQ ID NO: 160949 - DNA, 1000 bp, Homo Sapiens
ttgatggttatcatatttttattagtaatatggaggtgctatcatctgcacattgtttgcatgaaccacaaagctttaatccaaatagttaagaaaaaataaatccatgccatttatttcaattatattagaatacaataaatatacaataaataactgaatttcttttgggtatgtaagaagtagcatactagcagtaatagggaaaatagggcaagatatttaatggccaaactattacataagcttaggaaaggaaattaagggaaagaaaacagttttgctattattacctcagcatgacaatgacaaagaagtgtgatttttccaggcttttctcagaacccagagatgtgtgaagattaacctgctgggctaggtttctggagatccaggtgttagccctgactccttcacaattatattctctcctgccctgattttctacctgtaatagttgaggtttgaactagatgatggctaaaattcctttaatgaacacttctggtaaccctttatttgataaatatatccaggtcctccatcacccaccacttcccaatccctgtcttctctacctctgacaaaattactgtgtacaacattcaattttttatgaatctgtcactaattatttgtgtttatatatacactaacttctttatggtaactggttgaaaaagcaaaattctaatttctgttgctaaaatttagttactaaacaatcatcacttttacattatctagtcctaataatctagccagattaacatggcatattagtcagtattcttacaagaagagttttggtgtagctgtgattcacaatagttaaagatcagatcaaatcattatgtatccatcgcttttactggcttaaaattgacttagctacacagcaactaagagtacagtaatatttaatttctcccttttatgataatccagtgacaacacgtaagtatgactttgctactaaaaggctatataaatatccttt

SEQ ID NO: 160950 - DNA, 1000 bp, Homo Sapiens
tgaaacatctccaaatgtacaattttattttaacagatttcaagagtccattttttaaaaaatgagcaataaagaacctctatcagtgagacttctcattttatagcaaatacatttttgcagcttaaattttcttgaattcatatacgcttctgtcatttaaacaaacttccagagaaaactggtctctatatatttaagtaacaaatttgacaaaatacatatttatacatatatagatctctaatataaatattaaatttgaaaaaatcaaatgtgaagcagaaactgctatacaagtatattgtataatatttattttatacattaaagtatttggttgaatatacttcaattaggtttctaaaaaacaccattatctgcttcttagtaattgcgacattcttgaaaagcatgtgaaacgggtataaacttcaactctgtgcttaattcagaattcctgtttgttctcctcaaacttttatcttcctaaagcatcttgccagagactacaaaggaaaggaacatttacagagcactataaacatgtctttggacagtaaaacagtatttattcttctacactcttgattttccaatcatatcttcctcaaggcaatgtttctttggcccaatttgtgcaactaaacataaaatttcaaaacacaacttttaacagtgtgatatgaaatgcagtggcagtccctgcttttcgcctgctggcttctttgaaagaaactgcttggctaagggactcagtagagggctgagatctgcctgagtataaagtgctacctgagctatatttacttcttccatcccttggtacaatcaacagcaaatagacaaaatgaagttaccttcctgagatacatggcttactttgtactctgccttttaggagatgaggtaagacatatacatagatggcttttactagccaaggcaatgtaaatggactaagattctcatgtgacttgaggttatctgatgaatttat

SEQ ID NO: 160951 - DNA, 1000 bp, Homo Sapiens
tttttttttttttttgagaatttttatatgatttatttaataataaaccaattaaagatacaaaaatgtttagaggattccaaaatttaaatttttgtttaaatacaaattcactctgtaatatgaaaacatagcattagacctctaaacataatgatttttttcatctacaaaaatttctgttatactagaaaatttgcagaagacatttttttcttgtgacattaaatgtacattatttacagttgaaaaagtaatctaaaaacatttcatttcagaaagttggatatatatgttatctttgtatgcaaccccccccaagtccgcccccagtaaaaaatgatccaaaatataaagcaattatgcttttataactgactactcagccagattagcccaaggctcaagttgctttcttggcccttaagaaagagtcttgactctctcaaaatagcagtattctgtttagcacttagcaacacaagtttactaatggaccgcaaagcacagtggcctaaagagttagtaaacaaattatttaggaagaatttatggcagatcttacccataacagatgaataaattttgttgggtcacttatttctctgcaacattttagctattcttacattaggaaataacctgataatgatttaattgacataacttgaaaatataggtattagaattaaaaaaattagaactagaagagaaagtggtgataatctagtctaatccaatacatctcttccttttatgagaggaactaaagcccaaagaggtcaagattacatagctagttagtgggagtgccattcttaggctgatgcttttatactatcctgcttctgaaacagggtcagccataccaccagcacctccaatttttcatgttattctacatattcatagttctatattatatagtgcagtcaactaaagtcaatctaagtgacaccataattttaacaaagcataaaataggttttttgcatttgaa

SEQ ID NO: 160952 - DNA, 1000 bp, Homo Sapiens
tttttttttttttttttccagcaaaaaaatacggctttattggatctatttcctaactacaaagacagctgacacagacatcaaacgtttccttttcaatgacagtcccctgagaaaggctgcacgtgactcctacagtgccgggtgcagggtacccagccgcaggtgggacgcggccacacgtcttcacggttacgtgcagaccgacgggatggccttcaggttgtttctttccgtgagtgagacacaagagacgcgattgtgccggagcgcacggtacaggccgttccttctgcgggagccctttctccatcagcgacgttctgttcagtgacttcacagccggagcctccacccgcaggtgcaattcaggcaggttccataagggggcattaattcctaaggcacgagttcaggtcaaccgtgtttcaatgaataaaccatgctttttggttatatggaacaatagatcgctgtgagtaatcatacgtaataagcaactaattgtacagagtgcccagcaaggcctacacaaacctacctgttaacagtaactcatctgaaaacacacaacgcagggctgagcattaaagtggcgtttttggtattggttttcttagatgaagcagagagtggtaaggcttctgtgaaacaatcatcttataactgaacaaatatattacacttaggttgcatgttatttacaatcactttctaatgttgccgtctggtaacctacagctactgtcaatcacagctcctggctttctagggtcctcctcgaactgcgtgagacgagaaaatgcacggccgtccgaggcggcgatggacgccagcaagagcagcgactggagccccagacgcaggttccaaaacggatgccggttattgctgacagggaagccctcctgggcgaggacacgtcggctctgttattatttatacataaatagatgcctagatatgtacacacatgcaaatgcaggctatcctgtaacag

SEQ ID NO: 160953 - DNA, 1000 bp, Homo Sapiens
cctggtagctcctctccaaggagagaagacagatggccccattctcatggagagcacccagagctgctcaggcacagccagcaactgataaccctggggctcacaagggaggggatccagacaggggcgtgggagcaggaagagatcttcccagccagtgggtgcaggctagtatcgcaagttctcatctggccatgtgactgtgtctctttcaggcaaagcactaaagggccagtaccagtgagtggccccacctgtgtccccgatgctgccgtcacctggtcctccgcctactgtccctctcagtgccttctctcagctcccaggccaacagtagccaaacccctagagacagtgatgcctgcccgcaccctggcctggtccctggtccttcactggcgccttctcggagctggcccagggggcctggagcatggacagtgtgggcgctctccctaccttgcctccttttttcttaaagcaaagtcacttctccatcacaaccagatttgaggctggttttgatggctgggtccttgggcctggccagtcttcctcttagcctctggatctagaagggaccataagaggagtaggccctggttcctgctgtcctggtggctgggcccagcaggggccctcactcttgaagtccaggactgggtctgacctggtgggagcacctgccagaggatgctctttcccaggacggatgggccctgtgtctcaggagtggggttgggggacagccttcagcagcagctcacaccctaccttccccagacttgcactggggtgggatttggagtgatgggaaggtttttaagggccggggatggatcttttctaaatgttattacttgtaaataaagtctatttttctcccgtgagtactgagttgacttgatcggtgtgggaaaaagaggaatataggctctttgaagcctaccttgttcctgctgagtcttccataccacctcctttctctcatcccttttcc

SEQ ID NO: 160954 - DNA, 1000 bp, Homo Sapiens
ttttttttttttttttttaatgtaaaatattttgctttaattgtattttatgccttgattaatgaaacatggaaatattgattttcagttttggtcacctgaggaacctatctttgtttgcttttggaaaagcccattttctaaacagatacaatattgccacaacaatgtgcagaaacctttttgataataaaaaattgttctttgcctctaagtggatatttgcaattattttctctctcctaactagactgtaaaaagggctgctttagatcctgtagcttactccagttattagttattaacaaacacccaagtctcgaagatatttctaattaaaaaagaaggcatattcagagttctttttaaataaatgttgtttacttttataggcatctttaaacttctggattttggtatgccatttaaaaatacttccagatacacatggaaattagtaatactgaagccgtatccttgcaaacacatctgtcagtgtcaaaggtttcaaggtttttcttaaaaaaagaaaacaaaaaagcaaacacctatactgcccaaatgggaggattagatacatggttagaaatccctcaggaaaagtgttttttcttttcttgttgctgccttaaaaatagaataatgactatttctgatggatagagacatagcattttaagctggtggtgtgtaaaatcccataggtatgtgcatgactttcagagagtatttgggggggaggttaacaagatgtggtgccatttataagcagtgttattgtttttgcttgccccgctgccacaagtcagctaagtcataacaaaagcttcaaactgatgctaaggaaggccatgccctttggaaacaataaattcccaatctgttttatgttatgtacctgacatcttttcctgcattctctaccaggaaataaagatgaaattaaatatcaaaattctaatcgatgatatcagtgcaatgttcaggaactattcattaa

SEQ ID NO: 160955 - DNA, 1000 bp, Homo Sapiens
tttttttttttttgagtttttctaaactttgagtttattggttttcgagacaaacagtcatgccaaagctgacaaacttgtatagatacacacacatacacgcacacacggtacataaagcacctttccccagggccacgtcacttgccattattaagaagtctatcctatagccatatacacgattctgggtcacccagataattagctgaaaattatcttcatattcgttttccctccacaggaatgtttcctgaaaagaaaccccaaatatgagggtttctgaaagagctttaaaaaatgttgcctgccagtagcacatggattctcttttcagggtttgtatctacccagctgacacacccattcccccctcccttccccccagagcaagtgatttcttgttccaccctgcagcttactattggcaaggcatggcaggagtgaatctaggttccgtgtaccaccagggtaaattgccctctctattgcagtccttatggaaaggcactttttttcgggttcagcacgtccccatgcattcacaggtaccgaaagtgacatacacatacattgtaaacattgtgcccactgctctgcaaacgttcatttggcccttagcagttcacacatcacagccgattcatgtattcatgatgatgttcattctgttgttttctggaaataaattatgttgtctgcttgcccggtggcacctgccacaaaccatctgacttttcttctccactcttatatttcaactaccaaaatccatgccttttaaactgtctttttattgaaagtaataaattaagatattcatcttgaggtggcttcacctttgcataagaatcaccagcatatacattagcatgctcacagtgttgagtatacaggaattcatttcagtagcaacaacactcactgaccttagaaggaaaaatttccttttataattacttgttagtctaacacagttgtaactttccatacagtatat

SEQ ID NO: 160956 - DNA, 1000 bp, Homo Sapiens
gtgataagcatttagggctcttaaatctatctcaaacacaggtatgtttgatcacatcataaagccaataaaaatgggatagtgtattacttttcaaattgttactagattctgtttcccaaagatttgactatttcagatataactttgacatatcattgctaaccaaaagaagcaacaaatataaacatttgtttatattagttgcagcactaataaagcttagtttgctctttatccatgctaccccattttttgtttagcaatgtacagaataagcccatttaaacaattcaggttgacattttcaatgggaaactattttccacacaaattccttcaacaaatagaaaatgtgacacagtatattctttaccttatgcagactgttagataaactttggtaaacagatagagaggcttcagaaaaccatattaaagtgatttcacttaaaaaggttatgatgtgttggttgaaaaagagtatcgacatcagtattactgaaattaatgtaactacaacaatgtttaaaatttttaaaaattcaacttccttttcatccttaccaggccaggaacatgacatcctttttggagaaattttcattttgggaatgagaacgttcttaatttgtccaatttctgttctgctccattcttctttcaatattttgcttactcgaggataaatttcaacgggttgaacctcaggaagtggtctttgtttcaagatctgtacatgctggcgtacatcatcaactttttcaagaaatttaagtggagactcttcttgtaaagatattgtcagtgccattaattcaagctgctgctctcgtatttccttcattctttcaatttgtggagtatattcttgattaattagattgccaacatcacagagagccgttaggaaacttttttttttctgttctaatgtatcattaagctccttaaaatactggagaacagcttccttatcgccttggatcattttctcaga

SEQ ID NO: 160957 - DNA, 1000 bp, Homo Sapiens
tttttttttttttttttttttttttttttttttttttttttttttttttttggttggagagaacatggtttaattaaaggcaaagctgattttcagcagctgcaggtcttgcacagacaaaaacaaaaaacaaaacccagaaaacaaaacaaaaaaccacaaaagaaagtttactacacaaaaccagtttctgataaagattctcctccccctcattactccacagtgaggatgataaggcgaggaatcccgccccaagagtcagaaaacattccaaacaccaaattctcatgcagaatggggctttagataggagctgggtattactgggagtgagatggtaaacctggttagcttgtctagggcgcaagaatcagtgacagttcaaacactggaatgttgcagctgcctgaatgcagagctcaaacacacaaactgggtaaaggtagtaggaaaaaggcttgggaagaggagagaaaggtggacacagggaaggggctgaagagaagcacaaaaggtttcatattgccattgggtagggggcttcaccttttcagacctttcaaaaaaacaaaacccaaacaccatgtcaaactaaaagagcaataatgtaagcatacggggcggggggggctccaaccactctctctgaagagcaatgagcgttatctcaccccttttcattgctggggttgcccagactgcagtgacaactggggctcctggatgtgctttgctctacagctgtcttccagctcttaagttccacactaactccatacactcgcacacacaacccctcccctctgggacagcagatgggcacgtgtgtgtacacaaacatacagacacacaaaggagagacctcccagaaaataaaccctaccactagcacagcaattgaacaattagattgtttccataatttccccttaaaatattacttttccaggaaatgactaacagaaatgctgtccttctgtttctacacaagaacatt

SEQ ID NO: 160958 - DNA, 1000 bp, Homo Sapiens
ttttttttttcatttacatggtttattgttgtaaacattaaaattgtctttctcaaagaaagaatttatcagaaaaaaaatcagcatctctaactgtcatacaccatagaaaaaaaggcagtgactcatatcatgtgccatactagaaatatacaaagaaaaatactacagaatatggcaatattaaaattcttactcaaacaaaataataaattaactgacaattttagacataaaaaaaattcaaagtgctcagttatttccagggagttatgtatattataagcactctggaaacagtcaaaagctgctgcatgcaagttttgtttagctttagacaacaaaataatcaagatataaactttctttttatcaacatcaacggtacatacaacacttacaaacaaggaatgttggacggtgttacaaacactatgtgtcccttttgtcaggattttctgatgtgtaatacttgtgcccacctattttacaattgagaaaatgtttaagctcagataactaccaatctttataaaatctaacagactacatagtgtctgaaatactatttatataatatagacattactgaagtagcaagtgcctataacattttcaacctagaatcaacatgcttgtcccttttttatgtatttattttctttttttttgcaaacacacttatcttttagaatttgtaatatttattcataaataggcacaaaataatttaaaaagccaaactgcattgggtaaatttacaagcctttgccttcttcaactcatgccacccacgcaacatttagttttactatatattacagctttctttacagcagaaaactttgaagtcttgttaaagggcaatacttgtgggtccccttaagatgtgtctctgtgtgtgtgtgtgtgtgtgtatgtgtgtgtgtgttacatttgtctgaactgcaacaaccaagcatggccaaacatttcccattatacattatagcaatctttc

SEQ ID NO: 160959 - DNA, 1000 bp, Homo Sapiens
ttaaagaaacacacacacatttattttaaaatttgacataatccttgggtaattattagcatttttcagaagtttccgagactgatatctcaactccaaaccaatagcaatagcttatttgattggtggaaggattagagagggtcccatgatccagatgaatagatggctatcaaagaagacagaaccccatagacacaggcagcattaactcataatttttaaattaactgtcacaaatatgaaacatctcaccagaccaatgataacgtccatatcataatttgcattttaccaaagtgtccacatagacagcacagaactaaaagttctgtagacttcagaatcatatttaaattaatttgatcctttatattaataataattaaaaactagattctacccagtgtcgtcccagtcttcacaccaacatgtatgtcctgctgtcggaatgccacctcctctgcactcagtgtcatgattcgaagattaaaatcagtgtgtcaaatcagaacataaaccaagccaggaattcatgggcccagagaggggtaaggggcttgtcctatacagcagttaagcagcccacgtgctccgcccattcccaagcagaatcagattggagctgcaggcagcgaggaggagggcgtgttctgtgttgtccactgctttgcatggtttcttgggtgttccaaggaggacagttgttgtctcccaataagacagttaattccctgaggacaggacctcttccacactagcctccgtcacagcagggtgcatgcagccgaggtgtgagcacagagcaggtccctactaaaggcaggaaggaaaccagcatgaactgagcacctactacgtgccaggtacagagccaggacaggtgctttcctgtaatcctcacaaaagcagtgagataggatcatcatccccactttacaggtgtggaaacaggctcaaggaagagcatttgcccagagtggcacagctagtcagtagg

SEQ ID NO: 160960 - DNA, 1000 bp, Homo Sapiens; identical to SEQ ID NO: 160959

SEQ ID NO: 160961 - DNA, 1000 bp, Homo Sapiens
ttttttttttttttttgtgagcctaacattcctatttatttttacttcaaaggctacatacatgcaaaagttgaacatgtcatcacaaatgctttaaataaagttcaaaaaataaaaatacttcaaaatccatttacttatggaaatatacatgacaattagagtgaagtcaattatatccttttttcaatcagaaaaatacttatattataaaaaagttttaattcatgtccagaataattttttaaaattcttgagtcataattttaaaacaagttgaatgttagtacaatgtttggagaaacaagtcctaggcttttgctaactggatctgatattcttatacttcattttgaaatcactaaggaaactcaagtttagggaaaaaaaaaaagcattttaagaaacctatgatggtaagtattatggctgaggtggttactaaccaagtgaagggcacaacttccataagcagataatgttcaaagtcctttaaaatgtttgaatggagaattttatctacaaacacatagtggaggcttaaagtagcctcaagtctctctgctggtcaacactgcaagaggaattaaaaatcccaggtacagtgaagttctgagtgcactgcccttttgaaaaatgtgtgagcaggcactagctcccgtgactccaaagccgactggtggaagtgtcttcagatggccctgccctttatcaggcaaaagcagccaaaggcttggcaaagtcaggagagggaaatcagcgtattctgagctagtctccatggtccagaggatgaccatttccttctaataaaaccaatatttctttggtagcataatacaatatatatcaacaatcccaataattcatatgagcagaatgcactcaaagttcaactttgtaaatgttcacatgcatcctggaaatgagatttaacttcctgcacctacatgaaaaagggtggggacagctgcccaggctggaggactactgatgatga

SEQ ID NO: 160962 - DNA, 523 bp, Homo Sapiens
tttttttttttttttttttttttttttagcaggcacatgaattttaatgaggggggttgacagcaggtctctgtgcccagagagcttgagaatggtaatcaccagcactcaaggtagtcttggccactgcttctcataagaccagtcggtattttcctctttgccagaaatgcttatcctcatgtaggactggaggcagcaggactgacaatttctgcaatagaggtagggctgttcgttctttttgcaagaggccctacaaattccactgttacccatgcatcgaaggatgtggcgtttgcctggcagtatccaggcagcatcccactgtcctcaccagagctgatatcactggttcttctatggccagaaggatggcaagaaacaggtaaagaagtttcatggctggcagacctgagaggaggaggtggctgagctgcaggggaaggaaatagggttccctgcagcacggcagagatgagctttgcttttatcagcagggctgtgggcagtgaattagaac

SEQ ID NO: 160963 - DNA, 1000 bp, Homo Sapiens
tttttttttttttttttttaggatgagggagattttaaagttttaaagtttttatttagttatgggttgctttgggggagatttcagcatgtatctacctagtagtctaggaaaatctctcaggatgcccagtctccagatggcttccctgcagtggttttagatagtaatgacatcatcaaaggagtctgtgatgaggagtctgtgaagacagaactcacacaggaactgcactactgtgctcgctctctggacaacacagacagcaggaataccagagtgaaggtctttaaggaaagcctggctctaaaggggaagcaggtaactgtgtctctacatgcctgaagacgcccctgcttgcttctaccccaggtggcctcctttcacgtctctgctctgatccatacaccctcttgctgctgctccccaagatgctgaatttccaagctcatttaccattggccagggaaagagaagaggaaacggtttcaggcatagcaggaaggatagcaaaaggccaatatgtcctcatatattcaccaccacctccccgccatggtaaggcatgggcctggggggaaggtctggagaacgaaatgtggtgcacagtgaaatggcccttgaacaaccacctcgtccacgaatgctttgccacccggtttgaaagataaatgaacctcatatccgttctttctcgatcaccaggcaactgccaacttgctggcaagaagtagctcaagcaaattgcctattaattgaatgttgctcaagatgtaaagtcctaggtttcttcatcaattcttcgagatggcttccgttggagcctctcaagggtggtaactgtcaggcagtggaaaaccagcatgggagcatacgctgccaggaaggaacacctttactgctatgtataacgctccagcaaaataaagccatttcttttctttttaaaattaattaattattatttttttctaagattgcaattgggtcatgcacacag

SEQ ID NO: 160964 - DNA, 1000 bp, Homo Sapiens
tttttttttttttttacttttatgtacaaagttatttatttatagaaattttggtacagtgtacattgaaaaccatgtaaaatattgaagtgtctaacaaatggcattgaagtgtctttaataaaggttcatttataaatgtcagtatagttggtggtccttcttttacaaacgcagtcattctgcctttaattatcttcccccaaaaaagaaaaaaaaaataggcgaagcaaaatcacatactgtttgtttgctccagggcagacaacactgctagattcctgacattttgttttgaatttttctacacctggagcttgttagtcaaggtctaaaatccctaagtgtggtgacctttccatttcatcctgccttttcaaagctggcccaggccctcctttcagtctgacatgagaatggcgagaatggctcacccaccgtgccctcctgcacgaagccagctgggcccacctagtcacttgagttctagctgctttctctcacacaccacagggggcgctggacacatctctgtaaaataatacaattgtgcgtttttatgggtgaaatctgagggtaattaaaaccagcagcctagttacccagaaagagtgcttgctatgcacctgtagttcaatctttctttctttttcaacaaagcctacccttacacaacaggaattaactagggggagaaacacccacatacacaactcttccccaagtctccttttcccaaacaaacaaacaagctattcttttagaattataaccatcttgccttctgctgaatccaccatcaggtggcaggaaatgaaagatcagatacagatcaaatgaaagctctaaaaggcctggcctcagcattaccaaacttatttattaagaggttctgaggaaattgttcagagtaccgccacagaccccgttttcttctcttagctctctggcatacaggccaatgacttcataccagccagcctataccacggatggcaca

SEQ ID NO: 160965 - DNA, 1000 bp, Homo Sapiens
ttttttttttttttttttttttttttttgccaaaataaggttttattttgaaagtcatttgatgaaagtcatttgaaagacactgaggagggaaggaggcctaagacccaacagatgtaggatccagatctggattcgtgccagccccaccaatggtctgtcaggccaagaaggtgctttctttggtaattcatgttttttaacttcctggagaagagatcttttcccacaagccatcttcattttttttgtagagtagggctttatttccagaaaacagtgtgtgagctggagatgggtgtttttttaaaaacatcaaggtagatctaatatgttcaacaaagtggggtggctcagccagaggcgaagtggaaagattctctagtatttgcttgtcatcttggtgcaaccagaaatccacatgtggaaatggtgtccaggagtacggtcctatacgaagttgttctgtctctgcatcataaatgctaatcattggtcctcctgctaaagttcgcgcagcacgaagctgctcctccggaccccgatcttgaaaggatgctctgtaaatctctgcagtcttaatgttgacagcaatgccatatattactggaaagtggttttcgttttcttcccggtcatttaattctgtcacacataatgtcactaagtgaatgtcatcttcttgcctgtcaaattcactaagaagttgatgagtgagtttttgtgacaactgcctgtcgtcactgaagcctccaacaaggtgtacttccagccttccacattgagcgtggtcagaaaaggattttatggagttcatgatcaaggggacctcagctttggtgtcggttccgtcacaatgtgtcaagcaggtggccccattacctgtgtgcctcaggaccacaatgtgacaagtagtggcatcatcagaacccagaatggagatggagccatcctttggggaggtcactgcaagctctctttgctgaacatacagaaggcc

SEQ ID NO: 160966 - DNA, 1000 bp, Homo Sapiens
ttttttttttttttttttttttttttttttttttttttttttttttttttttttttggcagctcactccaggtttatttcagggcagtttgggggtgggggacaaagacccccctccagctcctaaactgggtcacttttctcccaggtgaaggggaccatcctcatgggatcctatcgatgtgagagctttgtgtccaccaggtgtggctgggtgcaccaaggtgaagggtttgagggctgcacagggacccccagcactgggagtttggcctcctccctcagactggatggtttcccagggttggaaaggggcaggtctcccctctcagcttgggacttctcagagggaggagctgagtgtctcctccctcagacccgcagcccctcaaggtgctgcgatctgtgccaccctctttgaccggtccctctgccctcagactagcggaagcaaattacacctgaaagtggaggagcgggtctctttctttcttagacccagggcatttggcaaagtcttagaagcagaaagaatcagcaggggtcccatttcatccccaaaagctttagaccccaaaggcagaaacatttctaaaggaagatagaaacggaaacgaaaaacccaacagtcccaaatgtgcccatggtgggattgttggcagatgagctgtggttcttggatcctggacctaggacccatttcctagggtgggggcttggcgatggtcttggcagttcccacgagggtcagggcagggcagggggtgggcgccccatcccgaggctcagtcatcctcctcactggcgtagatgcgggattcccagcgctctgccatggcgttcttgtgacgggtcacccgtatggcttccaggacctctgagttgataccgtccgaggggttgatgccagcgtaccattgctccttctttctctgcccgggaggagcactgtccactggatcttccactgtccacgccacgtttgagtgtaggtggatggg

SEQ ID NO: 160967 - DNA, 1000 bp, Homo Sapiens
tttttttttttttttaaacttgaagttaattccatttaatttacagcttattttataatagtattttattaaggaattaatttacatatagtaaaatcacaaatctaaacatacagcatgaggaatgttgacaaatatatgcagctacataaccatcatccagatcaaaatacaaaacatttcaatcaccccagaaaatttcctcaggccccttttccattcaatttgaattccctgccctcactctaagcagccactgttctggtatctatcatcaaatattagttttgcctggaagtggctttaatataaaagtaattagatagtatgttatgtttggtttgttttgctcaacttaatgtttttgagattcatacaggttgttgcatgtatcagcagtccttttttaaatgaacagtattccactgactatattgtagtttgtctatccattttcctatggatggaaatttcactgtttacaattttgtgctattatgaataaagctgctatgagcagtcatttttctggggtatatatctaggaatgaaatggttgaatcacaaggtagtgcaagacagtcctctaggtggccttggacaacctcaattgttccccctttttcacttgtagttttcaagaataactgtactgtgtgctgggaatgcaacatcctggactaagtgactctgagaaacattgtgactttacagatgaaatcatctacaaagaatcatatattttcttgttaatcatatacaatttgccacagatactatattttcagtgacttctatgaagatatttgttgttgaaatgtatgcatgacatcttaaaaaattgatatttattttttgtttatcttaaaaggtatagaggaaaaaatgatcggtatggttatctattactcctatatatcacatttctctattagccacaggtctgattccggttgtttccactcttctccaagcagtgtgttaaaattgaaagacttga

SEQ ID NO: 160968 - DNA, 1000 bp, Homo Sapiens
tttttttttttttttttttttttttttaaatgtgccacactttaaatttattttaaagtcaaggatttcaattgactacatataaatacagtacccaaaaaggcaatgctaataattattagtgcatataaaaaatgtttttaacctaactatatccaagcattaaaagcacaactgaagaagccaaataatactgtacgcacaaaagtgttccttactcaagtaaatatgttgatagtatggtacatcaaactatttattacctgtatattccagaacaacagtgagagcctaaacagagaacactgtaaatcatttgctcaaatcaatgaaaaagcaaccaaataaaattctctggtaataataatgaccaattgctatgcaactgattgtatcacagtgtaaatgtaaataattagcataagtttttcagactactgaagtaagtggaccaaccatttcatgatcatatttcaattatgtaattgaccatgaaatattctaattttttaacctgtaaagattctactcagctatcactataaaaatagaatagtttatttacataagaaaacatatttcctttttttgtttgttttttgagacagagtagctgggattacaggcacctgccaccacgccaggctaattttcgtatttttagtagagacagggtttcgccatgttgaccaggctggtctcaaactcctgacctcaagtgatccgcctgcttcggcctcccaaagtgttgggattacaggcatgagccattgcacctggccaaggaaacatatttcctaacagagtaatagaaattactgtaaatggtcacaatatcactagaactgaattttgtccctttcaaaaatatgtcagaataataaagagaatatagaaaacaatcatttttttcaaagttttttaattgttaccaatgccattttactactttttatctttttcatgcagtttcagaagaaattagcaatatctaactctc

SEQ ID NO: 160969 - DNA, 1000 bp, Homo Sapiens
ttttttttttttttttaattttttttttttttttttttttttttttttttaagagtaagaaaaatatacaactatatttaaaatacttaaattaacaagatagtacttttccattctaacaaaatatcatacattcagtttaaacaagagttaatatccagacacacgttttcaaaatacctgatgctagttgaaaattagtgaccatgaggctttccaagatatttctaattagcaaactgtgtacaattttgaagaagtgtacacaccgtgctggaagacagacactgaacaggtcaaaatgcaaactcatgtatctttcatcaacctaaatcttgttgcttcacttttctaaatgatactttggctgtcagcgaatcttatagcttcttttcccttaaagacaataatatataacaacaccaccccacacaaataaccataaacttctttgtgtgaaataagccctatcaaaatgtgttcatgtatttctgtaccaactgatctatactgagactgtcatgaaaaaggtatcaaacaagtgtaacaggcctacacttaaacctctgcctcaaaggagaaatcagatacttgccacgttattgcaaagtcaaagctgctacacttaaaatatggtagatagtttagaaaaatcaaatcaaaaatgttttctcactggctttttcagataaagaagttggaccacaaaccaacacatctgtgtgaaaacagccaccaatttgagtccccccagcccctcaaaaaggaacaatgccaccagtccctcacaatgaccataacgtctctggccaggactgcgatttctagcgcgtgtcttcacattctatctctggggaagcaagacaaacaggctctacccatttccctccttttgtctccacaagccagcacctaagatcctctgaatttgttcccatccaatcctgcaaacttccaagaagggcagtagataacttttcaaaagaaaaagaaattgcat

SEQ ID NO: 160970 - DNA, 1000 bp, Homo Sapiens
ttttttttttttttttttttttttttttttctgtattttattagagacagggttttactgtgttgcccaggctggtcttgaactcctgacctcaggcaatctgccctctcggactcccaaagtgctgggattacaggtgtgagccaccgtgcccgcccaacagccacatttttaaaaacaaggatttgcatttgaaatcagtgcacttttcccagacatatctcatatggcatccaataaaaatcagtttagtaaaaaaattattagagattaaaatgatgtaacatgatataacaaaaggaattgtgaagcctttagtccttttggaacaaggccatttacaaaccaaccaactagcaatcaagcagagaaacaagtgaaataggtaaattagcaatttaattaaacacatcatttgaaactcaatgctgattttaaaatcttgaattgaatacctacagatattttaatgcagatgctgacagctttgatccacatacagagcctgttctgattctgcgacttgctagataatagccatgggtcattctttctgcttccaagctgaattctacattcaaattctttgcaaaagccaatagcttttcaaaatcttcagttgtgaactgtctagaagccgcataaaacagcccttcaggattaatggctttgttcaaagtgtgttgcacagtaggaagaaatgggtggcagggagatgactcgttgcagttaatcaataaaccaaatgcctccacaaggttagctggaatcaaactgcaatccatctgaccaattagagtgttgattttctgtgcatttctccttgaagatgaatccacatcaacaaaagaccaaaaactgcactgaactggaaaagtcatctgttgatcaatatcctccccaaacttctttcctgggatgtacactgtgatgcttctgctctccagaactgtttgaagctgttcaagtttatcttttttgtgtgaagccaagtctccta

SEQ ID NO: 160971 - DNA, 1000 bp, Homo Sapiens
caattttcatttatcagtcatgataatgtacaagaaaaacaaacacaaaaaaacaaattcctttaaactacattaaaaacaaaggtgaacaaaatgacacagaataaaatcaagaaaaatcaagattaacagtaaatatcaatacttacttacacatcaaagtagactgttagcataataaagctaacatatagtcacagaaagacaaaagtatcaatgatcaagatactattttgcttcaataactcctcattttggcctgggagttcatcaaagcctaagcggctggattctgtttttctccctcctccctccctccctcatgcttccatccttttcacactggggtaccagtgtaggaggctcctggatgtagctaaccgtgcggcagcacctaaggcagcagtggctgtacttcgaggaatgtagagcttctgagaaatctggcactcataagacaaaatcaaagacagctggtctacagattcttgacgcttgtctttgtacaatgtaatagcacggctgctagaaaaatcttcattctttaggatctctggtgagctttccacagaaccagagggcttttctgcggaatcatccactgcagttgttgaacagggtgctgctgtggaaagctgaatttgctttggctgagtctgactgttgttgggttcagactggctcccgtctgctgactgctctgactgggtaagagaggtacagaattcttccaatttgggcagtgtggaagaatctgaagaaccatttatgtctagttgcttttgagtcctgtttgtgccagtatttttttcctgagcacccagtacttctggcttatggacttctactttcgttccatttacaaggcctgaaggctgccaagaatcatcccatgtatctttaggggtagaaaaacaccagtccttctgtggcatttctttacatgatgaatactgattctttccaccaaggcttgcagtaaatagatgggaggcagcat

SEQ ID NO: 160972 - DNA, 1000 bp, Homo Sapiens
acaataaaactttcttgatttttaatgaatagtgaggcacacaatgtaatataaacaagtatgatactgcagattatatttctgattcaaagtggaaaaaaaactgaaaaaaaaaaaagtttaagaactcattttgtcagctgggcacagtggttcatgcctgtaatcccagcactttgtgaggtcgaggcaggtggatcacctgaggtcaggagttggagaccagcctggccaacatggtgaaacctcatctctactaatacaaaaattagccaggcatggtggcgcacgcctgtagtcccagctgctcgggaggctgaggcaggagaatcgttcgaacccaggagctggaagttgcagtaagccgagatcacgccactgcactccaacctgggcgacagagcaagactccatctcaaaaaagaaaaaaaaattcattttgtcatctcccaatcccttgggactagaagactccagcctttcccaccatagggccctgccaggagttttctctccatcacgttgcgatgtggagtacagaatcccactgggaatcctttaactgggagcagtattttgttttgctcagtttcataatggagaacagctgttcgcagatgtaggtgctcccgaacatggaaagaatctttgcgcaatggtgcttgtatttcgggtagctaccccagaggtacttgtagaattctggtattcccaccttgtcgtatttcgtcttcaggaccgtgttgcattgcaggtcgataacctccatctggagctcctcgtgcacactgtcgatcttcgtggagaacggggagctgaacagagtcagttcgctttcgtagagtttgaaatcagacagccttttctggaattcggtcttgagttccgcgattttgggaatgtagttcaggccatcgctttcatttctggaagccaatttcagggtgggaaagtgggccagattattcctcgtcaaatgagtctcccagaggcacagttt

SEQ ID NO: 160973 - DNA, 1000 bp, Homo Sapiens
ttttttttttttttttcctaaagtattctttattaagatcattaaaagttgtagaaacaactttatattataaaggcacagggagacagttcaataaaatattcaaattaacagtaacttacagtacaaaagacaattttaatgcacatacaaaccccaaatgtctgattcaaaaatattttactgcgtctattaatgggcaatgattaaaaatataaattgctgccatataataaatatctgatagtgaacatcttgatagcaaagtgaacaaaatatttattgcttttcacttacatatttttccctgtaattttaaattcctaattcttttactatcttctcaacttttcccaaagataaaataaatttcacataatttcatggaggggaaatggtagttgtaaaaaactacctcaagtagcaatcaccgctggcagtgttttctcactttctgttctgcaattgcaatcacacttccaaaaagaaaagcaaatgtttgctaaaccatagacagacaacctctttgtgactggtattataaggtttataatgaaaacttatcaaatataaaaggtgctccctcttgaaaatgtgtattttatttgaagttttgagtaagaggtgagtgtttggcaattttcaacactcccctcaaaaatctcccaaagttgcaaaaaagtcagtttagtaaaattccaagcacttaaatgcttcattgagggccagttgatatacgcaatgcactaatgtgtaaaaattaaccgaatgcaactattttataatggagagctcttaccttttccttccagtttttaaactggcataaactttattgacttcatcctcctatttttatagcaacctagttttagatggtacaagttgaatttctatcacaagacaataaaataacatgaaagcattatcctagttaatgctatttcaacttaagaaatatctacattgaagtatttgataataattgtaaagttactta

SEQ ID NO: 160974 - DNA, 1000 bp, Homo Sapiens
tttttttttttttttttttttttttttttttttttttttttttttttttttttttttttttttttttttttttttttttttttttttttttttttttttttttttttcaatagatcatgtttattcccaagccccaaccagacatgttctacccctcaagatccctgagacccaggctgtgggctggaaaatgaaggcacagtgtcaagagcgcccctgttggcatatgaagacccaggagtgctgaccttcagggatctgcctgcactgcccatgggcctggcacagcaggaggcactcctgtttctgtcccttctgtctctggtcttcagagcaaggtttctgctgagatgctaaggaagctgagtcctttgtcagccctgactctgactgagaggcagacaggagccaaggccccattgaagctccaggatgacgatggccctcaggggaacagacgcaaaaccaggcacgggcctgccttccagctggaatctacctgtcaggcccagaacttctgtgcagttggagtgggctccccagaaggaaaaacaatacagctgagtctagtgctaggggacagagaactgggggctcaagaaagcaccccaaaacgggctgccaggttaaggatccatggggctgaagagaagtttgccccagagcccaaagcccagtctgcagtcagtgggtggagatgagaggcagcctgggcccctgcaggggctgggccctgaatcctgaggccaccgtcacctcaacatcacttcctacagcagaaaaaggtcactcttctttccaaaggtggtaacacagcctcagagcttgctccgcggggcctctgccaggggccgctgcaaccgccacaccaccctgactggctcagcagcgcggtccagctcacggaggccacctaggtcttgggtctggctgtactgctgcagggccggctggagcaccgtgatgggaatgctgaagttcaggtgggggtaggtggccc

SEQ ID NO: 160975 - DNA, 1000 bp, Homo Sapiens
tttttttttttttttttttttttttttttttttttttttttttttttttttctggcccaatagatgtttattattattattactactatcatgactggcacttgacaggggctcaaccattggttgtggtagtttgctctctttattcttcatcccaggtaacccaggctatatattagactccagtgggtactcttaaaaaatatgcatgcgccaggtatggtggctcacgcctgtaatcccagcactttgggaggtggaggtgggagcatcgcttgaggctgggagtttgagaccagcctgagtaacatggtgaaatcccatctctacaaaaaataaaaaaattagcttggcacagtggcacacacctataatcccagctacttgggaggctgaggcgggaggatcactggagcccgggagagcgaggctgtagtgagccatgtttgtgcactccagcctgggaaacagagtaagactctgtctcaaaaaaaaaaaaaaaaaaaaaaaaaaaaaaaaaaaaaaaaaaaaaaaaaaaaaaaagaccccatgcctcccccaactcagcccatttaaatcggtggtggtacttcagtacaggcattgttttttacatttttaaaattaatttactatgtgtttttcaccagtactctttaaaagctccccaggagatacaaatgaaaaaccatactatggtgaccaccagtccggggttacctggggctttcccagttttagcactggaagtcccatggcccaggagccccctccccgcaaggcaaactgagacacttggttgtcccctttctagaaaggaatggacccatattttctaatcccagatcgggacacgtggcctgggcgcagatggctgaatcaattctctgaaagcaccacttggggcagtgggtcactgaggccacagggtcagtctgtggcaggagctgggttcagggtggggagaggtgggcaggagagcggctggcagtggctcagt

SEQ ID NO: 160976 - DNA, 1000 bp, Homo Sapiens
ttttttttttttttcatttaaaacaaacttttattttttaacttgaacactgtcacatacatccatgaaagttagatgtcactggatatcacttttgatgtaacgaactttggaatgatatgtgttacaattcccacaggcatctggattttcttggcttcacctctgctgcgtctaggtccctttggagttcttcaccttgttttccgcatccttctctttttcttgttctttctcttcctcgcctgcagcatcttgggcctcttcatcccacttttcgggctgagatttagtgacttcctctggggccgtggcctcctgtgcggtcggttcttctgtggccggttcctctgcgtctggttcctctgtggcctcctctgagagcttctcctctgcggcctcctccgcgggctccctggccatctcggccaggtcagctggcactgcaggctctgggaccgatgcggcctcctggatcaggcccaggccctcgcccgcccgggctgcggcccctgcacccagcctctggggcagcagcagcggggggaggttgccccaggggttgcgcgcagcagcgtgtggccccaccatcaggcggctgagttgacggttctctatgaggatgtggtcgttgtgagagaggcggtggagaagggagtggaccatgtccaggagcacgaagtgaatgcccgacgccgggtagcgacgggcgaccaccgccaagtcgaagttggccgcctcgttcccctcttcctcctcctcttcctccgtcgcgggcccgatatctgagtcctcctcggcgctcccgccccgggggactgcggccaggcctgccgcctgctcaccctcctcctccccgaggccttccacgggccctgcgactccgaccacctcggccgcaggcaccacgtcgctgctgtcggggccggagtcgccgccctcctggttaccagctccggccgcctcggcctgtgctccctcctggcttaccggggcctcc

SEQ ID NO: 160977 - DNA, 1000 bp, Homo Sapiens
gactgcagctggaacacagacccaacaagattttatttatacaagaaaagggaccattaagttaagggctgtttgcgtggaggtgccatgagggagcagagtgtgcatctgagctccgcctgcctctccgcctcctggctcaggctgtccaaatctgaatcacctgcccaagctctggatgatggtgacacagccgtgggagctggtgcagcgctgcagggatggctggacctccacctgcccactgctggggtcaaaggtgaagaccttatcggtgctttctccgcgatcatcccgcccaccaaggatgtggaccttcccgtcacacacagtgactccacagctttccacagggctggggaggacagctgcctccccccacacatctgtgcctggatcataggtgaagattttgctcatgagaccccccatgacatagatggtgtcctcaagggagacagcctcgagacaccgctgtgagaagggtgctggtgaccgcaggctccaccggtcctccttggggtcaaagcactgcaccttgtccgtgttgacgccgccctgcctggcgcccccaatcacgaagagcttgcccgcgcaggacgccaccgccgccgagctcacggcctccgggaggggcgcggcggccgcccaggtgttggagaaggggtcgtagcgctccacgctgtgcaggcgcctcaggccgtcgaagccacccaccgcgaacagctgcaagtgaggacatgggccggggagccgggtgccagggccttagggccctcggcctcatcgcttcagtccttacagtctttgagctggaaactatccctgtccccaacccagtttcaggaccaaactgacccccgagcccagtgctgccaccacctgggcagcctccacccagttgctgtacctccctgagccggtttcctctcatttagcggggatgagaccttaacctgcatggttacagctgtaaaatacctggcaccaagctgatgct

SEQ ID NO: 160978 - DNA, 1000 bp, Homo Sapiens
ttaaacagaatcaggcatcaatatttattaacacaagacaaaggaaacacattcaatgagttaatagaacactgtccagccagatgttaaatttaaaaacgtatatctagtctaacttcaaataaataaaaaaactttatacataattacacagtactgtagtttgaatttgacacgggtaaatatcttgacagaaagtaaacaaaacagcatttaggactaaaaaattattcttatatctttagtctcttcctctggacaagtaacatggcccaactacatacacctaaaccagaaatgtcgtatgaatgataaagaaaaggcctattgtgtatttggcgcattgcagcttcttgctccaaatactcttgcttttacatcaaagcagacaacaaaaacaacactaaggcatagatcttgttggagtttgaggatgaggtgataactcctcattgctttagactaaaagattcctggatattcaaggaaagtaatttatttggccaagatatagagcaccatgcctggggcagagaccttaatagaaaacctaaggcctcgggcccttgttgagtcaacaaaagcattaagcaaggattgcccagggactaaagtaaggagacagactcatgtgaccaagacaggcaatggtccctaaacagcctgaggcaacacaacttcatgaggaaaggacttggtactggggagacctggccctttatgaggcaggaagtaaagactgtggattcactgacactgattagcatgctggtccttcccagggtctcactgaattcctaggatctaggaattttcctgaggcagccccttcctgatctacttcagttacttctgctgagaaccagaaagaggttcagaaaccttcagaccaatagatttctcttaactgagacagagacttgtttagtttttttccacagacattaaaaacccagacagaatatgttccagaggattggaaaggctgtgtttctattag

SEQ ID NO: 160979 - DNA, 1000 bp, Homo Sapiens
acatttatgggaaattttatagtttgcataaacaaagtataaacttaaggcacagtgaataactatattgataaacataaactagccactattggacaagtagcaaaagtaaaattcaagaaacaaaaccttcataagtcactacttccttttgttacaatcataaaattttctgggtaaactctagatactagtacctctagggagacaggattcagaagatcacttttagacacacctatcttcacttgataaccaaataaatatctgtgagtgagaggtactatctcgaatgaagttaaaaacaaattagaaggaaaaggtcaggttagcatgttttagaactattggtaaactataattcatgggacattatataatcaaaagattaatattttaagcactaagttataaagggtttacacccatgaataaaaagattaccatcacttactatgaaccaccattccatgaatccatgtagctgaacactcctaatgaaaagtttaattatccttcaacctgtagttgaagaactcagttcatgttcattgacagatttccattacagacccactatattgatgttactttctttgacactatattttatatagatatattaaaattgaaaacttaatgctgtttagaaggctattaatataactattaatttctgaaagctttgagtttctgaaaaggcttttaagatcaaaatttctgaaacactccacacattcttcctcacccacatttaattataaatcaatgttatactgataaaaggttctatacacacatttagagatatatgtgtgtgtgtgtgtgtctgtgtgtgtgtatatatatatacttttttccccccaagatggagtctcactctgtcgcccaggctggagtgcagtggtgcaatcttggctcactgcaacctccacctccctggttcaagtgattctcctgcctcagcctcccgagcagctgggattacagacgtgcacca

SEQ ID NO: 160980 - DNA, 1000 bp, Homo Sapiens
cccagagccactcctttaatacagaaacttcattgaaaaaacctagccctgtacagcagcccttttaaagaggtggccattgcagggtctctgcctccccagcaggtggcagatgctcccggccactcgtttaaataactgtcccctggagggggccggggtttgaaggcagggcccctgccaccctcctgggggacacccgtgcatgtttacgccttttctggttgtgtcagtggccggagcatggcagctgggcatcaataaacacctccgaggaagctggactcgtgtgtgctggcacggggagggcgccgggcggggccgtggtgggcatggcgtgatgtcacggtcactccgggatgtcgatcaccaggtcatcgtctccatccaaggcatcgtccccgctacctgcatcgctgaacatctgccgagggaccgtgctcaggatcgtgggggggggcatcttagggggtgggaggggggtcagggttgtcccgaccccagccccagaaccccggccagggaaggtcagcggccctcccacagggcagtcggggggtcccaccgccatcttgagtttccggggcaggcggggccgtttctcccgcttgggcctcaggggactgggctcgggcagctgcagggccaggtagtcagaagggaatggggggtagcgggaggaggccagcgagctcaggtatggggaggggaccccggaggcctgaaggggaaaccctgttgaaggaggcagggagaggctggagggagagggggcgccccccagcggagggcttctcttcctcttaggggccggtgtgtcagacaacttgggtgtcccctccgtctcgctgttatctgatgatgcagtggcatctgagtccgaagagtcttcatccacgttctcgtactgcagaagtcggtctaggaggaaactcttgtcccgggacaccttcagtaatttcctttgcgctttcctcagctcctcctggaagcactcgtg

SEQ ID NO: 160981 - DNA, 1000 bp, Homo Sapiens
tttttttttttttttttttttttttttttttttttttttttttttttttttgcagcttccactctttatttccaaagaatcagtgtcacacatgcagatcacaaagcgggtctccctgtgctgcttccttctgtgttttctagtctctcccccaggggctgcccagggccctcaggaactgagtgtgggcaagacactgctgggccagagggcacgacgcccacgtgggcccgtattgcccaggccatttggcagtgcagagcccccccagcctccagcaggagccccctggcatgagctctcccctcaggggtcctgagcaacgtccctgccagggctggtgggtggcagcgggggggcagacacctcgctgaggtcctgcagcagagcttgcagccgctgcaggctggggtgcacgttttcctccagccactcctccacggcatccgggtagaaagccagctgcagggcagcctccagctcctgcacgagggtgctccactgtgccaggaggctgagcgctgcgggctggatgtgctgaaccatgaccgggtggatgagcttccgctggcggtggtaggggctgaaccagccagtgacatacctgttgccctccagcagcgcatccacagagctgcgcagatggaggctgacttgtgtgacaagggcaaggatgttgctgccagggaaggagccggccccctccctgcggagagccctgctgagaacagctgtctccacgggcgggggaaggggaggggaagaaggggacagggagggctgcagggtgcttgcctaacagggtccgttttttccaggctggaaatcccgagaaggttctccactttcgctttaacatcttcatcaaatcctccgcgtagaagcaactgcaggcaggcggccagggacgggactcctgcgggcagcagctcgcacagcacagagtagtggtcgtacctctgccagccggtcaggatgatgccctgcagtgagtccgtgg

SEQ ID NO: 160982 - DNA, 1000 bp, Homo Sapiens
tttttttttttttttttttttttttttttttttttttttttttttttttttttttttttttttttttttgtattctaatgctatttattatcacaataaataattcactgcaaatgactgcatgaaaaatgtgggttccagagcaccatgtataaaatgatcccatttatgtagaactgtaaacatacatccacacactgacggacaggtacatatgcatgtttggggaggggtctggaatgatcacccaagtggacagggtgaggggtggtttcctgtattttttacaataagcatttatgacttttacaaaatcaccaaagctatcactttttccatttagaaaacacaaaattatttttaaatagagacttgacgtcatttgacacaccttggttttctctcggagagcacagatgccgcagacaagaggagcggacccgcctcccagactcctgcctgccccgtccctcccccgcaggtggcactggtgagccgggaaggtgctgccagccccaggatgcctcgcacagcccgggctggaaacccctgcccctgcttcctcgcacagtctgtcattctagaaggctctctccaaaccactcttccaaagagggtcatgccagggaacagcagcgaggtcattttccagtcatcccacaggaagccagtgagccccactcccactgccgtggacctccaggcctggcttccttctcttccctgggttacctgctcaggggtttctcagccaggccagcatgtctatcaggcggcatccagcatccaatcacagtgacaagaaccttccggaacaccctgcaaactgtggatgcccacgggtggccccattatgccttgagcagggcaaccttttggtccagaatggagtcttctctgatgttgtagggctgggtccctggcttctgcctcaggtgcttctctgcttcttccagggtagagaagtactggaaccccttcaggtcagcggacagcagga

SEQ ID NO: 160983 - DNA, 1000 bp, Homo Sapiens
gctttgcagaagcttttaatgtaggcaataatgttatgttagcaagaattagactcacatattgtacaatttcaattttggggaagagccagtgtggcgagtagttgtaggctagtattactggtgataactaaaagttaacttaatatagaacaggttattttgatgactgatgctagttctatcaagttttaagtggtaatggtggcatttgtagttgcaggttcggatgtgttaacaaaaagagtcaaactctgtaaaatattttaagagattaattctgagccaaatatgagtgaccatggctcatgacatagccctcaggaggtcctgagaacatgtgtccaaagtggctaaggtacagtttggttttatatatttttagggagacatgagacatcaatcaaatacatttaagaaatacattggcttggttcagaaaggcaggacaactcaaagttggggcttccaggctataggtaaatttaaacatgttctggttgacaattggtttagtttatctgaagacctgagatccatggaaaggaatgttcaggttaagataaaggattgtggagatcaagttttattgtgcagaggaatctctcagaaagcagacttcagagagagagcaggttgtaaagtgtttcttattagacctaaaagggtgcctggctcttagttgattatctcctggatctggaaagaaaggaaggaaaacaaaggggaaaggatattctctacagaatgtggagtttccccacaagagactttgcaggacaatttcaaggtatggcaaggaaatatattttggggtaaaacattttgatttttttcccttgttatgccagagtcagattagaaagtaagtcacaatatacagggttaaataaaacccatctgatgagaatttatggtttgtagggcatgactccccataccccttagaaaggaatttgggcaagatgaaaaatcagagcttagtcctcagatgaatagg

SEQ ID NO: 160984 - DNA, 1000 bp, Homo Sapiens
gttttaaataaacatttatttttacctacaaagtaaagatatacagaataactaggagcaaggaaagactataattccacactctaaaaaataactgcctcatactcgacttctacctccaagaagtgaaaaaatagcagagtgtgtgtttaatcactttttaacacttagcagtctccaaaagctttgcattagcctgctcctttgacccaaaagaacagcaagcaagtaaaaaagaagaaacggttaagcaaggtcatggtattaaatctgcttaaactctaatcaagaaaactggttatttcgagtcaacaacaaaaactaaaattctacatctttcgcccttttaattgtaaagattaaattgtaactgaaatcaatataacagattctgagtctgcctactcattttccttaacaaggcaatgaagaacttaatgctcatgtgcgatatagaatcttagctttttatttgtaggaaaaaataaacagatttccctccccaacaaggcgtcacaagaaatgaggcaataaagggaaaaatgcaaatcctaaagtcatctagtgcctttctcataattctaaacaaagaaaaagtgctctcaggttttgaaatcttcacatacactacagatgggcaaaaaagctacagacatctcagtttacaagtttcaagttcttaaaaaaaaaacaacaaaaaaaacctttcctccagggaaagcccatgagatcaattatcgaattgaattatacaattccacttcaactagtctaacattgatgtgctttgccaaaaaccttgaaaaatagaattaactggtttttacagaaccatagcagccaattatttagaaacaccacctgtcctttatattagagtacctgccccagttgtctttgtaatagtctgaagcaacacactgttcatggtaaacactctattttagtagataaatatatgaggactaatcgaaaagtctcttcaagaagaaaatatctt

SEQ ID NO: 160985 - DNA, 1000 bp, Homo Sapiens
agaggcagggtctcactctgtcactcaggctggactacagtggtttgatcatagttcactgcagcctccagctcctgggctcaagggctcttcctgcctcagcctccaagagtagctgggattactggcacttgccaccatgctcggctaattttttaaatttttttgtagagatggggtctgactacgttgcccaggctggtctcaaactcctggcctcaagtgatcttcccacctgggcctcctgtaagtgctagtgtgtccggagtttgttccttccggtgggttcttggtctccctgacttcaagaatgaagccacggaccctcacggtgagtgttacagttcttaaagatggtgtgtccagagtttgttccttcagatgtttagatgtgtctggagtttcttccttccggtgggtttgtggttttgctgactacaggagtgaagccacagaccttcgcagtgagtgttatagctcttaaaggtggtgtgcccggagttgtttgttcctccctgtgggttcgtggtcttgctaacttaaggaatgaagccacagaccctcgtggtgagtgttacagctcataaaggtagtgcggacccaaagagtgagcagcagcaagatttatcatgaagagtgaaggaacaaagcttccacaatgtggaaagggactcaagcaggttgcccctgttggcttgggtgccagctttttttcccttatttggccctgcctacatcctgctgattggtccattttacaaagcactgatcagtccgttttacggagtgctgattggtgcatttacaaaccttcagctagacacagagcattgattggtgcgtttttacagagtgctgattggtgcgtttacaaacctttagctagacacagagctgattggtgcatttataatcctctagctagatagaaaatttctccaagaccccaccccactcgacccaggaagtccaactggcttcacctctcactaggattaga

SEQ ID NO: 160986 - DNA, 1000 bp, Homo Sapiens
ttttttttttttttttcttttttttttttttttttttcaaattacaatttatcaagtactttttaattaaatccacaaacagctgatcagatacaaagtaataaattatcacagaaaatattgatatgaaaatcaagcataaggatctccactgtcagtaattctacacatatgtattggtctttcattctgtgttggaactaattctagttgtttaagcacttctgttccttcaatcagttgcccaaaagccacaaattttctatctagataaggagttgcttgcagtgtgatatagaattgtgacccgttgctgtgacggcctttgttggccattccaagtactcctcttttattatgaggaactgaaaagttttcatcttcaaatgttggaccataaatcgactctccattatctccttttccatacactatatcccctccttgtatccagccattctgtactattcgatgaaaaatggaatttttgtaatgtagtcttatgccacgttgagaaaaccctgcttttcctgtgcacaagacctgaaaatttttacatgttttgggacacacatcacagtatagctcaaaaatcaatcttccaattggagaagaatcaatacaaatgtccaaaaacacgaaatcatgcttggtgtctcttaagaacttagcggaaaaatcctcagtgagtgcgtcataaagtgcagagggtttaatgtcaactatatcccacacctcgtgggcccatttctgcagatccaatgcatcacccagaaactgaccattaacaaaagaaatcacagaggaagaatattcccaggtttcatttttgagttccctttttttctcctgtagatattgatgccatgcaaattcttgaagaggaactaatataggatcttcaaatttggatggatgattattcttcagattctcagcggcgctcttcgcaatctgaaagttggggcagctgaagagccccaccaccttcacctgcagc

SEQ ID NO: 160987 - DNA, 1000 bp, Homo Sapiens
ttttttttttttttttccttccaaaaatatttattggatgtctacgacgtgccagcagtggccctggtgctgggaatatgcttggctctccctcgccacagcctctggcttccatccttggtatcgccgagtcttggcaactctcccacaggggcagcccccggccatcctgaagcgtgggcaggaccggctggtgccacagctgaccagtccagacctaagccacttcacaccagagactctcccagcgtccccaacagacccctcactcggtgcttgaagcctggggtccaacctctgaagagggtggtcacatcccggcccgcggtgaggaactcggatcttccctcctccctcaacccacgctgggacctttcccagcaccctttgggacgcttctagaactgttctcagcccttcagagccttaaggaatccaccggtcccgctctaaggggttctaggagccagcaatcctggccacccccactccccacacacaccccgcaaacatcccccgcaccaccacgggtccgctgaggtccagtccactagcgcgcctcctccttggggctgcacgcaggggccgcgcggtgcacgcgctggtgcttgagcaggtgctgcttctggctgaagccgcggccgcaggcgggacacaggtagggccgctcgcctgtgtggttgcgccggtgccgcgtcaggttgggcttctggctgaagcggcggccgcactcggggcacgggtagggccgctcacccgtgtggatgcgctggtggatggtgagcgccgaccaccacgagaagctcttgccgcactcgttgcagatgaactggcgcggctcgccaggcccagcgaggcccgcttgtccccggccccacagcgcgtcccgggcccccggggaccgttgggagctccgcggcctcgcggccaagcccgggatggcctcggcctgcggctggtcgcccggttccccggccggaacggcgggctcagcgacagc

SEQ ID NO: 160988 - DNA, 1000 bp, Homo Sapiens
tttttttttttttttttttttttttttttttttttttttttttttttttttttgcagatgatcaaagttttatttaacattatagaacacttaaaaataaacaatatgattgcatttctgttgtgtaactttgaaaaatgttttcaagcacacataaaagcaacaagttttacccccaacaagtatgctatgcagccagtccctaactgctggggtcagcactgctctcaacagacagctggggtaggaggtaggctgctggtgtccctgcaggcaggtggcttttcctactcggaatgacgatgtcttttcttgttatggttctcaattgcccttctaagtgcttcatcctggataagatctgactttcttatatccgtgtggctacagccaatttgagggcaataggcctttttcttccgcttttgcctggactcaatcatgcgaacaatggcgtcctcttcataggtgtggccacacactttatttttcactggcttcttcatttcctcctttgtaatggggcaggtgaagttggtctgactttgggtcacaattatatcttcatccactccttctgttccgtcagcttctctgtcagcttgaagaccacattgcttctttagttctttcagctgttgtttaaactgtacaaatttttcattattttgaaagtctgcatcagaattcttgctctgtaaagccaaaaatttcttctctaccaataattttaaatctggtattttttctggacgttcttctttcacatgatttattgtagattgaacagcctttacataatggtttagttgccgatccaatgtagcaaattcaaccattgccttgtccatactatattcactactcacttcagtctgactttccacaagatccaaagcaacactagaagctgtgtccataccagagttgatacaggcttggaagtttttcaaggaggagagagcagactctacaccactgaaggagatgaaaccagttg

SEQ ID NO: 160989 - DNA, 1000 bp, Homo Sapiens
actttttaaaaagcatttattaagctcctctaaatgaaaaggatactgtggagaaatggaaaactgctgggaaaaaaactactagaaaaaaggttgctgccacccagtgccttgctatcaacggaagtcggactcaggagggctgcaggagtttgggaaagcagcgaagttgtaactgagaccatctgccacataagctggccaggtgctaacccctggctttaggagctctgcccttgctggaaagggagagaagctggagcaaacgttcctcatccttccatgagtcactgctcagattactgtgtggaacttcccagtagcaccaggttaacagtgggactgttattccggaggaactggattcctttgcaatagggcaggtgccactcagtggtggagtcttgttacctaaaaccggcacaccctgacataccacactctgcccagcacagggcctggcacaccgacgctcggtgcgtaggtgtggaactagcgagggatttcttgctggattgtcactccctgatgttttccatgtggactgggagtcatcccaagctaccgtgacaaggacgaagacttcatgccatgcaaacacggggaaaatcaaaactgcccaagccaaaggatctgaaattatggcctgtcagagcttctgggttttactcttgacaaatgattaccttttaaagaaataaccggccgggcacagtggcttacccctgtaatcccagcattttgggaggccgaggtgggcggatcacctgaggttgggagttcgaggccagcctgaccaacatggagaaaccccctctctacttaaaatacaaaaaattagccgggtgtgatggtacatgcctgtaatcccagctactctgggggctgaggtaggagaatcgcttgaacctgggaggcggaggttgcggtgagccagagattgcgccattgcactccagcctgggcaacaaagagtgaaattctgtcttaaaaacaacaa

SEQ ID NO: 160990 - DNA, 1000 bp, Homo Sapiens
ttttttttttttttttaattgaaaatggaatagtatcactttaattaaaaataataataaacagtatcttggcaaaatttgcttccaggaggatgtggcatccaaaacatacattcaataagctattgaatagccaatggcacagttcaattctcacccttgatataagaaatctaccaaatcagaagtattttttgatatattacatatttagactccatgtttaaagaaaggaagatagtataaagtaggtggtaataaataatcatttaatgaatgctcttaggtggcaggataactctttgcttaaccaactcaaccattcaattattttgagtgtggaagaaccattcggaggaacaagggaaacctaacatcaaatttcagttaaggtagtggttacttgagctctagaaaataaattgaatttaattctggaataatctaaataggttgtcacatggcattattgttaggattcaactttactgattaataggaaaatctacatgaattaaagtatctgcacataaaaggattttgcctttcgtgagagttaatatgttaaattttacactatgctcaaagttttgcctcttgcacatttatatgtctctctctattctttattcttcctgaaaaatattagaacatatttattggaggttcttatcaattagatcaagtcattgtctttgaagacatatttctgaatcttctacacagaacagaaagaacttaaatgtataatatgaattacctaatagttaatgttaaattaatcagccatacccctactgaatacaaatatttagaaatacacattcactaatcaactaatcaggacctttactgaagtagggtttttagaaaccagagacttaaggagagatatacaccaactatatttttgctatgaaaaaatgaaactgttttcctgcaaaatacataacaccagcttcaagtttccatttctcctttagctcagagcaagtttgga

SEQ ID NO: 160991 - DNA, 1000 bp, Homo Sapiens
taaagttggaaataattttattagttttttaatgcataaatccaaacatatatttgtactgaatattttattagctaatacagtaccattttaaaagttctaccaacttatttaaaatatttcctgtaaaaacatcatccaaaatatactttgttaatttttatgaatgttaggtgttatgtctcttttctttgacgctctccttttttatcctgtgcttacaccaaaaacaaattatttgaaaatgctaaaataaaatgtggcatgttttcttagctgttttgtattctggtataagatattttacaactatgaaagttgaaaaataactttattggttttgctgcatatagctgcctgtctactataagagaactaatccataaaattaaggcattttgttatttcaagtgtagaggggcaagaacataagggaattataaaaaccccaagatgactcatttaaagtagatgcacattaaaatactatagatctggcatatttcatatttataaagcagacaaaaagaatgtttatctttgcatttggcaagagtatcttcaagataactaccacttttcaaagcactattgttgggtaggttttattaggggagaggacttagaaaacatgactttcctcacccaaaaccaaaaataaatgagggcttaaaaatatattatttaagaagatagtggccagaaataaagaccatgaccaacaagctttggggccatcaagatgaaaagacctttcctttattcaagatctaggatctgaaaatctcacttcataaatttaactggattttcttttctgattatgtttaaccccaaaacttggttgtataccatagcagtttctgttttacctggatgttaaaagaaaagccactggaatctaaagagagatgaataacctcttgagcttagatggagaactaaccagtggcaaatatgtatctagtggggtaaacacatctcaagagattcaaaacat

SEQ ID NO: 160992 - DNA, 1000 bp, Homo Sapiens
ggctttgcttggttttattgaagttacacacataggaagaggctggagcacacaggcacagctcagggcagacccacaaaaccaggggcaagagacaggaggggctgagctgctggcgggggcggggtctcagaggtgaggcggggtctcggaggtggaggcagggccacggaggcggggcgggcatctcaaaggtggggttggggggtgtctcagaggtgaggcggggtctcagaggcagggcggggtctcggaggcgggggacggggcctcagaggcgggggtctcagagaaaggggtctcggaggtggaggcggggtctcggaggcggggcgggcatctcaaaggcggggttggggggtgtctcagaggcgaggcggggtcccagaggcgagggttgcctgaacttcggggcgtcacacttgctgcgggtagatcccggggttcagccgacacatgcacatcagccagaagacgcacacggtcatggacacccagatccagaagtcctcgtagggctcggcgtgcggcctacggcaggcacggccagggcgctcgtcttcctcccggcggcacccacagcgggccttgtggaacctggacctcagctgcctcttctggtaatagccttgggagaagcagccattgccctgggggccgtaggcaacgtggccaccgcccttgcgctttatgacatcgaagactgcgaaggggatggtgatgcagccctcactaaccgtgatggggccctcggcattggcctccagaggggcgtcgtgacccgcggtgaccaggccaccttccttctctttgccttcagtgatgtcagtaaaggcatctttgccttggacatcagcagggaaggggagggcaagggagcccttgacctgggaggggaggccaccagcattggtctctggcagggcgtcgtgacccactgggacgaggccctggccgcctccttccttcccgttgccttcagccacctcagcaacggcat

SEQ ID NO: 160993 - DNA, 1000 bp, Homo Sapiens
ttttttttttttttttagaccatgtatttttatttatgaaaagagaggcatattctaatagtcataaggcaatgtgtttaagagctgcacctgaactggtattctcaaaactgaaaatagttatcaactctattcaacttgtaagatgtatctatgtgcttcccaagtcactggttgtcacccaaatggaccacggtgactccatcatgccttaaggaggcattatatactgtgtgtagtatgcacatgtatttttaaagaaatgacattaagagagaaaagaacagcctttcaaacatcagttcctcaaataaggggtgacagtgctatatggctcccttttaatctcctcacctactcagttatcaaatacctccaaaattagacaaataagggccagagacaaagctccatggtgaattgcatctttcagatgtgctttcaattcactggtttttaatttcccattcctgatttactgaggagtaaaggtgagaatcatccaactgatgacaaagtaaaacaggaaaacaggataaacagctagggctctgcggtttggaggctggctatcagcaaggagagctgtggaggcaactatagaccaggcaaacatcacaatcaccacaaaaagccgaaccatgaagtttacaggtcctggatcagccaaaagtaccagccggcaaatcagcattgctactgtcaagggaagtatacagtaacccagcacacagaggctctgaaaaaaagatatgttccctccaagaagttttgagttgagggtgatggtaactgcaccaaaccagacaatgacaaacacctctgcaaattggggccctccatctttttcactatctgcagagtctctttgcagcattaatgcgagtgtcacacaaaggatcaaagggccccacaaatcccaatctctcaaaagagtattacttttccttgggtacaaaacatgcatgaattttttcccaacagcttttagatcacgcat

SEQ ID NO: 160994 - DNA, 1000 bp, Homo Sapiens
acctgttgaactcatttattactttttatggattctttagcattttctatatacaactatgtatcaactgtgaatacatatagtttcacttcttttgcagtataaacctcttttctttattagcttatttgatttttagatgttgaacaaaccttgaattcctaacctaactgctgtggctagaacttcaagtacaatgctgaatagaagtagtgccgagtgaacatccttgtccttcttcccaatcttaaggggaaaacattcagccttcagtctatcaccatgaagtataatgttaggtgtgggcttttcatagatgttatatttatcatatctaggaagattccttttattcctaagtttgttgagtgtttttatgaaagagttttggattttatcaaatgctgtaataagacaatctgtgtgggttttgtgctttattaaatatggtacagttgatcctcattattcaaggttatgtatttgtgaatttaccaacttgctaaaatttataaccctcaaattgatatccgtggcacttttgcagtcatttgtggatatgtgtaaatgggtgaaaaatttgagtcacccagtacacatgttcccagctgaggctgaacaagatgatgctctgccttcctgcttcagtctcatagagaaatgactggagggtggaaatggcaggggcaattctgtgtagtacaagaagctctggctccggggccagctggatggggtttgaatttcagctctgacacctgttaggggggtgcctcaggcatgtcacttaacacttctgatacctcactttcacttctgtaaaataaggtagaatttgctaggatgaattaagaattcaagctcataatgtgtgtgagataaacatatgtatacacacatatacacaaatacactttctcctaaaagcagttgttccatatttaattcagtgtttatgggagaatattctgtagaacataattactgtgaataatgagaa

SEQ ID NO: 160995 - DNA, 1000 bp, Homo Sapiens
ttttttttcagaatacttccttctctttactgtcaaagcagcagcattttatttaattatgctcaacagcacttgtatatcatagtagtagttttagaaatagaaaatttgcataagacccggtcacattatccataaagtctgagaggaaaacaaaaaagaaaactttatcctttaaaaccaagcttcattgttttcggttttgagccacacggcacacaatgagagatttcgttctcgcttccttcgagactttacctgtttgatgagcctttgttgtggtgcatgtgtactgttccaagcatttagtgatggtacaaactacatggttaatggcacaagaaacactcccttcttgtgatgaaacctcagtaaaatcacagtacatctcaatatgagaaaggactgcttcaaaaggatacaccgatttaaagaggctttgttacagctcagtagagagagagagagagagagagagagagagagaaataaaggctcttctggaatgtagaaaggtaatgcttaactatacaattcatgaattaaacagaacagttttgattaaaaaaaagggcaagaccttgcagttttatagatggctcaattcaaagtaatccctctagaaatagggactgataatgtgtctttgcaatgttggagcaacaggccaggtgctcgaggactctgctgtcatctctgttgaggcgcaagcctgcactatcaggcacatcctcagctgaatgcatccagtgcagaacaataggagttgatacgctgctttctgttagacgggaaatacctcactcctttccttctctctcctttccctccccaaacaactcctccattccaccagcattatttgcaaaccatgttgcaaaaacccggcttttatatttcctttctttttttgtaaaggaggaaaaaaaagtagatgactccctcaggttaaagagttgtgctattcaacaaataaacttcctcttccgtttcttctctc

SEQ ID NO: 160996 - DNA, 1000 bp, Homo Sapiens
gatcttttaaagtatgagtttattctccaggttttcttaaatacccacaaattagtgtttttattgctgctatatccaagagctgaaaacaatttaaaatatgtacttttatcacatttaacacttacaagagagaaaatggaactgtttgaattttaaagatgtttttcagattcagtaacatatggaaattgaggataatcatagaaacagctattgaactctaaaataaaaaaattatatggaaataaaaggtatttcatttgaaaaatggctcatcacctctcctgctggttaatacactaatgacaatgaaatggaatcaagtgttatcttctccacatttaaaacaaagtgcttcttctcctgattgccagctttaggtctgaaatgtaaaacaggattaattgaggttccgaacaactcaaatatttcactattgtactttatgctaatgaattattttgtaatactaagaaaataaattggtaaatacctcatatatttgctggattaatgtttgacaggaaaaaacacgaaatggatgaacagctgatcgagtcgagtgcaatttggtcactgggacacagttacaaatagcactgaatcataatacacaaagagcctagtgtgtgttaaagaaagacgaaagaggagttgggtgcagtggctcatgcctgtaatcccagccttttttggttagttttaaaaagataagtgatagcagatgttgatgttattagtgtgaccaatgcattgaatttccaaagaataaaatcagattacttcagtactgtatgtcattattcacaatgactcacaggataaatatgacagatatcccacaactgtcttcagtcctgggatcataaaataggacaattgataatcttccattaagtggaaaattaattaggagaaatgccatttctagaatgctgtttttctttttctcttcatttgaatttttttaaagtagacctcacactttctttattta

SEQ ID NO: 160997 - DNA, 1000 bp, Homo Sapiens
tttttttttttttttttaaagaaaatactttattatgtcatgaaaaaaaaggcatcaaccaactagattcatacttgtttgaaaaaaaatggaaaatttattaattagacagtatgtgggcatcctgttccacatgggaatgagaagatgctataggttctctaagtattgcacagtctgaaaaaataacaaaaaaagggaaggggaggaaaaaaaaaatcacatgatattgggaaccatctcacattatgaataatctaccaagaaacatttaaaaaagaaaaccctttgtttctacagtagctttaagtttatagttcttggaatgactgtattccattgaagacatctcagtaacaggaagctgttttagcaatcccatgtgcaaatattaataaaaaatatataaaataatgcaattcatctcttgccttcaccccggcaatcatgacatttctgagaactgttttgcttgaaaatgggttaagctgtaagttttgcctgaagctccatctctgcagcccgtttgagtgcaacatccactagaagctgaaatccactgaagtcctggttgaggtccggtggagtagggggaggagtgttgaaaagaccactctgtgtattcgtacttggtccagatttacaagtgtcctctgggtacatgagagaggtgtctgtgaagtttttggccgctatctgctgtatatctgtgttttgtcccacaccgaccgactggcagagagagaaagggacatctttcaatgcagtcacagtggtatggcagatcactgatggacgagccaaaactgatcccggggatgacggcttaggagacagtggcctccctagggttgggtttggcccagctgtacaggaatgaaatggggtctcctctagagctggcatgaagtttttgatgcccatcacggactccacagagctcgtttcagaaatcttggccccacggcgggaaattgtgaactgatttggatctttgcca

SEQ ID NO: 160998 - DNA, 1000 bp, Homo Sapiens
tttttttttttttttttttttttttttttttttgcggaattatccataaagtactttattttacaacctgcttctcttgtaaaactaaaggtccattttattacacaaaagttttatacagtgttaaaaccagaactgtatgtaaaatactgcatctaaatgtttctaaatagttagtcttgttccattggttcatcggtgacttctgtggcttcgtcatcattttccatggatgattctgaaagaatctctccagttttactggaattggatcctactaattcttctgtttcacggcagtcagaagaactactacttacagggccttcgttttcactaccttcagaatgtagcaaatctttctcagcttgagacacatcagattcctccatttgattattttcctcagaagtctcttcattcacagttaaggcatcatcagattctttttcttgattttttctttctgggatcatttctcttgatgtcataaaagactcttcttcttcctcttcatcctcttcttcatcctcttctgtacagtgctgccgggtacaacggctatctttgtctttatcctgagatgaagatgatgcttctgtttctcctaccataactgaagaaatttcgctggaagtcgtttgactggctgtttctctgacttcaccttctttgtcaaacctgagtctttttacctcatgcccctcagcttccacagcatcttcatctggatgtttatttttcaaagggctcactgaggaaacttctgattcagaggtcgaagagtcactgtgatttttctcctcattttgctgcaaatttgcctctttgctgtctgtgctctcaggcaacccatttgttgtcatgggggctgacaaagaaacctttggtcgattaagtggcctgggtgtcccaggcccatttatattagacctctcagtatagcttggtgaatttccaggaaacataacaccattcattcgatttaaactattggaat

SEQ ID NO: 160999 - DNA, 1000 bp, Homo Sapiens
cagcatttaggaaactttattgcacttatccatttacatgtcctaattttccagtaacataaaagcaagaagcaaatattaccattttagtaagaccaacagttagagaaggaaataaaagtagaaagaataactaaatgagtcaataaattccccagttgtttctctgcttgtctgctggtgcttggtttcacccaattaatagaaacaccaccacacgaacacaaacacacacacacattaaccttgcagaaggtcctcctaaaactttcctggacagacccagcccccaaaagttttctccaagtactgggccacagccagggtcagatgatcattaaagggtccagccacaacctggatgcctaaagggagtcctttggcattcagtcccagtgggcattgggtcacaggcaaacccagggcactgaagacacctgtgtaagcaaagttgaagggccgtgttagagggacatgatgcttaggtgccactgtgggatgtgagggatataagaacacaccatcatcacctagcatatccaccagctctttacgcaggctttcttccactgccttaaacttttggtatttctcattgctatatctgagcttttcttccaacaaagccagtccaatggaagggatggtgtacactgacagacccaggcaccatttgatcaactcccacagaggactgacatgtttcccatggtcaccaagcaaatctacaaatttcacaggttccttcccatcatgtccctttgctgacatcattgcgatccacaactgaaaagagtacttcattttcttcagtttaacatgttgaactgaggctcctagaatagtttcaaggtgaaccacaacctttttctgagtcataatgagatcttggtccactttggacattaaaaatgagcctccatcatgttccatccagtaaaattttaagtcttttaaatgtacctttgtgtctagttttaaccttttgatcccaggtcct

SEQ ID NO: 161000 - DNA, 1000 bp, Homo Sapiens
ttttttttttttttttttggttttgagctttataaaaatggcatcatactgtatgaactgtcttgctttttcatcccacgttgtttctgagaggtgtttgtgatggagcacagggccacggtgcccatgcattcctcaatcatttctccagtcttctgaggatgggcttctgggttgtttgcagccttttgcttgtcccagtctcctagtttctccactccatccgggagcatcacgtttgcaacaggcagggcaggtggtgcatcagatgtccaggacacagtcatttgacacccaagaaaggagggcctggggcctgcatcaggccatggctgagtgggactttgccaggctgtctccgcacccagcgacaggactgtgcgtgctgctgcttcttttgtttcctccacttctgttccctcatccagagagggcggaagagctggaaacagaggctttgtcagggaataaggaagcccacctgtgtggtcccaaatgtcgcaggggcaacgctcacaccagatacctccctcctcctcctccctgcagcctctgggctcccacagacagatgccctcctctagtgcctccaggggcaggccttggccgccagcctgaggatgcccagcgctcccctcctcccctaggttcctgtgttcccccagttcttgcctctcctgctggctggctgggaaggccctcaaggatggggcccaggactggaggaaatggtgacccggacccccaccaagctggacaggcagatggtaggcaggacacacctctgcaatctctgggaagtgacaagcagaggcctcccagggacaagagctgagaaggatgagcccctggctgggctggggctgccaaacaactgtctcagtgccccagggcaagcccagataaggtgacatagtggcaaatgtctctcctgggcaagcctgggatgcttcacaaaacagctcttcagctgaagccaacttggaaaattccagggaaa

SEQ ID NO: 161001 - DNA, 1000 bp, Homo Sapiens
ttttttttttttttttttgcattctgaagtcgtttttattcgataactaacaccataataaccagagttccatctgagaggagaggagagtgagaaggggccagaaccctttggtggctgagaagcctcctcaaggctatgttggggcagtagggaggcagagaggtgaagatcttagggaagcccctgacccagcctaggctgctgcccacagggcaggaggaaagcccaggaggggagacaagacctccctgttgcaaccaggaggctgagcaaggcactggtgtttacagcccacagcttcacccgggaggggcgagggctcctgccctgcgagagcctttaggtgtacagttggggaaagggcagttcagctgttggctggagccagttctccgggctccaggtggtgccagaggcctccatgaggtggaaagtgtaggcctggcgcgagcggtcagagaggttctgcttgctcttgtgtaccacttctccatggatgaggaccagggcccctctctgcactggggtgggcacaaagaggctgttatcccgggctggctctgacccaaggaagctggtaccaggcgctgagccaacaggggcccggaccatcctccttgacacaccactggtgtgggagccagggatgaaccagagacagccgttctccagcgtggcatcctccactgcgatccacacgcccagcacccggcccaggggctccgtgtacaggaaggaggcgtcctgatgaggggagacttaaagatgtacatgctctgcaccaccacgggcatctggaggcccagacttctggccaaggtctgcaccttgaaggagtgtgtgatgctcttgaagacggggtcgtgggcgtgcagagcgtggccaattttgttgatggatttctccggagggaccaggaaatttcctttctcatcaaaaacgcctttctcaaagaagaatcgaatcttgtcaccactgctcaagaaatagtctgtgc

SEQ ID NO: 161002 - DNA, 1000 bp, Homo Sapiens
tttttttttttttttcacattcatgagtttatagaataaattcctacaagtggaagagttgagacaagcatgtatgtattttcaatttcttagataccgtcatatggccaaagtggagacaccagtttaaacttttaacaagagagcctgtttgcccacaatcctcatcaacccacgatagtagcagactttttacctttgccatgtaagtgtgtggggagaagcagagccagcgctgtcaaaccacagctccacgtccatggtttgagatctccccaaagcaggggagcaaagagttcctcgggcttctgagctcgagcccagtataaatggccaatcccttgccctgccctctgccagctatctggaagaggcgagctcatacagtcggtcttagaaatcccacctcttactggctagggctggcggcagaaggggacagtgagccaagggagggctcagtctctctcccccttgtgctccacctggtggtggctgcgttgatgaaggagcagtaagcgtctctggccaaaggcctggccgcagctggagcatcggtgccaggcagtcgcctggctgccgggcgcggttggggggtcgtgacataggcgatgggcggccagcttggagggaaatgagaaagccttggggcaatgcgggcaaggataggggcgggcgtcggtggcgtggtgcgtgtggcggtgggccgccagcttggaagggtagcagaaggacttggggcagtcggggcacgggtaggggcgggtgggtgcgtgggtccagaggtgagccgccagcttggagcggtggccaaaggacttcgggcagtgtgggcacgggtgcgggcgggcgccgctgtgcgtgaggcggtgggctgccagcttggaggggtaggagaaggccttggggcagtctgggcatgggtggggtcgggcgcctccgtgtgctaagcggtgcgtggccagcttggacgggtacgagaaggccttgtcacagtcgg

SEQ ID NO: 161003 - DNA, 1000 bp, Homo Sapiens
acaatcctttaattttttatttttatttttttccctgggatttcgaaccaatatactcctagcctgaacaacatagaacatttcctttccattttggtagaaattattttttaatgtaaattatattgtgttctatttgtttccaatgtcttgaaaagttcaatcacttctccaaattctccgaataaacataagaaaatatctctccccagcactacccggtcccccagtatcaccatcctaaaggcacttccacttcctctatcatcagggaaggagtgtgcagttctgatttagctcctcagtggagtaaagggaatttagaggaagggggatttctgcagaaattgtcagttacacaagtaagttcctcttggttccccgtttcatcaaaagtgaaaaactgttcacaggagtgcccatgtcccctgtttccctatgcatcactagagccaagaggggactccgccagcaaggcaccctctgctctgtcccgcagatcacagtccccgactttcaccccattgtttgtgcaatgtgcagaactggagcccaaagcagcgggctcaggatcactctccaggcccggcgggcccatagactccttccttggctgggaagaggggctttcgtgaaagcagagcttgacaagccccagtactgtcatggtcaagatcaccaacactactactgctgtgctcacaaatatgaagaccacggcagaggaggagtcgaaagcctgaggagtggcagaggaagtcgtagaattaaacttggaaatcacgctccctgatggggtgatagtggcctttgactcggcttgaagggacatttgaagggtagacatcgtgctctgtgatccccatcgaggaatctcaggaatagatgttactgaattgtcttgttcagggacaagtggtgtctctcccagcttctcgtcgaccctgattggccatgttctctgcggcacggggctggttgcagtggccggcgggcgcct

SEQ ID NO: 161004 - DNA, 1000 bp, Homo Sapiens
ttttttttttttttttgcatttttagtagagacggggtttcaccatgttagcaatgatggtctctatctcctgaccttgtgatccacctgcctcggcctcccaaagtgctgggattacaggcatttgccaccgcgcccggcaatttttttttttgagacggagttttgctcttgttgcccaggctggagtgcagtggcgcaatctcagctcactgcaacctccacctcccgggttcaagccattttcctgcctcagcctcccaagtagctggattacaggcatgcaccaccacgcctggctaattttgtatttttagtagagacagggtttctccatgttggtcaggctggtctcgaactcgtgacctcaggtgatccacccgccttggcctcccaaagtgctggaattacaggcatgagccaccatgcctggccaagagcttgatttttaacattagctcaaggttaatgcccccaactctcagcaaaagcatgacgggtgcccgcgtccgtctgggagtacttttcaccgttttactaaggcttcattgcccgcagccatcctgacctccacactctgaaagtgacaagccctgaagtctccagtcggggcaggtgcttgagctctgacgccctggctgcctggcgcagagaccacgtgcttggggaggaaggctgtgtccactgggggattcctttcctcacatacaggatccagtgatcagcactgctctggaaggagggtcagggtggtgagcgttcagtccctccggccctctgagccccagcctaggccgccctctgcttgcgctcttccttgacagactcctccagcttggacagggcctcctcgtaccgaggaaccagcggctgcagcagcttgctggagagctcgtgccgctgcaactcaggtgccccagcttcagttagcattcggaggaatctcctctcctgcactttcaggagcagtgtgaaggcctgtccagttttcccagcgcga

SEQ ID NO: 161005 - DNA, 1000 bp, Homo Sapiens
ttttttttttgtgaattcataatgattcatctttattatttgattcaactaaatatatttacacacttttttttactttccaatttttatttcaggttcaaggggtacatgcacaggtttgttacatgagtaagttgtgtgtcacaggggtgtggtgtacaggtaattttgtcacccaggaaaccagcataacacgcaataggcagcttttcaatcttcaccctcctgccaccctccaccctcaagtataccctggtgtctattgttcccttctttgtgtctacggcacacacattttctagaagttattgtgttaagggttatatggaatccaaaagtattaatggcaacagtccatgtccttttaaatggattaatgttgacggtaacctgatattgtctaggggaaaaaaacagatgacaaagattatgctctcaaagcatgtacaaagtgctcaacattttaccctgtatctatcttatcctgtatctacccagaagaaggttccagatttctctctcacatatcacccacctctcaaaataatctgctcagctatggaaagaacaccactgtcttgaaaccaagaagcaaattcgagtgtagaagccacatcccagtgcaggtgggacagaaagatagaacaaaactgggatgttgacgcccaccagccccagcctgcttattcctcggcttcctgacaggagatacaggaagcccctgatgtttttaaaccattattattggagttctctgagttttaacctgtttcctaacctcaagggaaagagaaggagaaagagaaacgcaatggagattctaataaccttctctagaggaaatctagaacaacacttagaattacagaactttgcaagattctctgattttggcaatcttactatgcttctaatttctgttctagtctatgtcactgtgataattagcaataaaatcattcagaacctccaagactcatgtctgtttcctcagggacag

SEQ ID NO: 161006 - DNA, 1000 bp, Homo Sapiens
tttttttttattttaaaaagttttattttggagatttagaaatttgagatttttaataacggcaaaagaaattcagtcacacctaatgattaacagaatgtagtggtgtattatctaaacagaaatcgtgctgatgtgccataataaattgtctattagtaaaaaaatacactttagggcacagcattgtatcacaaattacagtagggatactttgcaagaatttaatcaaactagagaattctgagtaactgtatcttttaaatgcagcacttaaaaatgtaacaactctgtgcatcctttttcttaaaaaaaatgaccttgcatgtgtcatagaaacgctgctttattgctgcagaggtcaaagttcaaggctcaagaggtacaggagagaatacaaaggtagcctttagaaacgtggtcttgtttatgtataaaaaaggtaaagtttataaaagttaatttacaaaccaagaacaaaagtggtatgcacgcattatgtacaagcatccttaaaacatcaaaattttcaaatgcatagccagaaagaacagaaaaccaccactgccccttgtcaaaaaaaaaaaaaaagaaaagaaaagaaaagaaaaaaatatccccaaatcacaccactattttcttctgggtgataacacatttctgaaaccaccaaatgcacaacgtactcagtctttgtcatgatacagtatctagataatgcacaaaagccataaaaacttagtaacacaaggagaatgagctaagaattaagaacatgagggtaaggcatttctgctggttagtatgtctgtggtaatatggtgaagttagagatctgaagaggccatggaaccagtctcacatgcttttgtatccttccctaagaaaaatgtgttttcatgtacagtaagtcattgtcttcacttcaccctcccccagttgtaaatctccttgctgtacatttctgttaaatccacaacactggttatatattccaggt

SEQ ID NO: 161007 - DNA, 825 bp, Homo Sapiens
tttttttttttttttttttttttttttttagtttttttaagtacaattaagttattattgactataatcaccctgttgtgtgtaattgttttgggggtaccaggaactgcacccatagaatatgacaaacttaatcgattaatgttttgtgtcttctgactgctccaccgatgagctgttccgcgtctctcttccttttcttgggcctccctatttctttattgcagtggtctggaaccgaacctgcagtatctctgaaggacaccagatatcatgttaatcttctcagaggtagttggttttcccggggggcacagctgtttcccatcgttttgtgggccagatgcttctggcacttccttcgaaacatttccttcctctgctggcttcttgggcatgatcttcgggaagattccctggagcctgccgaaagtcatctgaggacgttgaacctgattcccacggttagggtcattatcaaaatcattcccctggaagtctgtgacccgtttattacgcatgaaagatgggaggatggccttgaaacctagtttagtcatggcctcatactttctcttcatatacacatagacgattttctccgagactttcatcttttcccactcttccttagagaagtatttggcaatatcatcgaaggccttttgtatcttctctggtatttgagcaccaaccgtgggtctccttgcaaaggtgtcatctccgttcatggcacagggagtagtctgactctgattttggaagaatccaaagagaaaatcagaccgtgcgtactcttgagtatggaagaatcgaaagagagag

SEQ ID NO: 161008 - DNA, 1000 bp, Homo Sapiens
tttttttttttttttcctggactctgtttctctttattcctctccctccatgccctgccccacaccccacatccgcctgctggtcagttgagtttctcggtctggctcctgtgcagagagggcctcaaggtggaggtggaagccggtggcagtgagctggacctggctctgctcttctgcacctgccgcttcagctccaggctgtcgtacacctggtagttggcattgccccctggattccggctgagtgggacaaacatggtcgggggaggggcagggtccgcagcctggactttgggccagggctgggaggaatgggggaccagcactgagcttggagctggggtccgttgatgggaggcctagtccaacaccgtgagggaggcagaggtagtcagaggacgccaggcgggcagagcctcagcccagtcagctgcccgacgccgcacctcacgggggtcctgggagctgtagcccaagggttccgtggatgggtggggactgcggtgggactggccataggcgtgaccaagcaggctctgctggtgggactgtggggagtggtgctcccggcagccctgggcctcaggccgggcgttccgggacaccgaggcaggggggcgctcaaagccctccgtgccacgacgccgctgatcccaggagtcatacagcatccagcccactgaggggtaagggctgtgccccacggggacccaagaggggttagggggcagccggtggggaggtggtggagacgaggcccactgctcagcctccacattgccccacagtcgggattgggaaccgtggcgcccataggactgcagcctcagctcagacctggcctctacacgcttgggcatgcagcgcagctcaggtgacaggtagagagagggtggtggcagactggccaggataccaccctggtggccccacagccccacattggagggcaggcccgctctctgataaaacccgccccagccgcgacgtgggtact

SEQ ID NO: 161009 - DNA, 1000 bp, Homo Sapiens
tttatctctgtaattctttattaaaaatactgctgtacacatagagactgaaaacaggattaaagatgaataacacaaattgggtcatgacattagaacctaacacactggtgctttttagggaagttgttgacatccaaatcacagaaccaaggtcaaaagcaaaatacaaaggtaccctcaaaaatatttacaatgaagtaaatacactaacagaatttaaaacaggtacaaaatattgaaatgaccaacgttacatgatttcaagggttgtcctttctgtgcttttatctgtcacgacaggaaggtgtggaaagtttatatccttaatttgactactcttggatattaaaatctttctattaattaaaaagacttttagacaacctcttaaatggaattacactatggaaaacagggctcccccaaaaacacctaggcagaactgagagttctttgaaaaccattcccaataaaaactaaatgaaaaataaatataaaacaaagcttaaaaaaatatgcattacctgacaccaaccttttctggctgacaatatttattcatgaaaacatatcagctgtctaccttttatatgcaaaccaagtcctgaggttaactaggggctgaagcaaactagcatttaggatgcaaacattcttggatttgtgatgtaaacttgccttgcacagggaagtttgctggtctatacagaatgagaaattcaagccctattttaacccctgccctctttagctttcacaaaacattggtccacaaattaaattttcaaaaagttcccagaccccaaaactaaaatagatgatcccctttcattttcaaagaaaacaatattggaaaaaatctccagcccgcttataaattaagcatttcatatttcttctagaatacaagtagttcttttttgtacaaaagaatacaatatgatttgtcaaaaaacatataaaaagacagctgctcttcctcaaatacatgagctaa

SEQ ID NO: 161010 - DNA, 1000 bp, Homo Sapiens
ttttttttttttttttttttttttttttttttcagtgtttttgaaaaagaatactgctatacctgtgttttattttaaataaacaggttctgtcatattttatcttcttgccagcaaatgaaggacattgtttcataaagcttctaaaatgtacatgaatatttaattaaatcatatttccttgagaaaataaagttcattcgcatttatagcagacagttgtgaggagctcataattgtcataagaccagggtagccagtaccggttgcttgtggaacaaaactcctcaatttttaaaactttttttaaaaaataaacatacaatcataggtattcatttactttaaaaattctaaagatgaagaaaattattgtttatatatttaagtccttgtataaattacaaaactcaagtttatgttacagagtcccttccccataggaagcataaagcacttttgtggtacctttcaccagtaaatatttgtatcacattgaatttgagaaaccaaataaaagtcgatattgcatctttaagccccaagagaacattcttctaagctgtctcttgtgatgaatgcgtttcaaaagtcatttgattgctatgatttaactcaatctcaaataaagttatataaaagtaataacatattgacttcagtagaaatctgaaacatcagtgaactgcagactcttcttgcttgaggtcaacaaacacccttaggaagacaaccaagagtagtttaagaccaggacaacaaaataaaattataacaataataataataaaataacaataatacaataaaaataacaacaaccaacaatgaggtaaactccccttaaaaaaggcaaaatgtgttgcctggactgtcaggagagagttcgattgtacctgacacctaaatgtttttcaagccagagttcagccagttgcatggttgaggcgaaagtacttgccttggatcctaagcacatcttatactgcttagggtccaa

SEQ ID NO: 161011 - DNA, 1000 bp, Homo Sapiens
tttttttttttttttttttttttttcttagttaatatctttaattttttatgtagaatatactatttttttctccaccaaaataacaatatatttgcaggcgggaacatgtatgattttaaatgcacttttgaaatcttagagtagaaccaccactctagtaatacttgtaataaaattaaaatagttttaaacacttccataaagaattaggggtgcccagctccttgatttccccctagggataaagatatccatgtacaattccaggagcttccctgtaattcctcaaaaaagcactagtaaaactcttaggaggatattagataaagctcacttagcaatagccctttttccccacatattctggaaggttctacaaaagctattagatactcattcctggttctggaaaattaaataagccaattcttggtaggattttccaaatggcttaccacagaggatttatcctcttttgaaatatttcatcccataaagaatagaagctctgccttcatagcatttcaagcttctgtatttctgggacaaaaaatgtctaaacagaattagatctccaggtctcaaaagcacagagatatatcaagagaaatctggagttaaaccaaacaaaaatctgtaaaatgtgtaaatgtcattctccttccctctcagaccttcttgcccttgtttgctgttttcgtcttcttcatggaaaagcaagtccttcagcactgggctaccagcagatgtcccaaaatgtgtcaccctgaactcggaatgagagaaaatctcattagttgtgcccctgctgatgtgaaagcaaggcttccatcactcccctttcagaggcaccacattatcctatgaggttgggtcagacggtggtgctatgtttgatccttttctcgaacttcttgtaatcgtttttctaggcgatccaatttggcaagattttccttcagcagtttgctgtctggaaccagctgtaaggctctctc

SEQ ID NO: 161012 - DNA, 1000 bp, Homo Sapiens
tttttttttttttttttttttttttttttttttttttttttttttttttttttttttttttttttttttttttttttgaatgtaacaagcatttattaaaaactgtgctgcacaaaacatgttagaaactagccaggtgctaggagtctaatcaaggcaggggcagggtaaaaacatgggaatattacatggacaagcttgtctagcatggcagtctataacccttgagggtttacataaaataaaggaacatttttgtggctcaggctccccagagttctctttatgtttgggcagagactgccccatcccttagtgatcccaccttagagccaggttttcaaagtcatttctcccagtatatctgtctctgtatgcaagtttcctctggttgccttgagcaaaaacaatcatccaactcaaatttgctagccctatgctgggccagcccacgttcccgtaggacatctgtaggctaagtaagccccgggtgatctgtgtcttggtcttcctaattccgttgcagctcttcctctctcagccaggagtggaaagtcctaagcctccttccattcatcccattatcaaggtgatggctctccctccccagctctgcttccaggaagatgacatcccaataacttgggtatcaccaaaacccctccctgaccaccagggaaactgctgtctgtcttatgtccatttggacagactatccatctgttgcttgtttcaagacttgttgatggggtggacagaccagacatttcatgtatttctgtggatcaagatctctcttttttctctctctctctcttttgagtattgtgatctcttttggttctttcacagcttccccaggccatctcactagtcagttcttcaagagaaacagggttcacaagctctggcattttcctgtttattcagttctctccactatggcttgttgggtggggcaagcctcctcaatattagcaacagcccagatagaagtggc

SEQ ID NO: 161013 - DNA, 1000 bp, Homo Sapiens
gagacagagtctcgtcttcatcacccaggctggagtgcagtggctcgatctcagctcactgcaacctctgcctcccgggttcaagcaattctcctgtctcagcctcccaagtagctgggagtacaagtgcatgccaccatgcctggctaaattttgtatttttagtagagacggggtttcaccatgtaggccgggctgacctcgaactcctgacctcaggtgatccacctgtctcggcccctaaaaacacacacacgtaccagggcatgtgtgcaagaatgttcgcagcagtaaataaggcaatctgatgaagaaatcagggtatagtcacccatggaattatatgcaatatggaaaaaggaatgaactaaaaaaatgtagatgaatcttagtaacaacgttgagtgcaaaaagaaggaagtctcaaactttttttttttttttttttgagatggagtctcgctttgtcacccaggctggagtgtagtggcacaatctcggctcactgcaacctccgcttcctgggttcaagcaattctcctgcctaagcctcctgagtagctgagactacaggcacctgccaccacacccagctaattttttttgtacttttagttgatacagggtttcatcatgttgggcaggctggtctccaactcctgacctctggtgatctgaccgcctcagcctcccaaagtgctgggattacaggcgtgagccaccacgcctggcctgaagctctttttataaagtttaaagcaatgaaactataaacaacatattgattgggtaaaatatatacaagataatgctatacttttaaaagagaaaaagcactttacattgtttaggtctttggatctgcatatgtccctgaggtaagtattccagccatgggaaactgaagcacagagaggtagtcacccaccaaagctcagggctggcctccagagcttgaacccttgcctgagctggggtcaccagcctgggtgggccacgg

SEQ ID NO: 161014 - DNA, 1000 bp, Homo Sapiens
ttttttttttttttttttgagagtataaatactttatgattccaattgtgttaattctagaaaaggcaaacaaatctaaagtaaaaaatgtaaatcaacggtttcctagggaaggcaaggagggaatgtaaaggggcatgaggtagctttgcaggtgatggatacgttcattatcatgattatggtattggttccctgagtgtacataatatatgtacaaaacttaccaaatatgaataattattgcatgacaatcacatatcaacaaagcattaaaagaaactgttgcacataaaaatccaacttcctactcattttagaaaatccgatttggcaaccctatattgactctgtcatctctttcttcttgccttgggagcaaagaatggctggctacgtcatagatactacagtccctatagtataggatctgctttttctcagtccctattttcctgccagcacagcactggccttcagatgcacagcacggagatggtaatccacaaaaccaaaacctttagattatttgctctgccagtaacattagtcataggacagaggtctgaggtcctgagaatttctgcaaaccctgaatcctgcacagccacattcaagggagcattcacggatgcacatttagcagagttccatttctgctggtttgctataatctcgcctactccctattaatcacatccagtgtttctgtacaaattatggtcccagctgggcctggtatgtcttacagttaagagatacctgcctaatgctgaacttcagggcatatggctccttggcaggtgctaaacagcatctgctttacagtattggggaatatggggcaccccctgggaataagggacccaattcatgctgttcccacatgcactggaggttgtcacaactgccccctcctcgggataaaaattcacgccattcagaccacaatattatacccataaattcctacaatttttcctaggaggccttggtggca

SEQ ID NO: 161015 - DNA, 1000 bp, Homo Sapiens
ttttttttttttttttttttttttttttttttttttgctggttcccttcatttactcacagatgaaaagattaacacgtcagcaaatcaaaatcagagaattcctaaggcactctgtgcaacaggagcgggtggacgtgggggtgggtgcacgactggcgcggctgcctccacacgggccctcctgaagttaccttggcccggctgctggctacgggaacgctgggtcctcgatgccatggtcggggttgcagctgaaggcgatggtaatggcgtaacgggtgccccagtggaccttctccacgcggtgtaggttctcggaccccgaggtgaagaaggagacgcgacctgcttccttaaagcaggactcagcacggcaaccaaggaatcaacaataagcaatgctctcagcttccagaatcgcatgtgtctctcccctctcgggcgggtggtgagtccccggaggacacctgactccagccttcgcaccagcagcttcactggctctcggtccattaacttcttggaacccacaagacatcatccggaaacaaaaacatccagctctccgctccaccgtcttgttggcaccctcctccatgaacatgaaccgccctccgccgaagtcctccaggtagttggagaggtacagcagcgaggtgtagtcgaaggagccgtaggtcaccttgtccacgtgcgcatgccagtactcgtcgtgcgccgtccgcgcttccgtgctgtttatgcgggagaagaaggtgggcttggtcagatgcagcgaggatgcgctgatgccaaaagcctcagcaatggtgagctggaccttctgccgcacctcccggtataaccggaagtcctcctctgagaagatgttctgtattttatccccgaagtatctgtacaggttcacaaagtgcttcccgacagacagggcccctgagtgcaagtccagaatggatgcccctccgtcagatcctcccagggagagccccttttcagct

SEQ ID NO: 161016 - DNA, 1000 bp, Homo Sapiens
tttttttttttttttaatgctgaggtcagttaacagcagtagtcatcatcaaaggaacccctaaatgacactgctggtattttctgcctgcaaaacaggcttgaaggaatagcatttggctctttagaagtcataaccaaatggtaacagatcactgggactccttggtttctcaaagaggcaagctccttccaccctgcccggctggtgaccctaagcccgacatgcagagaagtccacgctgagaaataatttactcactgggattgttccaccctggccccttctctaaaaagactgacaattgccctgaattatggatgtactttttgtgatatgtattacagttcagaagaaaggtgttgagaccatcgtaccgtttcacctcccattagaggctggtcttgaacaataatcccagaagatgaaactgatgctgaactatgaccctcaatttacaaatcatttttcaaaagaataaaaaaaagtttaaacatatttttggcattatctgaatgggaggaatctttcatgcttgttttctaagaataagtgaaaacagcatgcagtgcactttcttagtttggggaaagagagaacatgaggttttcagattatattttattttaatcctgggcgtttgaattttatttttacatagctgcatttagtatattccctcaaaacacaataaatttctattctgtagcttaagggatccatcagttaaaatgttggtctttcatctttattaccctcccattaaaatgaaacaaaccgggactcacttcagtttcgaagaagcaatttagttggtaatgtccttactccccaagtctttacaaagggagaaagtacattactgcttagatttcacacatctatctgcataagaagcaactaagccttttggacatagactatgttaaatttaataatattctttgattagattattttattacaacattttttccattaccagtcatttcctgtgcac

SEQ ID NO: 161017 - DNA, 1000 bp, Homo Sapiens
tttttttttttttttttttttttttttttaggggtgtatggttttatttttttaaaaatgtatatgctcaataacagtttacttggaaattttcactagaagaaataacatgaaagaacaccagcataaatacataatacatactttaattgtggctatattaaatgtatcttaatgtaataccgctgtaacatggtatcatctcattgttaaaaattaaaaaaaaaaaaagaacatagggaagtgaaactaaaaaactatagaatcctggattctgtggcagatggagtacccttatttaagctagaaaaggagccctgtaaggtagaaagagaaaagaggcaagcaatctgaaaccatcatgttaaccaactgtgagtttttaaaaatgtggttaaaatgaatctaagaatgccttttaacacagctcacactttaatgaacaccagagaattcacagcaagactgtaaagctaggaatgtaaagttattgtggggttttagccacgaccctcacctcactctactatatgcaaaagaagaaagaaaagtctttagtcatgatttgcaccttaatcagcatcaattattctcagcagcccaaaaccctataaatgcagcagagcacacaggtctttaactaagtctaaaagcctagttaacatcaaaaaaattcatattgggaaagagccatacacatttaacgactgtgaaaagtcctttaacagagttttggtaaccatgagagaattcaaaccgaagagaaaccccaagtgtaaaaaatgcaacaaggcctttaggtatcactcaaccattagcaaaatccataggggagagaaaccttttatgtgtagctgaaatgataaagtcttaagtagtgacccattccttaattcaatatcagaacttctgtaagaaagaaactttatcaatgtgcggaatacgcaaggtatataaccaaaggagagaaatttgaagacacaaatgctaaagcagtaga

SEQ ID NO: 161018 - DNA, 1000 bp, Homo Sapiens
ttttttttttttttttttaatatttaaaatgtttaatagttaaaattttttaacaatttaactttaaaaaggtcacacattttctgatccagcaatgccccaatcagattgtttcattttattattattatcaacactgtcccctttttggcacctgtaaaatagttcctttcgggagtttggagccaggccaggcaccgtcggtgcatgggatgagatgggcaggtttggagctcctctgtctagtgaggatcacggtctgcagagaagggttggcctccccgtctcctatcaaggcttaaagcaaggagaaccatcccaaatttggttccttttcccctaagtatccttagaggcaatccaccctgtgactaggtgactaggtgaaggactgaggtccagaaaggagctatcttaaacctggaatcccatttcctagtctgcagccttaagcagttaccctctcagacaactagccctctccttcctccgcatgaaaacccatggcttacagggatggttgttgctttccctaaagaaattcaggaagggagatgtgagggtcagttctcagcggtggcgttctttaaaggggacgcagcctgactgccaggaggggagaaagagtcggcccagccaatgcgcatgcgcgaagcacaagcggtttctcccgtcacagtggttcccacggttgtcttagaaaccagtccccgaggcttggcaaagggggagacttccgtggcagtgcttgggtgtcaaggctctgaggctccggcctgacggctccactgggtcgaggggaaagtctccggatgccaagagtcacaaagggccgaacagggtgaggaaacccgacgcagagtccggagaaggcagcatggaatccctccctcaggcctctctggacggtgttggtgggggtgagtctccccaaaagtcgtgacgcggtgatctcgaggacaggacggcctgcgtgcccctggggtgctctctcaccgaa

SEQ ID NO: 161019 - DNA, 1000 bp, Homo Sapiens
tttttttttttttttttttttttttacaaggaagttgacatcatgtttatagtttgaatttggccataagagtttttgcaccatggaaatgggcagttctacaaagaaggggttcccagttaaatcggagctccagttaaatggcttaacatttaccagcacatgactggccatcacctaaactgggaaatctcaaggactgggactgcacctgacttttctctgtgctcagcacagagtcaggcacagaagccaactggctttacagtgggggatgacctggggcctggagagaggatccctgatatgagactactcctgagacagctagtgagaaggcaggtggcagaagggaacggattggagaaaggacccttgtgtggctggtgaaagcttccctgccatatcctcatcccccgaccacacaatagggcacagctcagcaggcaacacaacctttagtataagttacagcctcacactggctcctagcccatgggagcctccagatgggtctatgatattagtccccagatgttcatctcttgggctgggggtactcctcagagctaagtccaccgtggcacccagtccattccagaccactgtgcaaactcagccctcattacttaccagggttttctggccaacctgtgacttggcccccaccccaggtagctcagctccagactctggtatgtgatcttggtaagccaccttcctctctgggcctgtttctccatttgacttgattaggctggactccaacctaggtaccttggcagtacagccagctacttgcatgggagtcaggccaggggtgtcattgaccttgagctcttgcctttcttgaaacttaattcccccaacttatacacacaaacgatgactaggggttatgggaacagttgactctggaccacagagtgaatatcctgagcccctgtcaaatgacggagcatggggtcatccagcatgagtcactgatggtccatatctg

SEQ ID NO: 161020 - DNA, 1000 bp, Homo Sapiens
acaatttactgaatgaattaaatcacataaagttagttactttacatcatcatatattaactgtgcttgacgcacagtaaacattcaatccatgttattttattaccgattttcctcaaaggaaaaatctactaagatacttacttacttacttaaaaaagaccagggagcaaacatatgatcattttaattacagatgattgaaatacagtgcaacagatgagacaaatacaatactgtaccagtttttaaaaacctgaaccataacggcttcgcattctagtacacttacttacttaaaacaaaaattgcttagataacaaaactatacttcaagttgttttagaaacagttctgcgctaggaacatacaaaggaaaatgacccgttgtgcttctttaaaatcgaatgagagtctcctctagggtcctgctgacagagccccccccagcctccgccaggtgaggtgcacagggcccactccaggcaccagctccccccaacttggcttctctggtttgtcgaaggcatcatccagtccacactatgtttaacagtcctagtcagccaggggattacatatttctcgcccatcagaccgaggtgtggacggaggtggcggagtgggagggcgaggagccccgctcagatgaggatgagacggcgcgcgtggccacctcccgctgtaggccctccacacgcttctgcagctccgccctgacggccagcagctccttgagattctggtgaatgggcatctgaggtctcatccgtggattccatcgtacataataatttacccacaattccaaatgactcagactagcaacaggatataacacgtggttttcataattcacaaagaagggattagaaaactcgtctagctggctattgatatacgaccataaagatatcgtctttgtatatacatcctaaagtgggctttttggctaatcagcagactccatttccaaggccttcaagtatgatctggccaa

SEQ ID NO: 161021 - DNA, 1000 bp, Homo Sapiens
ttttttttttttttttttttttgataataagaggcatattttattcagtttcccagtaagtcaattagaaacatgcactgctaaaatgcaagttacaattcaaatggtaccataaataattagagtacacactgagcattttcagaaatcagcttccatatcttgatcactaaatggaaaggttcttcagaacagtcccttacccttagctcatgtcttctggttgtcatcatcttccactgagctgcaccagaagaatcaatgctgctattctgattttccattcttgaatgcaccaaaatgtgcatgcttgttgtaattaggtgccttgttaagaaggtgaagctggtgtctcagcaaatcagaccccttggagaaggcgtcgaatggcctgtgccccgttttcctttttctcgcttttaaaaagcagctgctttgttcaagagtggaaggtttatgccttcagtgtactgaatgctgcacacaacctgctttaaaaggagaccatccctgcaggcaggctcaagaaggaacagacccctttcggcactgactacaccaagggcatgctgctgtggcctgcacacacacacctaggaaaacgtgaatataaacagcatttatgctggccattttatctcaagaccaaaatgaagccaagtctgctaagaacaaatcaaccacccaatattactactcatttcataacagatgcttttgtctttatgtgaactgcaaccatatacattagcactgtaattttgtgcagtcttggcaatttaaaacagtctacagtgaaatttcacgtaagacacaaaacagattaactaacatctctaaaagaaatatcacccttggtgttaattcaaatatatcatgcttcctcaaatttgctggagaaatatttataagtttatatacattaataaactgctgtgaaatttcttcagtctttgtatttactcaaacccttggagtttcttcatcttgtttaaatttt

SEQ ID NO: 161022 - DNA, 1000 bp, Homo Sapiens
tttttttttttttttttttaaacttttgaaatcatgggttttagtttattatttttaatatatttctgaaaatgtataatatcaagactgtctgataatgcttttttaatactttccagttctgccaacattcctgtcatgcatccttaataacaatgctctcccagaaccgggatggggggcggtgaggtggggttggtgggggagtacgtttctgagctagttaaagtcactgaggagggcccatacctcaatgtgtgttgagttacaattagaaattagtcatggaaggacatgtctaccacagatatctttcctcacatttaaattattccatttcttcctacagtcctccttctatctttagttccattttaaataacccttcatcctacatacccatttatcttgcttcctttttctcccttttgtcccactagtataagagattgtgcttcagtaaactatcctgatgtggagagaaaaaaatcaaaatgtgatcaataataatagtttaacaaagttaagattgcatgctctaaaaacataagtgattaactgttggatgcccaaaagcactctttgtttcctttccaagttgatgactcttcgtatatttcctttttccatatgggcaccttggcttttaaagtatcaatggcatagctcacagcttcaagagatgcagctctgtgggctgaggacacagcaatgattatgcttgcttctgacactggaaccaagccaagtctatggaacactgctatgtgtttgactggccatttctgcctaatgtcactacaaatctttctgacttcattttccgccatgggtagatatgcttcatattctaagctaatgacttttttcccttcaaagttatttcttgtagtccctacaaatagggatattgcaccacagagcggagaaatcaccaactgtgagacttcatctactgaaagtttctcggcagtaaagtttataacatctttagatttct

SEQ ID NO: 161023 - DNA, 1000 bp, Homo Sapiens
tttttttttttttttttttttttgataataaaacatttaagtttcaaccaatgcacctttgctgaagcacatttagctgaaataacttcgattctggtttatttccatcacatatagtacatttttccaacaagagcatgtacattcaatatagaacatttccagcaatagttacagtctttctagtttcctttcacagtatattttagtgcaaagcactgggaaggtaaatgtttttctagctatagaatcattttattaagaccttgtggatctttaacattttaaaattttatacaaaaagtatatagatggacagggtccctcctaagtacaggtgtgaacctatataaaaacatggtatattttctgctgtaccttttataattataatttgacacaaataactaaaaaataaaatattccctaaaagtacaaaatattgatacacaaaaacctgcccaaaatttcataaagatagatgtacttctgtttttcctaaaatcttgattacaaaaatggacaagaattcatcattttctaaattttacagtaggaatcaaatattatctaaagtggtcctttaagatttttcttgggagaaaaaaaaatcagggcttacacccgcatcttccttttgtagcaatatttaaggaaataaactagtatcataagaagtggttgtgcatggattgtctgcatccataaaatatcagtaagctatttattaccttcatattaacattagtaaatgtgtggtctttaaaaaaataggaactgaaaaataaggttgcatctatcattaaagtgctttgtataaaatttaaagaaaaataggggaatgtttaattttcataaaaacctacatttacaagtgaaaaatgtaatgatccatgcatgaaaatgaactgcagctttcctgtagtatatattttaggatgaaactttcaaacactgaagtgctggagaacaagctagaaataaatggatgtaaaaataa

SEQ ID NO: 161024 - DNA, 1000 bp, Homo Sapiens
tagagatttggaaatgcttttttattggacaagaaaattgatcaaatcgaaatctggacaaactagaaagtctggatgctagcaatacaatctatagacacattctagcatcacttctgtgtcagaagtatccggattgtggtgcctacaaatgcatgctcctacacaccaagacatccattaagaaaataaagccatgctttccagagcgtttagcacttgtttaacgtacttgtgcttctaaatatcacaaggcaggatgggatttctaaagacaaggggatataggaccgaggcaaagacaatcagcatgtacactgaatcacactccataatcatattgctagaacacttagggagtacctctgaaatcacagccctgctgccatgatgtgcaattacaggatagaggtgccaggtgaaggtcccactgtggccaaggaaagcctttgtgagacgactacttcagggtgttccccatcagaggagcacacccctgatcttgtattcctcgtcaatccaaggtccatgtgaaatggtcagatggggaattttttcttccacagacatcaggatcttctgagtttcttcatcaaagccagatttgtgcagccccagcatctgcagggcacagtccgggtggctcaatgcctcacacagcaccaccactgcatcagcatccaaggcaatccagtcgaggttcaggctcctcagtgttttgcaggcgatgagtgctgcggcgatgtcgtcgcagcaggcacgggtgatcggacacgtttgcagcccgagacactctaatttacagtgaggatgctgcaaagctgcacataactgtctgacaccagtgtctcctatttcattatgcccaagtttcagggtcttcagtttcccattgcaaataagaacagcagcaatgtccttacaggaatcggaagtaaggaaacagcccatcaaccacagctcccgtatgctgcagcctgggtgcttcagcgctgcacac

SEQ ID NO: 161025 - DNA, 1000 bp, Homo Sapiens
aatttacagatggggtcttgttatgtttcccaagaggctcaagtgcagtggctattcacaggcatgatcatagcacactatagccttgaactcctggcctcaagtgatcttcccacatagctgagacaacaggtacatgccactgtgcccagcaggacatttttcttaatagaaaactactatcgtgaagaattatgtttatctcttaactatgtctactcaactagtttcaacatagtatgaaattaacagtatcacgaaaagcaatgttccatgttaatttccatgtcgaagcaatgttcttgacccaacattggataaatctcattcttgatgctagctatttcttgggtatggttgctttaatcaacctctgcaaaactccgatcttagtaattccaagtgaaagaaccttgctagttgttcttactctgtacagaaatatatcagtctggattgattggacttggagttctatcttgatatgacaatttttctggtaagaccttgctcagaaatatgacccatgttgtcaaattttcataaatatcttatttttagaaatcccatcactactttacattaggctttctctttcagtgttcacaggcatcagagctctggatgaaaaaggcagatcccaactcccacagcacgtctttaccgtttcccaacgatgctcaggcccaggccccggccagctttcttctgcagatccacagggaaaatctccaagttctcctcatcccggtagtgtgcctcatctctatacaccaccagccgcaccttctggggggtctgcctcagggctgtgatggcttcttcgtggctggagttcctcaggtcaaccccattaaccaagggtgtgtcttttcctcccacaatgctgagaccaagccctgaacgtcccttggatatttctataatcatttcctgtccagggacaatgggacacgttgcggggtccactgacagaggagcctggaaaccaccatagcct

SEQ ID NO: 161026 - DNA, 1000 bp, Homo Sapiens
tttttttttttttttttttttttacagaacaaaagcatggtcactttattttacccaaatgcaaatcgtttttcacaaccaagacttttttctttcctacaatgttacaaatgatgtatccaagtccgactgtaatttggagttaaacagggatcatagaaccaaggaattatctctgaagctgctctttgggccactgtgccaccccaacagctctatcctgttgttcttttttttaattaaaaaatcattaaaaaaaaaatggagatggggtcttgctatactgcccaggctgatcttgaactcttgggctcagacgtaccgatatactgatcctcccgcctcagccttccaaagtgttgggattacaagtgtgagccattgcactcagccatctctacacactgtttttcaaggaaaggcagctacacctattccgtctccaaaccaaccctcacctggtgtccagttttcttggaagtctcaatttttctcatgacagcacattacctaatacctaccacattaggatgttaactcataaaaacatactacaaaagctttaaaaaacatttatttgtattaagtaagtgcaacagtgcaaagaaacttatgcatttgggcccttgcttccctactgttcacattagtttagtttagaagattaagtataataacagaaggagaacagaagaaatgaatataaatatactcagggtagccaaatcctctaattcactaaaggatgaaccaaagttgttggccagattcacatttatgtgggagcctaaacaaattatgttccctttaactgttctaggcctgtggaaaagggaagtggacaacatttatattacaagacagtaattttattgaaacatctttttttgtctaaaactatgcatggagatattaatctcttgtttataaattaggttaagtctaacatcactatttgaaaccagtgttatttacaaaaatgaacctcttctttgcttta

SEQ ID NO: 161027 - DNA, 1000 bp, Homo Sapiens
tttttttttttttttttttttttttttttttttttttttttttttttttttgctttggcaattacatttatgttcttgggagcccagacactgatataaatttccagcaaaaaccaaagcagacccactgcctggataaattcagaccatacgtcttccctaattgttccgggaacttttgctgcttgaagaatgcgtgaattgctatattgttcaccagaaagacagaagttaatccccagatggaaatttcagatttttcttttggtttgctttttggtttttcatttttgtagacatggggggtgttgctatgttgcccaggttggtcttgaactcctgacttcaagcaatcccccagcctcagccttctaaagccctgggtttacaggcatgagtggcctcacccagcccccagattttctactttaaacagccacactaagaactggaaatctgtgcgtggtgctctcagagcaggggtggaaagcctgtttgtgtgtgacagtttaacagtctataagatgaagtcccgtcaaggcacacatgggcacacccatccctgcctcggcggattccttctgatccttcccacagtctgtttttctccatccttccatcctcacctctttctcttgataactttctcttcccaaatcacaatatagcggactttttcattttccatggcccctgaacttagttttgtcatctctttttggttaaaaagagagagagagaaagagagagagagactccccacttgtcctgctccatctccaaaatcagctcaaatctcccaggaactcttcaggagctcaggctacgtttctagcttaaaaggagctaatgaccattatgaaaatggcacaagaaatcctcactgcttcacagtgcccttccttccgtggtactgtgtggccaagaagtacacttctgatgactctttcctgctggcttcaggtttgatgatccttacattctggaattcctctgtcag

SEQ ID NO: 161028 - DNA, 1000 bp, Homo Sapiens
ttttttttttttttttatttagtaaacccagtttatttacataatacatattttgtcatgcagcttactgaattgcagttagtgtaataacaaaaaaagacaagcactgtcttgctatttgaaaatggcttaatatagaaagataattgtttcttaaatgagttaaccacaaccatataaattgctagacaatttaaaacagccatagataactttaaaatgtaaaatctgtaggcaaaaagcttttatagttcacacattggtaaaattaaaaccagtcttttttagtaataaaactggatagtataatcttactttaatctataaaaacaaaaataacttaaatatacatcattacaaggctcagatttgtagacaactttaaaatattttttaatgttaacaatgtcttcaaaattttaccagtagtgctgtgcacacagtaggtggtcattaaatgctgactgacatacagaagtgtttctagttaacagcaatccatattcattcattcattccctattttataataaatatatcatagcagtgaaaaaatgagaggataactttcttacaatatttaacattttcatacagagttgaaatgtttacatggaataattttccctacagaaagacctgtacaccctttaaattcaaagaaacacggatttaaaaacacagtatactcttttcatgttattaattcaaatggcaagtatgtattcatatactaatacagggactgcaaaaattgaaatgattcaatgtttttttattgagaaagttttataataaaaatggctccacacctaaaataatgattttcccctcatttttaacttaagtgtaactactcagtgtcttttgtttggccaaaatgacaaaatatctattaaaaggcaataaaatcatgtaagccaataagggatgttctaggagaaatatatcctactactgttgcaccaaaatcttctatcacttaacatatggatcaaaa

SEQ ID NO: 161029 - DNA, 588 bp, Homo Sapiens
ctaggtgccctctcggaagctgtggatctgcgtggagtacctctgcaggtggccctggggctgggcctccgtggcccccaacgcacccccagccacctgctgctgctgctggtagtgctggtagagcttggggcccggcccctccaggcctgggaggcggctgctggacatggtcaggatggtggccgtcagcgatttgatgtagttcttggccagcgtgagcgtctcgatcttggagagcttcttgtccgcgcgcacgtgggggatgacttcacgcagggcctggaaggcgttatttagcttgtgcatccgctgccgctccctctcgttgctctccagccgccgctggatgctgctgtcacgacggccaccgggcccggagggtcctggccgcctgcgcctgccctcgcccggagcccttgctgcggcccgggccggccggctccgcagacccttggccggctctggccccgggttcggcagggacccgtcgggcgtcccctccccgggggtggcctctgtgtcctgcaccggggcccggcgccgtgggggccggttcttggtcttcatggccctggactggctgtc

SEQ ID NO: 161030 - DNA, 1000 bp, Homo Sapiens
tttttttttttttttttttttttttttatatctctagttgtatttttataactccccagtttattttgaaatattcatgattttgacattatctcaaaatacacagaaattaccttacatctgcctatacatttattaaatgctgatgaagaatacttattcaatatttaagcatgccaaataataacacttttcccaacttttaaaattattttaaaaaataagccaatttatattggacatttgggttacatgtgcatataaaaacagtcatattcctcaactgaccatagactagcatacaagtgtccttctttctggatgtaattaagtttcagaggcaaagtggttcagatgggagccaatgggctgacctcctcatgaagtaaactcgacaaaaatcatgaagtattgaaggtgccaacgactgattccataaatgtttctctcttccctatcttttcaatatacaagtgtgcactatgggtgtgtagaaattaaaacacttctaatctagactgtgagctcctacggaggggactactgtcaatccacaaaaggccctagggaagagagaggtagcactggggagcagagggcacctgccctccaggccatccacacaaacctactgaagaggtagactcgattatctaagtctcaacaggcttagatgttgacctgggccttcaagtgaggttttccttcattgttttatgttgcttgttctactatttttgtaactggggcaaagtgagatgttcaactagtctaagaatgcttaaaataccccataagctgtctgaatcaaagatttttattgattctcctgccaaacacaactgatttccatctacaattactttttaaggtaagaaacagtaagtcaactgaacaaagagctgggctttgggccctggaacgtgattacacaccgactgagaaatgcaggacctcagggtggggtctagtcaggctggccgcagcagggcacgaacct

SEQ ID NO: 161031 - DNA, 1000 bp, Homo Sapiens
ttttttttttttttttttttttttttttttttttttttttttttttttttcaagtttaatttttaatttattagaacccagtaaatgatgattttaaaagcagagtttccatcaaattaacacttaattcagggcaaaaatacatttaaaaaacctaaatcttaaggcagaagtaaaacattataaaaacagtatgtctaatacagactgtaaaatgtcagatttttaagagattcacatagtattttatagcactaaaatattaatacagtcagaaatattatcaattggtccaagatttctgtttataaaatgtctagactgctaattgaagaaatgttgctgtataagtaatagctacaatacaaccaaccaagtgattgtttttatgacaaaagaactaaggcaggtaattgcatggtttccatttgtaaagcttttgcagtattaaaatataaagcattactaggggtattttttgattcatctccctaccctaatgcccccgaaatgtacatcacttccctttaactctattttaaaattctgtgaaaccaccatacctattcattgtaggcctgaccctataaaggcatgaattgtttaatttgatatggtagaaaaacaattttagtaaactactacatcttttcctagtcattgagcaatttcaaacagaagtcttaagaatttttgcacctcagcaagtgaacaacctgtttctttaccactataagtttgaattttgcctagaatgtgttagtacacaggggaaaacacatttcatgtttatgtgcaattaacagtagcccttctgaaaaacagggttaacaatcttaaatttccccttgtgatcaaaaccttttgtttttagggggcaggataagatttaaaagtgctttaaatcagaaaacaagaattagctagcttacacattccactgaatagtgtcaaaaaagataaatgcatttaaaataatttgtaagtctagcaaatataa

SEQ ID NO: 161032 - DNA, 1000 bp, Homo Sapiens
ttttttttttttttttttttttatatttctggaatggctaatttttatttaattctgtaagcctaaggtaaaaagcataggcagtaacttttactagtcaataaaaagcagttctaccaatccactggtaattaatacactaaacagagttggaaagcattttactgaaagcaaaatatttagagaaaatagacatttatacaaaattataaaatgcttgtaataagaataagtgcatttcaaggaaagcacaaacttaatttatagagccagttaaagctttaaaaaatttaagtggaaattgaaatatgcaaaaatgtataaacattctacaaaagatggtcattcttttcctgagtatactaaagctatgaaacgtaaggtgacaaaaggaaggtagaagcttgggaactctttctcaagggcattttctttctacacactgcttccctccttcttcatattcttgcttggaaatccacatctgttgaaaggtacccaaagaggctagaatggagccgccaatccatgagctaaacctccgttccactgttgtattatttgcaatcaatttcaaccgcatacttggaggagttttctgagacagctctctattcaacctgtcagtaaaactctgtattagtgtgtttcctcctgccactattacactgccatagagacctggtctgatatcaatatcacacatcccaacacttgtggtgacaacatgactgactcctaacattgtgtttcctgataacccctttacattggaagggtcaaataatccttctggaatctttagccgctctgcaccaaaatcacaattgtagccattggggaattcataatgaacagttggcatctgtgcagccacttgttcatcataagttgaatctgacacttgaagtaccgaagcttgaaaatcctggataacacaattacacatataattgtgccaagacctcgtaacctgaggcaacttctcttttcttttcca

SEQ ID NO: 161033 - DNA, 1000 bp, Homo Sapiens
tatggttcagcatcaaacacatttatttcacttatattgagtatacaagaacagagagcacacgcatacagcacggagcactgaggtgggggagcatggggacgagaaaggagagaagggtgtgagtaaaaaggaacaggacagcatcgcaattggttgttaaggtgcttttgaaaaaaaaaattatttcgagtgatgttgctcatgcagtttcaggccagtcttggaatgtgcttgcaggattcaaaaactgaaacaggtcctggtacttcctgtaccctcagatggaaaagatccagagaaaacaaaataagagaaaatgaagacccatgagatagcaaagtagaaaaagaccctggagagcatctggttctttctgcttattttgcaagtcgggaaactgaggcccaagagggggaatggggatagcctgatgtcacatggtgagttaggagctgagccaggatggtcacccagaactcctaaccgccctcagggactttttccactatgctacatggcctcctgggtggagaggtggcacagagaggatgagaaacaaaaaagagaaaaggaaaagtaggttgaagacagacaagacaaacgtctctattctctacaaagagaaggatggggaggaaacagtgccctagattctagctttgcaggtcccctcctccctcgtggcactgcctgcatctccgtagaagggaggtcacagcatccgcgggatggtgatttccccaaaccctggtggcccataaactccacaagctaagcctggtcacttcacccctgccccaaagccaggtgcaaaatccacaacaaggatcctccctctgaggtgtgttcagtgtgctcaggactcctggttcctgcaaagatgagttcctagaccgaagtggcccagagaggatggagccaccactccagctcttgacccagaaagagggggaactctcaagaagggcaggaagaaggttctgtggcttttccacca

SEQ ID NO: 161034 - DNA, 1000 bp, Homo Sapiens; identical to SEQ ID NO: 159997

SEQ ID NO: 161035 - DNA, 1000 bp, Homo Sapiens
tttttttttttttttttttttttttttttcaattcccatttatttttggctcttggggcgatgtcatcttttcaatatgaaaaaaagcagcaagttcaacataaaatagaaatctcaaatgtaggatagaacaaaaccaagtgtgtgaggggggaagcaacagcaaaaggaagaaatgagatgttgcaaaaaagatggaggagggttcccctctcctctggggactgactcaaacactgatgtggcagtatacaccactccagagtcaggggtgttcattcttttttgggagtaagaaaaggtggggattaagaagacgtttctggaggcttagggaccaaggctggtctctttcccccctcccaacccccttgatccctttctctgatcaggggaaaggagctgagtgagggaggtagagttggaaagggaaggattccacttgacagagtgggacagactcctccagagtagagcttggagggagattgaaagtggagataatactgctgacacctcccttgaagctgagatgggaaatggacatacttagaaatttagtgactttaatagcctggatttccctctccaaaacttttagaatggaaaatcccatccccttccttatatagtgacttctacccactaccttctaccattttctactttgggcttaggatgatggccattatctacatgtgttttcagcacctggttggttctaaatgggatctggagacccagcttcttggagatttttaagaggaagtattaactggacaaatggaatgggcaccagaaagaaatacagggtcacccagaatggcagaaacctaggtttcccagagtggaaagagagaggagacattcaacaaacaagtatttattgagcgcctactatgtgccaggcactgttctagaccccccccagaagaaaaaacaaaaaacaagatagaggcagcaaacacaaattctgagggagaggaaaggggcagttgag

SEQ ID NO: 161036 - DNA, 1000 bp, Homo Sapiens
ctggtttccttctcggtttattctgttagaatgaaatggttcccataaataaggggcatgagcccttcctcacgaccatggtccatgacaaggggcagggcagagggggcctggatgggagtccttgtgggggaccaggcaggggacttggatcaacaagcaccagacgagtggcgggggcaggcgagaggctcagtgggacctccaccctcgttgccccagctggtggctgaccaggtggctgtggagggtcaggagctgccccggatcctctccatgtagttgcgaagctcctcagggtccttcagccccatgtcctcacacacccagcggatgtcctcctcgcctgccacaaggatggactgcacagcaggggcccctacaggctcctcaggtgactgggctggaggggctggcgcaaatgtcacaaactctactcgcttccgccgccccccagcctcctttcgggccagggtgcttgaggagctggtggtgcccccaggagggccaggggccagggtaggggcctcccctcctcccccactctcacaggggcagctcccctcccccttgggcgggccaggggactgccggtccagctggcggctcagttcctcctggtcagtgcccagccagacccagttgtggggctggggggaggtggggtcagtggcactgtcgggaggttctttgcgctgatagcgcaggacgaagaccacaccattgaccaagaagatgaagatggccacgcagaagactcccagcagggcgtacatgcccagctctagctcagtgacatgctgaggggcagggaccatctcctcctcctcttcctcctcctcctccctggcttcggtctcctccttcctggcctcctcctctgcccgctcaaacttgcccctcacacctgtgttgcccccgacactgcctgccacctgccgtttaccacccatggtggcttctgtggctggtgggctccaagcagggctggatgggagag

SEQ ID NO: 161037 - DNA, 1000 bp, Homo Sapiens
ttttttttttttttttttttttttttaaggaataaggtgaatttttattaagtgaaaaaaatcaataacaatataggaatgatcacatctatacaaatacattgctacatttctacatataaaatgtataggaaaaagtctgaaagaatgcacaccaaattattctgtttttaggaaaagcagtaggattggtcagggcatggaatgtcggctaagtgaagtgagatttaaaatttttattctacatgattttctagtgttgggaatttttgacagtgagcatacatgcacttattacttgcataattctgaaaactattttaaaaacaacagaaaatatatgaaagtctattggtgtatacagcattaatagtagtgaaagtttaacagaaaagatctgaaaatctcccaaagttatatagaaacagatctagctgacacactgtgtacctagaaatgattttggatctcttcacagagacccctatcccaccaacctccaatcctcccaccatacattgatccctttctatctgcttggatcattagctgtaaatttaacttcgaaaaacaaagtacgtttaatcattgtaccctgagatctaacattcagagagtttcttcaggtgcaaatacatcccattcttgggcttgaggataaaatggttggggaaagtaagaggcctggtggggtctggagtcactctgaagtggagcagaatcaaggcaatggttacctttaactcaatcatggcaaactcctgcccaatgcagttccttgatccagctgagaatggtaagtaggcataggggtgtctctgatcagaattctcctgagagaacctcaaggggtcaaagacctttgggtttttccagacagcagggttgtggtgaagaccccaaatactaagaaccacggtgatccctgcaggcaatgtgcatccatctgggaaggtaagtggcttgctgagatctctggaaatggacgggactgcaggaa

SEQ ID NO: 161038 - DNA, 1000 bp, Homo Sapiens
taggaataacaaatgtttattcagaaatggataagtaatacataatcacccttcatctcttaatgccccttcctctccttctgcacaggagacacagatgggtaacatagaggcatgggaagtggaggaggacacaggactagcccaccaccttctcctcccggtctcccaagatgactgcttatagagtggaggaggcaaacaggtcccctcaatgtaccagatggtcacctatagcaccagctccagatggccacgtggctgcagctggactcaatgaaactctgtgacaaccagaagatacctgctttgggatgagagggaggataaagccatgcagggaggatatttaccatccctaccctaagcacagtgcaagcagtgagcccccggctcccagtacctgaaaaaccaggtcctactgccttctggatgctctcttgggccaggaagggaaaagtgtgggaggaatgtcttccagctgctaacgagaagtctgcacccacttgaaagggttaggagaataaaaagcagcattctttaaagaactgcaagtggagcaccaccaggccccttccttggactttcccgtcctgggcagcctcagagcctgcacactgaagctgggttcaaatcctgggtccttcctgcctgacagactgacccctggaaacatgagtctctggtttttttcactgggctagcctcaagcaaatcttgggagctcttgagtatcttcggcatgtgccttttccagcacttgctactgattttgcagagctcccagaaccgtgctccccaactggctccagctctgccagcctggattctcttcactcccaaccagcaggggaccactcagtgacaacactggcctggtcattcagggactgcctgggctctgaagtttcgtcccaactgtctgcgcctatgctggggaaacaccttgcctggtagagctgccctgctcccttgactcctcctcctctgccaaggcagg

SEQ ID NO: 161039 - DNA, 1000 bp, Homo Sapiens
ttttttttttttttttttttcactgatgacaatttattataatctgttagtagcacacagacaaatattagttaaaccagaaccatgtctacacagaagtgggcaatgacatgtgccattctatggcacacggtgtgcacttaatcatcatgttttagcattttgatcttctgcttatggcgctcaatttctttctgcagacgctcaatctccttcttatgatgaacgatttcttcttcatggtgttttttcaaagctgccagttgttctctactctgtgctctacaaggacacggtggctcagggtttaatttcaatccttcaccccaaagagatctcaaagcataacctgtaatgtctaagcaaggaataggagttccaattccatgggagtctagctggtcatcctcttctactcctcaactagtgaaagaataccccatcttaaattgaggtgtagccatcttaagaagaccaaagagcttattgctttcagattcctctttaaaatagaaaactccagagagatgtgacacaagtccctaataccttatgaggggaacaacccagggaacttgactcccctttagggaaaaaaaaaggaacaaaatgaggaagacagacaaaggggtgtagctaaaaggcaaatatccatttcctattccaatctgtctagagctttctttgcctatagaaatgaatggcccactgtaaggccaataaagggtctcttgcatgcgcagtacttggcagttcaatttaggttccaagaagggactggattacaatgttggtttggtcacatttaggcctcagttttccttaactacaaaatgtaggggctcaattagatagtctctaacggctgtaccttggctctctatacggtatggcaggtgtcatggtgataattctcaacagaaggcagaagtgaaaggccaaaggacaagcaaaagcaagattaattcctcactgctctccagagtggacagaagtcagt

SEQ ID NO: 161040 - DNA, 1000 bp, Homo Sapiens
tttttttttttttttttgttttctactgaaacttattatttgccattaagaattgcaaactatactactaagaatgaacaacattctcttcattaagcctttttcaaaacacacgagacaaagctcccctttggtcaaggtgtcccacacattaccactgcagctcccagcacagcggcgcaccatgaactcggacgtggagcccaaggaatggagatcgcaccagccttccctgcttccccaccccaactacacccaagggagaaaggatacgaggaaatacactatgtcttcaatgcttggggggctgggggtgtcctctgctaccaggtgggccggtcagtgccgactgtccggcgcgcgtcctcggggatctctggctccccgacctacacaagcagcagcagcagcagcgagtcctgccaacgccgcagtagctgctcatgagaaaagtgcccacgctccccaagccctcctgtttacatttcctagtggggcaaagatactttcccaggacaggcagcagagcagcggggcagagtgcactctgggacccgggacagcaggttacacagggtcaggcggtggtgggtgctggaatcggggctgaggttctggaaatgccaccaggtgatgccaccctgtggtgtctgcccaccacacaccacaagactcaagtggttttccccttttggccctaaaccacctaacacctcagcggcatgggagggcaattctcagcaaggcaaggacatggggaaggctcctgggagaggcacgccgtccaccctcaagcctggctgtcacaggtggaggccccgccccccccccgtcaccacacctggggaagctgccacagaatgccacagcactggaaagggacactctgagggcaggctccagcagcagctccaggacagccagccgcccttctgcccaggccgcccacgctgtgtcctgtgcacgccatcttcaggtttcccacacacccacttcctga

SEQ ID NO: 161041 - DNA, 1000 bp, Homo Sapiens
ttttttttttttttttttttttttttttttttttttacaaacattcacatcaacttgatttttaatagcccaaaagtgcaaacattatagatgtccatatgtagatgaacagataaacaaattgtggcatattcatacaatggaataactactcaacaatataaaggaataaacaagcaataacatgaatgaatctcaaaataattttgctgagtgaaagaaacacagaaaaatagtacatattgtattatttcatttatataaaattctagaaaatgtaaactaatctatagtgacagaaagcagatcagtggttgcctgggatcaggagtgggagggacaggtgggatggcagaatggaattacaaaaggcaagaggaaacttttgagagtattagatatgctcaccatcatgattgtagtgatggtttcccaggtacagacatatgtcaaaacttatcaaatagtatcctttaaatatgtacaccttattgtacattagttgtaccttaataagagctgttaccgtgtaaatgtgtgtgtgtgtgtgtgtgtgtgtgtgtgtgtgtatcggtatgtctcaattttatttggccatgactcttctccctgctcacctattgccccagtttgcagagccatgacatatgcaatgagacagacctggggtgatcctggctccgctgtcatcctggccgtgtgcccttcagtaagcgatttacactttcagagccttcatttttttccttcaaaatggagtagtagttgggattaaattagtgaatgtcaaatgcctttcacatagtaggttcttgaaaactttagaccaccaatcaccccagaaactgaagcagccatatttatgattgccccaaagacattaactttatttttagctaaagacaccagcatgcaatcaccttgggtccaaaggtccaggggaaagatgttgaaatgctgagcactgccctgcaggcccatctgctctgcattagcccgc

SEQ ID NO: 161042 - DNA, 1000 bp, Homo Sapiens
tttttttttttttttaacaattttatctatgtttatttaattacaacaaagaacgatgtatgccaaatggaaaaaaaatattttaaaatgataaaaatatttagaaacagaaatgactaaatttagctgaagaatcacccaggtgccattaaaacacatttggaacttataattggttattagtgtaagttaaatttagcaaccaagtccaagttcactaggagttgtcaaaatactttcaaaatgttacatcaaaaattgacaacatccataagtattacataaaaagcaaacaaaaaatcatttaaaaaatgtatcctgagataaaataaaaatcacactatgctagatttatttcccctttcccctcacatacaactgtgaggcttcagtattttgcatgttccaggataaagtaataataatacatgttgatgcaaatttcagccattaaaattaaactacttaataacttaaatattcctacaatgaaacatccagactctagtttcactaatcaaaattttatgaagacataaattgcatttggttttaactcctcaaatcacgactgaaaactttcaacaaagaattctaggcttttttttttctcataccaactgacccagaatatattttaagaaatgtttattttctgtgcatatttgttttaaaattataaatccctgagcactttttcttcttcctcctcatcactgtcggtgacattgacttgctggatgctagaaggagttgatgtcggggctgtgaagacattctccaaggttccaatgtccagctgaggcacagggtttaagttttcttccccactgtggctatgactgttatagtaagaagttccattcatgttctcacaactccgagaattttcactgtgtgtgcattcacttgagtagtctctaaaagaatagtctctatttaaagttgaaaagataccctcatgttttgggtacctgtcttcataataactaaggcattc

SEQ ID NO: 161043 - DNA, 1000 bp, Homo Sapiens
atccttgaaccacaatcatactctttattattatacaaacttttaaatattggtatctgataccgtaagtccttccatcatttcctcttctgcatctggttccacttccttccatgtatcttttataatcaccttatcaaattataataaggaaaaagcactagctgggattatattgggatttattaaatttataaattaattccaggaacgcttgtttccttaaatacacagctgcttctggctcacgctcatcctgagggagtagatgttggtaaaccagcctcatgtgcagagggtctcctgctggatccccaactggagccatccctgggcctagacttctgtctccctcacttctaaatgagtgctcagtgatgtgaagtacacaggagtccctcagggcaaaagtggctatgcctggtgctaccctccccatgaccccaaaaacgagagccatgagacaatgccaccttagccatttcccttgagagaaatgaaggaggaacagacataaggcagagccacctgaggtttttagaatctatatctcacatactgaactagtgtttaatggctctgagaataaaaccaaaccaaatcttccttccacttgagtttccaacataaggacaccttactctctgcacttctccttgaccaggaggcagcactcggggaagcagcaccaaggcaggcatcgtcattctgcatatgcaggccttgactggcagcagagctcactgtcctgatgggtacgtcagtagcacacagaaggtaaggctcaccgagcacaggccatgaatctcctctgctcgactggatgttctcatactcttggctgggaacatgacctctgcctcgagaccaaccctcgcaagggctaaggggcagggtgtggtgtgggcccactgtggccatggggaggccttggagggtgaagccaggcaggtggcagaggaacaggtggactgagtggtcctgaggagcaggcagacgg

SEQ ID NO: 161044 - DNA, 1000 bp, Homo Sapiens
tgcaggaagattcctttatgatggcgaattggatggtacacagttctagagtagggtcccagtcactggaccccaggaggcaggaggagcagggctgagagggacgacacactccagggctcatgtcacaccgataggcgcaccaggaatgaccgccatatacttccctaaagctcaacccacccaccagttcagttaagaattatactttaattcgtgtttggccactgaagatcaaatccaccatgatgataggatttcagcacaacgggccctttccagtcatgacagacagagatgtccaggctcttgaggagaaacaaaagttcctttgacttctcttgcaaggaccaaagagataaattttttctttacgatctgttgaaatatttatatagacttttaaaaacaactaacagttcatcctgtgctcagtttccctggaaggtttctcatgatcgcccctccgagagctagaggggttgtgtgtctgggaacaaaggattaagacactttaaaataagcaatgaaaatcctagtgcgacactcagaagcagatggtgggcttgagggggccgaggggtgggaggcagatgcttcgattgaggagctgggtgccgccttttgggaaagccgagtggagacagaagcatcgggacaggaagccctgctggagaaggctcagttccttccttgctgttccctgggggaccagggacagcacggcccctgcatttctacttctcagggccgaagacccgacctctgaccctccacccactccggtgacctgcacgctaagttgggtggtctctgactaaaacaggcttaagccaagaattgggactcgactcccaggagacctagggagaattcccttcaggctgtttcaggcaggaaggaccagggaggctcactccccaggcagctgacaggcatggagggaagagccaaggacaggagaggcttccaaggctccaagagcagcagaggaaggggc

SEQ ID NO: 161045 - DNA, 868 bp, Homo Sapiens
ttttttttttttttttttttttttttttttttttttttttttttttttttttttttttggacccaggtaaatagacagatttattgtacgatcaagctggcattttatgtcagtggaagaaagctctcttgaagaaggcaaatgaaactcctaaaaagtagctgtctccagggagtcagaagagtatgggggcttttgttatttacttgtacgttccttccctgtttggattattttgacagcaagcctgtgagtcccagcagccggaggcagcagcagggttggacgaaatagtttgtgctgtttctctcaggcagggccgagaggcaggtatgggcatcatggtgggccctggagcctgctctgcctgcaggtctgttcttgggaggtcttggattctgctcagtaacaaacacctgagtgccccgacctgattggtactccttgatagctcttccttttatgaacttcacgcagtaataggtgccagcatcagcaagagagatttcacggatgcgggtggaaaagtctgtgttgccaggcttggtggtgtctccaatctcttttactctgggaaagttaccttgtttgaaattgtagattaatttccggtttggccctgttcccttgaaccacaagacaggtccatttggtaaggtatcgggtacgctgcaactcaagatgattgactccccagttgatacagtctgtgacatctccgtttgttgcacatggaacacatgtgtgactcctgccagttcaagcagcagatacagcagtaaggaaggcagaggtgggtggagtggggaggcagggatgggcattgtggtgaaacctggagcttgctctgcctgaatgcctgtcctgg

SEQ ID NO: 161046 - DNA, 918 bp, Homo Sapiens
gacttcacagtttattcagagcaggtgcaggtgacctggtgggcagggtgcccaggaggggcaggggtgggcgggcgctccgaaccttgtggtctgaggcaggaactccattaaatcagctcctccttcaggagctcggcacaccgcccaggccgggccgccaggtagagaccagtgtctgctgtcagctcccgaaacttccagaaccccagccggtccttgtcctcaaggctccgagtaaagtacttgaggacgcgaaagttcctgccccgccacatcagggacacccgcaggatggcgtagccctcgtagtcggtgtccagcacgtggatctctctgtggccaggaaaagcgaattttcccgtactgtctatttctgagcccacgatcttctctatctcacagcttcctgagctgttatatgcaaccttcacggtcaggttactcccgctcaaggtgaggaacaagccctccacccgcttcggggccgtcagcaccaggctttgatcggaggccacaccgacttccctccagaatcctccaatcttctgccggtccagctcctccatggctgctgccacctgcgcccggagcaccacgaggacacccaggatggtgcacggcagcctggcctccgtggcggggtccgggctccgggttcccctgctgcacagcctgggccgattctatacggacagtgcaggcttgtgcgcccacccgggaatgtcatcaggacagcttggctgctggcagctcagagacgtgggtttctgcacaagcgccatcggccctggtgacacccacgcccaccgcaggggttagcctggcctagacagcagcctgcccagccaccctcctggcatatggacagcggtggacgctgctggggccgtctcggagcctgagaggaagaggagc

SEQ ID NO: 161047 - DNA, 1000 bp, Homo Sapiens
tttagaaataccttcctctgttttttttttaatggtctttacatcaaggtgctgcagccagtggggcatgaggcagagttttcacctgggtcagaaggttttggaactcttccactgcctgtgaatgtgccttggggttgagcaccaggtgttggaagagattgaccggctcagcattcctaaatgtcttagggattgggatggtcaggggcagaaaattgttaccaatgaggaaatgatggagggacctttgctggaggccacggcccaagaaccagagaatgtcctggagccgctgagagagcatgttgtgggcccagtccgtgaggggcagccgtagcaagaggtgcatgagagctgttttaaaatggtaagaagtgaggatggggcgggatgctccatggggtaagctctgatgctgccggagacttaaaatgatctggaggcacttgaggtgacaggtgttctcgggggcaaagcgccccaccagcttcaggaacaggtgctcacaggccacaaaggactcaggccagtccacactggtgagctgctcctggtcaggagcctgactcaccaggtagaccaaggtgtcttctcgttgcacccccaggaccaagtggattgagagaaagcggcctgagcgatagtccagccggagcttgcaggaggtggtagacggtgggagactgagtttaaagtcatacttgtgggccacaagggcccaggcattgcccatcatgttccggaaccactgcacagtcttgcacacgtctaggtggaagccggtgcagagagctgccttgatggagctactacacttccccaagactgccgaggggtccctgtggtggtgcaccaggcacagcacgtcccctaggagtttctcacgcttgcacacacattctgactccaccagcacacagccacagcggcggcccagggctgggtccctcatctccaggacaaacatggtgccctgtggggggacaatgggcaccag

SEQ ID NO: 161048 - DNA, 1000 bp, Homo Sapiens
ggagtgtgtaagttgttttaataatagttcagttctttatgtacattgtaaaaatgtcaagcgtgttgattcttcaaaaagttgcatttcacttagcagagaaaataaaaatgtcccatttctcccgagaaaaaggataacattttctaattgtgcaaacactttatgaaagtatcacttgactctatattttgacagctgctttgcatttattattggagaggctcttcatacggcatgttccttttttttccttttctagtcaagaggtgttaatattattttggaatttttcaaatttaagagagtggtaaagggttgctcttcaggggttcttaataaacaaccccctaacttcttacccctttaagaggttgtttagggggaaaaaaaagaaagaaaaatggttttagactatgagctccttgttttgagaatcagtaccatttagcctcatagcatgcaaatttcacattttgcctggcatgtagcaggtgctcaggaagtgtttgctgagttgaactggtttgagaaaaggcaagggattactatccttattattcagatagggaaagtgaggcccaaagaactcgaagatgcatttgtattgtgcttggtactttagtgaacgtctcacccaagttagctcatttgaaagttggtcctcgcaaccattacatgtaaagtaggaaaagagaagagtaatgatgtgtttgacatatagtgagttagtcactacttgacttccctctatacagcaagtcagtctctgctgctaaaggaaatctaaaacctaatgattaaaaatctcaggttcttggacttggtggaaggaaggttattcttccaaggacaaaaaaaaaaaaaaaacccagaaaatctataggaacatttggactaaaaaaagtcctatcatacataaaaataaggctcacatacactattggtggtaatgtaagttggtcctacttttatggagaatttatggatatgtaccaaa

SEQ ID NO: 161049 - DNA, 1000 bp, Homo Sapiens
ttttttttttttttttttttttttttttttttttttttttttttttttttttttttttctgggcttggtgcatttattcaggtttgagagctgaggagggcagagctcgcacagctgtgaggcagggctgggccggacaggagctgcttcatccttcaacagacgctggcctggggtgaccagcctggtgggggagatggagtcgggatggaggacaaagggggagcaggggacagagcccaggaggaagcaagggagggcacaaaggaggggcaggtggcttcaggtgagaagcaggagggagaaaggggaccagcagtgggtctaggggaaggggctggggtgagggaggctgagaaggggcagaagatgtggcccacagcggctcccaacagccccaggtcctcaggaagcccctcacctgtccctgtccccatgggcccccagactcactgcagacccaggaggcctggcatagcgagtgtgcaggtgtgtgcaggtgtgtgcagaccagcacgtgtgcctgtgcacgggtagacagcatgtgtgccagtgtgagtggcgtgtgtgtaagtgggtgttcgcatgtggaggcatgtgccagtctgtacacgtttgctcatgcgtgagtgtgtgtgcatgtggttatgcacatgtaaaggaccagaggcgggaatcagaagggcacggtgggcatccctccaggaagaggagggactcaagctgacctcgccctcccacaagaagagtcaggccttgggggccgcggctgtctgagtggtcaggctggggctgccacccagggcaggctgctgaggtccagggcacctcctgggatgagtccaagctccttgtgagcagggatgggtgaggggaggaggtggcccaggacaggggacccagagggaggagatggcccgggacaggggacctggggtgggaggaggtagcccaggacaggagacccggggtgggaggaggtgggccgggacaggggacc

SEQ ID NO: 161050 - DNA, 1000 bp, Homo Sapiens
tttttttttggtgcatactgtttaattttctatgcttcataacgtacacagaagtgggttttcaaaattttgtgctatcaaaatgttaggagataaggccgggtgtggtggctcacacctgtaatcccagcactttgggaggccaaggcaggaggcttgcttgagcccaggggtttgagaccagctggggcaaatggtaagaccctgtctctataaaaaaaaatttaaaaaattagccaggtgtggtgctgcccacctgtggtcccagctacttgggaggcagaggcaggaggattgcttgagcttgggaggtccaggctacatgagctgtaatcacaccactgcacttcagcctgggccacagagagagaccctgtctccaaaaaaaaaaaaaaaaaaggagacaactgacaactgaatgattcagaaccagaccttggggtggagacagagtagactgtgggagggactgtctgaggcagtgagtactatttctggtgcagccactaacttgctgtgtgtccttggctgcacaaatcactcctgggcttaagtttttcatatgaaaactgaagatgcttctggtagctctcaggaccttccaattctgttgtctgtagcggggcttgtatgattctcatggaggacaccaggtaggacctcaagctgagaggggtggaaaggcaagggagtgtcacagcaagctgaaggggtcccaagccttcaggattttcctcaggaccttgctctcttgtccccaggtgcgccaagttgctgctggaagcaggagcgacggtgaacctggcagcaggcgagagccaggagacgcccctgcacgtggcggcggcgcgcggcctggagcaacatgtggctctgtacctggagcatggcgccgacgtgggcctgcgcaccagccagggcgagactgcgctgaacacggcgtgcgctggggccgagggcccaggtagctgcaggcgacaccaggctgcggcgcgccggc

SEQ ID NO: 161051 - DNA, 717 bp, Homo Sapiens
ttttccctttctgaaagtcacactttaactaaaatatttctgttctacaaatttccatatatcaaaaaaaagctgtagaatttaattcatagtgtcttctcaaaaggaagaggaaaacaaaaacagttcttcgtaggagtcttttattttttggtgtcttaaatgtcaatgatcacaaaaacttccgggttctcttcattatagacctgcattgctgaatatgttattgctttgacttctgttccctgagggtgcttggacaatgaaaattcttctccccacccaattgatcgtaatttgaaatttctttgatcaatgctaagtactttcacttcccggggtatgaagaattcatcagcactgaacttataaagccattcatccaaaaagtgaaacagaagagactgtaagtcatctccttgggtttctacttctactgtttggaggggctccactgtcccagtatctgtcatgtaaccaaacatggccattgcacattgctcaaatgcttcctccagagtatctccccatgcgtgtaactggacatctgctgtatgatccaaatactcgtacttcctattgactggcggatacttggccttgatcgccttctgttcttcagtcaaattgtaatctctaacatcttcctcttcctgcgccatgactgcaggattagacactctacttccgcccttcatccaccggacttcggcccgg

SEQ ID NO: 161052 - DNA, 1000 bp, Homo Sapiens
ccattttgctaaaacactttacgtctgtctgtatattccagattaacaaaatctgagctgcaagaaaatagggtgccgatttctgtacagtctacaaaactcccatccccaagcggggaccgggcacctccagggaggaatgtacaggggagtggggtctgtacagtgctctgcacacctcaattgctaacaggacaaaaggcccttggacgcagggcttctctgtcccttcgctcgcttctgaagcgcctcgtgagaagcatccctccatggccctgcacgtggccttgatgcctgggacccagttccgtggcccaccctgcctgccacgacccctccccaattcccccacacaaaggggtctgggcaagtgtttattcttctcctgccaccaaagccaggtccacttctaagctgaatgtgcagcctgtgccaccctccacctctgtctccccttccaggccaccccccccgccccccgtccagggcagcccctgcctgtgacctcaggaaggagagaccaggagcatggccagcggaagccgaggcggccacccctcttcccacccagcccaaggcagcgccctgcccctcctcccggaggctgcggactcccttgccccccaccctgcccaccctgcaggccagggctgggaggcgtgctccatggcaggaaatgacatccaatcagggtttccctccaggtttccaacagcaaaacgctccacccacccggccacccacccccatcacactgggccagaaactgtgtcttagggtacaaactaccgttttgtcccaagaattaaagtcatgcagagtgctattctgtctaaataacttattagaaaatgtgttggtttcaggctgggagaagctgtgggctgggcgctgttggcagcagcctgggctgataagattcacagggtggaccgtcagccagaggcaggaggtccccggggacatctgggagaggccagcacgatccagtgggcactgg

SEQ ID NO: 161053 - DNA, 1000 bp, Homo Sapiens
tatgcctactttattaatagatctaaattaatgagtagtttcatgcaaataatcaattaaataaggcctgataacttactccttcatttatccagtgttttctgacagctttgggtctttgttctttgccaaatgtgatggagctgacatcattttcaagagcagatttttttttcgtaggataataaattaataagccctgcttttttaaaaaagatgtgttaaatagataagagtgataaaattgtattgacttactgatgttggatttggaagttggttcttggattgaatagctgttttatctgagtggtttgcatgtttttagtgctatgcacgatggggagcaaatactgcaatatttcttgagtttgaactattcctttatccttgtagcttcttttttcatcatctgtccaatttatgccagtcttcttgctttggaaagatatgcattcttttattttgctttttaagttgtggtgcagatccaaaccttgattaggtaattgtcttctgaaataatcaaccatataatcatctggttcatttggccttgtatctttcacatcagaatttgattgtgtgtgtctttgcagcaaatgccctctatcataaacctcttgtcctctggcattttggtggcttgctatggtagaattcctttccttctttgttttcaaatgttttttctgagaagttaacttgagaaggtaagtcagagagtcaatggattctgaactgtcagagcctcggctactataagtgggagcttataaaattagtacattctttcttccaactatattcctgtggcattgaattttccagttattattcattaccttttattatactgcttttgtgtcatctcaataaaaatgtcagttctctagactctacatccaatgtaatgtctatcacaggtgtgtctgaatcctcaaagactttttccagggttatatgtctttccatttcttctaattctttcaggcaccga

SEQ ID NO: 161054 - DNA, 1000 bp, Homo Sapiens
aaaggtggggagttcactttaatggcattcctccaacgacttattgtaaaagaaacaaggcatctcgtcctgggtcgcaacacccagcagcatccgtttagaccaccaagggtaggctgcgccgggtgcacagggatcccgctgcggctcggcgaaagccggagtcctgggatccagagcagcccggggagccctggagtctggaaaggacacagcagtgggggcggcggcggcaactccagctctgagcccgttggcaccccgcacggtggccccagccagctggaggcaggctcaggagcggctcctgtccttgtggttccccacgatcatcttgctgtacagcttctgctgctcctccttgaacgtgtccttcaccttctccctcttcaggcccccatcccacagcaggtccacaagtcctccctgcctggcaatggcagatttcaccctattcgcaaactggacagcatcttcatctgcctctctagtcatgggaggcaggtaccacacgctgcagacaatggcccagctggtcatcattcgcagcaggtacgtcaccatcccgtatttgctgctgttccagaaggcatcgccaaattgagggtcatacttgatagcaacagggtaaactgtggctccaatttcaaaacttccctttttgaacatcatcaccgatgtattattgatgcaggttccttctgggaagatgaggataggcagcttgcttttatcttgcacatgttcagtcagtctcttagccaccaggtggcgatccttcacttccgagcgctcaaaccagacgtgtgggcaggccttcaccatggctctctgaatcacacccatgagtcccccgtgcacttgacccaccatggcataatagccatcgctggccaagatgatcacatcgatcggtgaggtatgattggccacacagatgccaccatttcttggtctgttttccctgtcatggtaggtgatgatggctgtcagcgctcgc

SEQ ID NO: 161055 - DNA, 1000 bp, Homo Sapiens
acaataggcttcaaagtaaaatccaggagacacgttgttaagttgttctggtctcctttttcagtatcataatgcttttaaaaaacaaacacaactgaaataactggtggcattagccaaacattatgctgtgtcctgccatcgccatcaaataataatattggagtggcataactttgtcatgtttaatggtcatatctgtgaaatgaaggacagttgtagaaatagttgacttgcagaaaaagagaaagtataagaaatattaagagagctgctgtctgtgaagttccagttcttgattaccattgctagcaaggttgctcactgaccagcttccttcagtcaacgccatatcctacaggtattatccttgctgcctgtaatgactatgttgcctttatagttgaaagcacatgaaaagatttcatcagtgtgcccctcaagaacctggaggcactggccagtctgagcatcccagattctagccgttttgtcagagctgccagttagaagatggttcccttgagggttgaaagaaatctttgaaatttcaccttcatgaccttccagtttggcaatgcattttcttgtggcagcactgaaaattcttgctgttccatcagctgaagcagttgcaataagctttccagtgtaatcaaagcagctgtctagtatttcatcatcatggcctgttaaggttgccacacattttccatttgtagcatcccacagcttgcaggttttgtccatagagccagttaatattagagagcaatcccaattgaatgaggcactgctaatctcagcacaatgaccaattaagatatttaccttccttccagtatcagcgtcccacactacaacggtatgatcaaaagaccccgtgatgattctgtctcctgaggtgttaaatgacaaggagatgatttcggcagaatgtcctcttaaggtgtaaacttcctcgccattctgaatgtcccacaatttggctgttgtgtcc

SEQ ID NO: 161056 - DNA, 1000 bp, Homo Sapiens
ttttttttttttttttttttaggcagttctggtgatttctttattctttataaacacctttttctacagtacaattcagagaataaatagaggcacacggctataacttccaccacaatctgctgttgaagagacattcaatgtgaggctagggagctagaggtgggggacgtatttgggtaccagggtaacgggaggcctacgtaataaactgcagagatcccatcagtaaggtctgattgcggcctgacggtcaaggctcatgatagaagagctacagtgagccaaatgctcctttagttccccacagtcctagagtaggtccaattctaccaaaaccccaggggttcgggtgagtctgatttattggtccactgggaagaaactgtgtcagcccaagccatccgtatgaattcagttcactccatggtagtgcctgaagtggcctaaatattctacccttttccctggagttagtcacaaatacaagtaataagattactgtttacatgagtttttttcttgattgtcccaaaaagggatcctgttccccatctaaggaaggagagaggcacacatggggattatctgctctaagttgatgaaagaagacagcctgtcttctaaagggaggaggaaatagcactcttaccgaatccttcacggggacataggcaggaatgaataccagtctgatcagaccaagtggaagcctgcagccatgattccaaccagcatgaggagtaacatatggaaaagctctgccagccaggcacagtggctcacacctgcaatcctagcactttggcaggcccaggcaggaggatcacttgagcccaggattttgagatgagcctgagccacatagcaagaccctggctcaattttttataataataaaattaaaggctgagcgtggtggctcacgcctgtaatcccagcactttgggagaccaaggcgggtggatcacgaggtcaggagtttgagaccagcctggcc

SEQ ID NO: 161057 - DNA, 1000 bp, Homo Sapiens
tttttttttttttttttttttttttttttttttttttttttgctctgagacattttatttaaactttttttttttaaaaaaagacagcaataattaatgccaagaacagaaaagaatgttgacgtgttgcccggcccgccaagcgggcccctgcccaggcccccaagctctgccaccactggggtgccgtcccctcccgcagcggggcacagtcagctttgaaggtgacagcgggccaaggccaggactctgggtggaggaggccccttctctgccggccccacctctgctgggagcagccacagcctgtggctggggtgctgggatttcttcctggtcatcaaagagaaacgtacaaacctcaaggacccagacacacagtgggtggccagggcagaccccacagcagaccccatggctcgcctgagctctggcagctgccccactgctccttccatccttgccccaatcccccaatgcttgttttgattgttttcttaaaaaatataattttgtaaatgttccataaaaatactattattcctagtcaaacacagatattgcaatatgaagagtaactgctctgtctttgctctataaaacgtgaaaagattatcacactggataatatagaaaagatgccagggttcctaagtatcacaaaagccagtaccaaatgcgcaaggtggaagcggggccggggcagggtcgggctgggcagggcagcagcctgggttcctcccggctcgactgcggagcgcgactcgcgcgtcggtcccttcttcccacgagggggtatcatggctttgaagagacggcggcagctccaggtcccagcgtccagccctgcccaagtaggccgcctgctcggccagaagcaccgaagaacccagcgacgccggtgggaccaggcggccctgctctggcggcctcggcggctggcccgtattcaggcccggaggctcggccccggctccccttctgcgcgggtgcaggctcc

SEQ ID NO: 161058 - DNA, 1000 bp, Homo Sapiens
ttttttttttttttttcgttttgtgactagtttatttcacttagcagtgtcgtcttcaaggttcattctagttgtagcatgtgatccttaaaaggatcagtttaaatctttaagaggatttccttcccgttaaggcttaatagcattccattgtgtgtgtgtatcgcattttgtttgtccattcatccatccatggacacttgggttgtttacacctcttggcttttgcaaataatactgcagtgaacatgggagtgcacatacctctttgagatccggatttcaattcttttggttacatactcaggcatgggattgcaggaagactgtcatctctctcatcttactcaacaggctgcttctccccagtgtacatacagacttgagtctttcttatctcttttttccttctgcagcctgaagcttttgcagtttcgccatcagttctttggcggggttaaagatgccgccggttggctggtcacagatgtagcagcgcggggtggcccggaagtgctccagcgcgcagctctcgcagaaataatgcctgcacttggtgacgactgggttttggaaggcctggcgacatatgaaacacctgaatggtatttcctcttcctcgcttcccacttcatggttttcgtcctcgcagatacagtagcgaccctcttcaagctcccgttcaatctcccacccgagcttgtaatcggaacggtcgtggaggaatttgcagctgtccccgaagccacagaagccagtctccttgtagtccttgcagatgtcaggctggtaatcccagcgcacagtggcgcgcagatgccctggcgcacgtatggggcccttcctcgccatccccgaggaggagttgcccatggacgtgtccttgggcttcaggtacctcaggtagctgtggattccccggtagatgtggtcgtgctcccgaccccgcagtgcctcctggacccgctggctgcacttgaggatggtcggcgtatggtgc

SEQ ID NO: 161059 - DNA, 1000 bp, Homo Sapiens
tttttttttttttttggtacacgcactggcttgtttattagaaaaagtcttagagactcagtaaggcacgaagtccaggaagtgggcagggtcccctgggggacgtgaccaggaacaccagggcttcagtgccggatgccccactgtggtgggagttccccgctctctccagcagccccgctcccgtggagcctgaggacaagggagccctttcatccgagatgctgagtatgggcaacagggaggaggggaaggaagaggcagctccaccgtgtgggtgtggcggggggatggggctctgcaggagcctgatgctcctcggaccctgaaggcactacgactagaaggcccggctcaggggcaggtcctggagctggggcaggggtgggggctcagcctggctgattggtgtggggagggggcaggttggctgtcactgagccgagaggcaccaggtggcaggaggcaccagatggcaggctgtgaggctgcctcagctgaagtcgcggttgcgcaggaggagtggggctaccagggtccacaggtagaggagcagccctgcccagctggcacagatcttcacccacacggcggtccacgtgctgatcatcttccgggtctcaccgggcttgtaccagttggtgagcgtcatcatgacgtgcagtgaggccagcaccaggcagaagtggaagaaggagtagctgtaggtgacgccgtcctgctcgttgtcaaaggcccggccctcacaggctgccacctgctgctgctgctgtgtggcgtctagcataggtgggcactcctcggtctgcatcaggctgttcacctgccggtggtctgaggagcgcagactgatgaagagggtgcacaggaggaagatgatgaggcccacaatgctcggggcatcccaccactgggtctcatagccctcggggcctgccacaactgtctcgttgcccagctgggttggcaaatgggggttgcatttctgttcagggatact

SEQ ID NO: 161060 - DNA, 1000 bp, Homo Sapiens
tttttttttttttttttgggattttgcaacatttaatcaaaaaagaatctggcatcttaaaagttaggtttacaaacttgacacattctcaatattagcaatttatctatttaaacattgtctaagaaaatatgatctatgaagacattaatacattaataagatacttaagagttcattataagctacaacactttgcaaataagtatccagtttaattgtaacaaaccacaatttgtgagcaaatttaagaatataaaaaacattaattagttaaatacaattctctgggaatatacattatacctacagctgtttttacagtgagagtcttcctttttttttccttttaattatcaaaatggtaaatcactgtatggtcctggatctccatgctataaaactgaaatatgtatttccagcgtagcagatggtgaccaggaaggcaaagaacgatgaggccgcccagctgttgaagttgtgactgtccctctcaggggagacggaagatgcatctacaacagcggcagagaggtacaagacgaaggcactgccgttaaagcacaggcccactgttgtccagggcacctggggaatcctggtgtaggtcattgttatgtagataatgaggaagaagacggtgaggacccagtaaaatacagctacaaacatgacccagccaaatgcggggacccggaagtactcagttccagcaataagcgtccataccagcagccccagaacgatctcggccacgatgaggaagccgggcagggtgcggaggaactcccggtcgtaggcgaagctgctgctgctggtggagaagttctctgcgaaggagctggcggtggtggtgactgtgtgcgagcgggcgcgctgcggctcctccatcgtcgagccactgccgggctggcgcgtccccagggaccccggcgggtctggggctggacgcgcggccctgcgccctggggacacaggcgcgggggaggggagcgcggcc

SEQ ID NO: 161061 - DNA, 1000 bp, Homo Sapiens
cggggccgggccagggtggccccagctctactaaaaatacaaaaattagccaggcgtggtggtgtgtgcctgtaattccagctactctggggctgacgcaggaaatcgcttgaacccgggagacagaggttgcagagagccgagatcgcaccactgcattccagcctgggcgacgagagtgagactctgtctcaaaagaaaaaaaaaaaaaagaaaaagaaaatgttgctaagaaatattttcttagcttcttaattcacatttcaacaggttctctgacaaatcattgacaaacaacttgacctcccttcaattctccaggatgaacaaataagacaggatttattggcaggattgaattggggcagggtagggggcccagcaggatgtgtggccggagcacactgcatagttccaacctgcagccccctccatgagtgccacggggggtgggtcccatgagccatggcctgctacgtaattggtgtttaataaatatctcttgggtgcataaagggaatttttaaaaacttagtagcagaagttagaaaaagaaatcttggttggtggggagctgtttccaagagacgaaacggactgattttaagcctggaaacccccccgagtggccctctgcaggcgggacggccccgcgggtgcccaggctgtcgctgacgattgatgttctcacccccgcccgcctcggctctggccgcagaaggaaggaagctgacgtttattgagggtctgctctgggctgcgtaccgtacacgggtgacatcgccaatttcccccaggtgtgtcatgccttccccactgtctggataaggaaactctagcccagagaggggaggcgacttggctcaggtagcacagccagaaggtatcagagtcgggattcagaccttcgtccaggggccgcccaaaaaattgccattcccgaggtcaccatgggctcactccatcccctttcgcttcctgttggcaggtgataaggaac

SEQ ID NO: 161062 - DNA, 1000 bp, Homo Sapiens
ttttacaacaagccaacacatatgctttatggttctgtttcaaaaacatgaaaacccaggccctaggattcaagtgatgttgagaggcagaaaggatggagaagttgttggcgccagcatgggggcaagcagccagacctcaggccctcactctaggctccacgtggctgggcttgacttctggccaagggctgcttttcccgcctgcggcccacctgaggccagaccttgcctgaggaaagggcctgtggtgggggggaagctcaggcagaaggaagacgtggccaacggccatccctgaggaggtagtgagcagctcctggttcggcaagggcggtgggtaggagccaggccgaggagtcttagggtcccctctccacagctctggtgggccccctgctcccctagccaactggttgctcacctgccttctatgctccctcctgaagccagcccctgggagagaacatctgaaggcaagaaggaaagagagccctgcctaagcttcttcctccctgcttggccaagtgggagaagcagctgaggtcctttgtgtaactgaggaagcacggaggagctggaatgcctaccagctcggagagggcacttgagagggtctatgaacaaatctgtctaaaagccacgtttgagctaaaagcatcagtccatccctcagccccagctctgtgcgggccaagaatccagaaggcagcaagcaaggcctatctcccaggctggaggtggttgtggagctgctctgcctgagtcttcagatgctggaattcctcttgaatgaagtccgtcagggctttccgcatctccacagccgacttgttctccgcccggagccgctcgagtacaggcagggcactgaagggcttcccgatcagcacagtgattttctgtccaaagcgggggaagtagggcggactgttaggaaggacgtcattcattccgacatgccacaggggcaggatgatggggttgagatgacactcag

SEQ ID NO: 161063 - DNA, 1000 bp, Homo Sapiens
ccaggttgacaggttttattccacccccttccatccccatggccaccccaggcaggaggagacaggtgtgctggagtctggtcactttggggcccggcgtgggcagagcccactgggtttacattctctgtgggcaggtgtggacaccagagggctggggcaggaggagcgtgggagcgagcggccgacccccgtctctggcccggcccctgggtaaacgccgactcagatgcctgaaacagacctgggccgagcaaggaaggctgatggtatttccaaccaagacagaaatacaaagtgaccaaggccagtgacgaggccgatagggctggcgggacgggacgcagtaaaaaagtctcactcacacacacgccacatggacacccccgcacacagggacgtgtcagtaaaaactcaaggccagctgtgaggcctcacacgacactctgccggcccccagagccctccaagtcggacatgccagagccccggccccggccaaagtcaatgaaaatcccttcagaatccgagtccacggactccaggatctggtccaccaggttctccgggctggagcggggcagggagctgcgggtgggatccaagccctgctcagggggctgggtcgtggggtacagtctgctggggcagggccctgagtggggcgccggggaggacctgaaggtcccggtggggccctggccgggcgggtcggagaagccctgaggctcggggcaggacgtcatctccgacacagagtgcctgcggatgctggtaccgccggccgccgcgccctccgcctcgtgctcctgcacggggttcagcagaggcgtgttgtagctcttggagcgcaccacagggttcttggccagcacgtcccccgagcgggagcggcggaggaggcgcttttccaggatgcaggaatgggtgaagggcccctcgctggagtggaggccgtaggtgcccaggtatggcgacaccaccttctggaccagcgtct

SEQ ID NO: 161064 - DNA, 1000 bp, Homo Sapiens
ttttttttttttttttttttttttttttttttttttttttttttttttttttttttttttttttttttttttttccgtttttaataaatagtttattcatccagcagtttcagccctgatactgaagcctgttgcggtgtttcttatttttctggctggagcctgattatgagaacatggcctcaccacggggccagcgctcagattcctgccctgccgatcatccagacatcagaggaaatgagagtattgctcaaatgagggagactggagctttattaaggaaacaaaaaataccagtaagactagagaggggtggttaatgtttctggaggcagctgtggaatttcctgtttgctccccctctcctgcctgccgcagatgaggacacacggggaagactcgctggagaggcttctcgcacttaataaggccccccgtcggggtgcttctggagcctgcctcccagggagcaggctgaggagctggcgggagggccggtgggcggcggcgcggacgctgctcccttgtggccggcagggggcagcctgcagccactgcgcctctcccgccgccaagagccgcggccggggtaacagaaacgccggctgcgctgaagttcttgttaaacagccccgcgtcggggctgtggtcacagtaaagcaaggcgatcttcgcacacagcaagtgcgaggctctgggccctgacgcagggctcccaagctcccggaatcggcgttctggctgcaggcctggtctagagtcgcagcttctgtgagaagcaacactgaggcgggcccgcccgaccctcctctctgctctcagccccagtccctacttcgggatcctcccaggaggctgtgccggctgctcactcctcctgacctgagggaccgtgtgtctgggcctggtgtttctagacggtcccccctacagtcacttgttctaatttctagcaccttccctcttcaggatagaggcccagccagccagagcacag

SEQ ID NO: 161065 - DNA, 1000 bp, Homo Sapiens
attttttgtatttttagtagagacggggtttcatcatgttggccaggctggtcttgaactcctgacctcaggtgatccacccaccttggcctccaaaagtgctgggattacaggtgtgagccaccgcgccaggccaaggatggctattattttcacatgaattcaactgaaatcacgatagggcaacaccaataacaatgtttcctatatagcttaaaaactgttctttgtcatcccctcatctacccaatagggaattagaactagcctgttaggttgcttgacaggaccactgaatgctgggaatcaaccatactctattctctcatttaacagatggggaagcagaggtccagggaatttgggaaacttgtccacaaagggacaactactttgtggctgaactatgtctaggaccagggctctctttatcaacatgagtatctccttcctttatctgccccttcatgtttacaaggcacctcctcagctccatgattttgtttgttacgctacatcactcagctcatgaaaacggctttttttcctcttttcttgtctttggaagattttttgcattcttgtagcagctgattccatactaacctttaaattgaaaaaatatatatacacacagacacgtatgtgaatatgtgggagaaacagcactaggtctccctggacaacccagtgcaggccacaccttggcagtcacagagcacaaataagaaatgatcttcccgtgtgagttgctttcgacacttcaatgctaaagagctcagaagtgcttacactttgaaagaagcctgaaaacatttgtaggctaccctttaatgtgtctcatttggagatagaacagtgagcaggttgaccagctgctcttcatgtacttcttgcagtaaatccttcaaagaatgaagagtgaagacaattcattttccctcctggaatttttccttcttattattttgcttttttaaaggttgttatattcaggtat

SEQ ID NO: 161066 - DNA, 1000 bp, Homo Sapiens
tttttttttttttcattcattcaatatttatttattgagggcttgctatatgtataaggcaaaaataaacaaaatgaaaatactacgcactttcattctgtatcaaaacaatactgtcagtaataaatataaaagacaaaaaaaattgaatttattttggatgactgcggcaaagcacaccgggtaaaagactccttacttctatttctgcagattccacccggttttcaattatttcgatacattgtctcttagctggtggttcttcacttataacagtttcttcagcaatgtctgttgctggtactgttaatacttgttgtccatctggcatggtcacaatgatgggctgaccaattccactggttggaatagagtgcaaatttccaagctgaattccatctgtaactattgtgatgacttgctgaccccctgaactaactacttgctgaatggcaccatccacagattctgcagtaactacttcttctgtggccactactggagtttctgaagaattggacaatggagcagatgcttcagctaaggcagctaatgtagctaatactgatgtagaagagtttccaaactgaacagcagatacacccgtttcatctgttaggttcaccacccctccaggtccaatgataaactgtggtgttgcagcatgtattgtcacagtgtcaggactctctgggtttgtgttgatttggttctgcatagcaatctgtaatatctctgctaaatcttcatttccattgtctattgaaatatcaaatgcagttttacaaaatttactttgcgtgtgtacatcagcaccatatttgattaaaagttccaccacctcttgatgattgtgttctgtggcccaatggagagctgtcatctttaacatgtcctttgcattgacatcagcaccatgcttaagtaaaacctctactatgctggcatggccctcagaagctgccatatgtaatggtgttcggtccactttggttct

SEQ ID NO: 161067 - DNA, 1000 bp, Homo Sapiens
gcggccgctcaccgaaggtggggagtagacagcaggtcagaggccgcctagagccggagggacaccccaaatacaaacataccacggagagacctgggatctgagtttcaaaagggcctgtgataaaagactgaatctttttccaaatgaagtagaaatggttctgtcgttttaaacatacacaatacttaggagacttgttttactcagagtggaaaattttgccagggacaaagtcaacacaaagaaacaaacaacaaaaaatagccagaaagagaacagttaagtgcagctcggtgagtcccggcagttccttcccggcactggctcgtccctgggttctcaaggttccatgcggccacagcgtccgtccacctgtccacgcgagccacatgctgaaatggaggtggataaaattcatcaggcagctgctgtaacacggaaatgtgcagatgccagagtagcttcgtctgaacttgaacaagacagacaaaaggaaatcattccataggctgaaaacaaaaacaaaactacgttgtttctttgccccaaatgaaatccacggaaagggcctgtgtgattctgaaagtctcagtagaaatggagtgatgtgaaatgcccaagaccccattattttgtaaagaaaggacacctcaaaatactctaattccacatgtctccgctgcctggtgggtcctgtgagggcggcggggatggctccccccgcgtcctgaggcctagtcttgggagacccactcacagcaggcgctggccgtgccgtcctcacacagcgatgcctggtcctcgcgggaggacagagtttcactcgtaggtagaagctcagcccagcaggtgctcagtggagacaccgtctcccaaatcaggttttgttgtgtgtgggttttgttcaagtgtgacttctgtctttaaggagtgttaaggccagctgggttttgggttttcagtgctgagaggtgaagtccaaccacagggccctgca

SEQ ID NO: 161068 - DNA, 1000 bp, Homo Sapiens
ttttttttttttttttttttttttttttttttttttttttttttttttttttttttttttttttttttttttttttttttttttttttttttttttacttgtttaagcacatggtatttattaggcattaattggcacacaaatataaggcacgagtacttaatcctcaccctccccccttagcaacgtaaagagacataatcgcatagggacactcacttacaaacacactcacactctctcacgtacttaaacacactcagcctcacatcttaccctgttctctttattagggtctgtttataaaaaaggaaaaaaaaaattctttttaatcaaaaaaagcaaagcacattcgaaagaggaaaaaaacaaaaaaaaacaaaaaaacacaaacttggttttgagtatcaataaaattaaaagctcttggccagctcctatgctgggtttcatttcatgttattacttaattagaattcctatttataaataaatagtaccagtaaaatattacatctgaagaaccctaccataacactttacttacacactttttttaatactgttttcggctttcagtaaacacagttttgtgttggcattggtgtgggcgtggtttctttggcgagatatcattggtgactgtgtcttgcctcttctgtaggaattgtgcattttgcttgacatccagtttgggttgttggtgatggaggtttggaaggttggggctggccttgtttttttcaaaaaaaatttttttaatcaggaagaatatttattttggctttttgtccacaactcttgtcaacacagagcttgcactgttatcacagtcctgcctacatgtaaacgggggctttttaagtttttcaaagcaagctttccggaagggaagctataggccacgttttagcgacagacagctggaaagacagagctggcaagatggtagggctgaataagataggatgccagggagcgtcagtgttatcctgactcc

SEQ ID NO: 161069 - DNA, 1000 bp, Homo Sapiens
ttttttttttttttttttgagacagagtcttgctctgtcacccaggctggagtgcagtggcaccatcttggctcactgcaacctccaactcccgggatctagagattctcctgcctcagcctctcaagtagctgggattacaggcacgtgccaccatgcccagctaatttttgtattttttagtagagacagggtttcaccatgttggccaggctggtctcaatctcctgacctcataatccgcccgccttggcctcccaaagtgctgggattacaggcatgagccatcgtgccaggcctgccatggcgtttgtaaactgtcatggcactggtgggagtgtctgttagcatgctaatgcattataattacagtataattacagcagtgaggacaaccagaggtcactttcattgccatcttggttttgaccggcttctttaccacatgctgttttattggcaaggtctttatgactgtatcttgtgctgacctcctatctcatcccatgacttggaatgcctaacctcctgggaatgcagcccagtaggtctcagccttattttacccagttccctattcaagatggagtcactctggttcaaacgcctctgacactcccaatttttgcaggtgaggaaatggaagccttgaaagattaggtggctcactctaagtaacatcatgtacctggcagggatttctataaagtcataagatgtcagagactatgcttaagaaatatttttactttgaaacactttaagcaaacagttaaaaagtacccaccacactaccctgtaaaaatcttaacattgtgatgcctctgcatcaatttttagaaaaaaacaaagaaaacacaactgaaggccccatgtaccctccccaaatccatcaggtctcctgccttaggaaggcagaatggtgacttgcacacatcgttccaatacatgattttatactcatttcatattatttgaatccacagaaaatagattactg

SEQ ID NO: 161070 - DNA, 1000 bp, Homo Sapiens
tttttttttttttttttttttttttttgttatttacaaagatttattacagcacgggaggggttcaggcctggagtcagggaagaaggggaaaggggcagagcagctgggggacaaggaaaacctggcgccccccgctgtgtgccccaccggggacataaactaggcggcattcctggcatcaaagcacaaaacgcaacaaagaggtctctgccagtccatcttccaggcacccaggaggagcaagggtgattaagggaagattcccaaaatgttgaggctatggagaaaaacgccttagtcctggaccctggtagaagccggtgagagaagtggtgacttggaatcctccataggaaagtgggtagaaaaggatctaagggtacctcaaggttctcaggacctcctttccccagatcttagggtcctgccctgtgggtctcctgtgtccaggggagaggatctggggagtagaattgtgaagggcaaatccctgttcccggttttctggattttccaatgtgggctgtctcacatcccacctcccgctgggtgaatggaggaatgactggcaggggtgggcatcaggcagcaagtgcccaggttctctgggtatcagccaaaggtgggcaaacaagcaaacacagaccagccttagtcttctagaagtcagaagccgcagccctagcaggcgaggggaagagcacaaaacagggtgaggatagagtgggtttctggggaacagcgatgtcccctccacttcctcctgggagatgcaggctgggtgcctatgtgccaggctcagagggggaagggcgctgaggttcctccccaggctcacttagtgctgggtcttccacttggtcctcagagcctccatctctctcggactcatccagagggggtgggcgctcccagggcccttccagaccctggccacaggttgtcttttgcccagcagactgcctgatgaccttcaggacttcagcctggctgtcctc

SEQ ID NO: 161071 - DNA, 1000 bp, Homo Sapiens
ttttttttttttttttttaaagaacagcatctaaagaaagtttattctgtgatattagagacagaaggttttcatataaatgcaagtttgacaaagtcagcatctttctagctgtctaaggaagagtcacttgtaacacagccagccaggaggctgctttgttttttattataaagaacactaacacaaatgcagcatgattgctgtaaaataaatgtgaaatttgtacaaaagtcccagtccttccgcagttctaggtttacagtcaggctcaaccttacttgccccgctcctgcatgaaaacaagtgcgttttatacagcctctgccacccagtggcatagtttaaggctctatattatatttaaaattaaggtttttttcctatcatacacatcaatttggaacctgctggtgactcttctaccacagagggtaaataaaaagaccagtttttaaagtaagaggattcagctcatcttataaaagtataatagtttcggccagacgtccattaacatctgtttaaattagatacagacacaatgccaaatattagaatcataaatgtaattttggagataatgtttaccttgagtaggaagacacttggaccatattaaatttgaaagtcttctgttccagaccaaaatggggtaggctaattccctgtcatccaagcaactaaaaggtaaaaaccttataactttaaaataaaaaaggttatttttttcccctataaaagacaggcagtatgagttaatacattaaaattattttgtacatccctgctccaaacaaccacaaaaatggtactttttaaatgcctgcccatcctctcctggaagggggtttttccaagattcggggtgactgattcatcccacagccccaggcagcagtttatcctggaactgtcctctgttctcccatcactgctgagccctgagaattgtgaatggccctcagagcatctaggcctctgcaacaatcaggtctct

SEQ ID NO: 161072 - DNA, 1000 bp, Homo Sapiens
ttttttttttttttttttttttttttttttttttttttttttttttttttttcggggtcatttgtactttattacttttatatacaatgtagcatttaaagtatcctgaaggttaactgaagctatattaaaattttatctttcatcaaatcagattactattttagagagttcctttccctgggaaaagctttgagcatctctgtaccaaacagtgtgaaagatgttctatccccacctccacccccatcaatatcctccaaagggacctaagaacttgaagcagaaaaaaaaacattaaatgctaaattgtcacctctgaaaaaatttgcacatgtgggtacaaaggagaaaaaggagggaggtgtacaggagaggtgataacagttaatcctgacttatctcaagtcataaatacttcttgataacagaaatcattaagtcatcagattaaaagaagtgtatatattaggtatgttcttgctgaggtatctttatcattatcttaatatatcctatgtgatttctcataaagacttttctgtccttcaccattattatttcagaagaccttggcctttaaggaattaggcacccccagcatcatatgaccaggaggcttcacctcttgctagccctttccccaggtaacactcatcagggggtggccatgagggttacagtaggctctcttgcagccactggcagcttctcaatctttggtgtccagacacatgcaggcttatcacctttctggtaattacgaagaagcctaagtgggtacaaaaggacccttttattaaaagattaaatcacatttagtgccaatcctgaacaaactatatacttgattatttcagctagtgctggaaagaaaggggtctatctctcaggcctgagtgtctgagtaagtactttaaatgcagctgcttacaagtcagtctggggctataaatcatgttatgatctttataaccccagaatgacttgtaaggttcta

SEQ ID NO: 161073 - DNA, 1000 bp, Homo Sapiens
tttttttttttttttttttttttttgtctaagagtaaacggtgtttattttttgttgatttttttcaatcaaatggaattgcttaattaaaaaaaacttatctcttttctccttaaatactacagacaacctcattttatcgcagcagacacctaggaacaaaacactggacccaccagagaaaactgggcaataaaagcatcagaagttcaagtcaactatggaagaattactgttagctggcagctttcaattctaaacagaagtgtcccaaacctattgggtttgacaaaagtttcttagaactggggagctgggaatgttggactccttttaattctattccaatcatttcctgtatagggaaattaaagtcaatgcatcaaatgaagacccaaagaaacatttaaaaacttgtttgactagtattcagtatgtgagattattaagtaataacttgtccacctagttaaccttgtcctggaatatatataggttatttgtagccgccactgctataatattttctgaaggatgccaagctgtatgcaagatctttttgctaaagtccagactgtcgacactgatctcgtcttttctccgcttgccccccacacacacttttcggggtttgaggatagcccggggcttgctgttttccctcgaagcctcaagggtcacatcacgcttggtgtttctgtcgaacatcctgaagaagttgttgtaggagcctgtcatgatgacactgtctgacccattccacacacactcaaatttatcaaaaatgcagtcattttcatagagggaacacagcttgctgcggaggtagtcatgaacctggtaagtctcgatggggcggttttccatgttgagatcccagactttgacggtcaagtagtccctggtcatgatatacctcccactgtggctgaacttcacatccgaaatcgaagagataatttcagagaaaaatgatctgttgcttggatcttccggctct

SEQ ID NO: 161074 - DNA, 1000 bp, Homo Sapiens
cagagagaaatgaccagtactatttatttggaagtctgcgccatggtgggtacaaactacatcccctgctctgtgggaccaaaatcaaaacagggcaaaaacaaatgaacaaaaatacccccatcccaaaaaagcagcagaaggaatgcaagaagtcttacaggacacactggcccagccctgggtgcagccagctctgcatccaccgctgcgctcgccaacttcagctaccgcccccatggggactccagagggccgggctgcttaaccattttccctgcctctccacgacttccctttccctttatttcctcctccaggattcgagtccacttcctccacgaaggaagtgctgttgctgacagtggggagagcgagctgggatctccagggcactgacgcttcctccaagccttgctgcatgggcgctcatccaggcagcttgacggagctatgcgtaaaaaaagaaaaggaaagaaaaaacaaaaacaaacccaccccaagtctgtcttttctcaaactaaaggagaaactaagggatggtgtggcctccggcgggcctccgtagttaagagatgatggctggggaccaccggggcagagtcaggttgtctgcactggctgagcgcttcctcgcggatcttcttaggtccttgtacttgtcctcgcagaggcgagagatggcctcaagcttgtgagccctctccctgctcaggggctccaagggaaagctcaggttgttcgcttctgccagagaacgaagatcaaaataatacttggcatagacactggaaggaacattgatgttgaactgcagcaattcaagaaactgtcgctctagctcgctcatgtcctccaccgtgatgtctttcaggatctggcagtaatccacattccatacagcctggtcatcccacaccttggaggccagcaggatcgcccctaaaacaatccgcttccagttggccggacagatatctatctctgcgtatgttaaaag

SEQ ID NO: 161075 - DNA, 1000 bp, Homo Sapiens
ttttttttttttttcaaatattttatttcttttattataagacatataggtaaaaacttgcatattttgaaaaagatagaaaatggtaataaaatggatatttttcttattaagaaatatgttcataaatatgctttatcaaatgttaaaatggttattttgcaaaataataataaatagagcagagctgtgacatacaagggtcaaccaaagtactggaagtttttatgctatatgttttataaaaattcagacttctgattatacattaaaaattgacattttgcactacagggtatcaataattctgattttaaaaatatttttatgatggctccatgaattcaaaaataataaaacataaaaggtggtttgactaaatagaatctgattcaaataatttccccctaaataagaaattgtaagatataatttttgagcctataagggacacatgtatcagttcccaattctatatgtcttggtgggcattgaacaaaaattgtttgctaagcctttgtttccagcaaggtccacatcatttcttttcacagtttgatggagcaataatagtcacgattctgatgagcctagttctacaattctagctccatggatcttagattcgtagaaagttttccctcctttgaagaaactcattgacagctttcttatatttgtttatgactcattggcctcaaagtcacatatcagaacactgggaaaaatttttaatgatgaaaagttcttgttctaggcattctttgtaagctttacttctctactatccaaaatagaagaaacacatgtgaacaccaaacacatcctctaaagagtcttgggtgttcaaatagcaaggtcaggcttttcctggaaataaatactgactttttacaaaaatctttcatttcccatgcatcatgttgcccacaaggctaatacgctagctccctgctacaatgggggaaaccacatctaacttaagtattcaatctaatat

SEQ ID NO: 161076 - DNA, 1000 bp, Homo Sapiens
ttttttttttttttttttgctttaatgttaaaaatatttattttttttcctaaaagatcacacaaaagttgggaagagaaggatgtcaattagactacatcaaaatctgggcagagggaggacaaagagctgcctaaagaaactggtagctggagcaaactgcagagatcaagatgaccctagtcaacggaaccagcagcccaggtcagccacattcaggagcaccaccgaggcacggcagggagagcaaagttgctggccccaatcattcctccttttcagggcaggagaggcagaagctcactctttagacatgttcttgatggtcttgtgctctttcatggccttctcccaatcgctgccattgaattcctcagtgaccatactccgcacagtgccctcatccaggcagtggggggcaattccgaagcctccggggtttgatcgtggagtatagaagctctgaacgccacatctcttacagaaggtatgctgggctttgtgagtattgaacgtgtaagtcgttatgtgctcagctcccttcaggagcttgaagcgagaagctggaacaatgaagtgtctattctgcttcttcttgcaaatgctgcaattgcagtcaaatatatgcaagtctgctgaggcccaaacttcaaaacgaactgctccacagtggcagcctcctgtgtgcttcaccaggccctggtattcaaaggtgtctagcaggagcttggcggcaccctcggaggtaagcttctgccgcttctggaacgtctcccagcgctcccgctgctcgcccaggtccaggttggacgccgaggacgtcggggtcgcgggagtcggcggcggcggcggcggtggcgggagcaacgccagctcaggcggcggcggctcccccgggccctcctcctgggcccgcggcgacgagcgcctcagccgcggcttctccgacggcggcttctccaccgcctggctcttgctcccggcctggctagcggagcgc

SEQ ID NO: 161077 - DNA, 1000 bp, Homo Sapiens
tttttttttttttttttttcttcttattattatttattgctgttgttatcccctctgttcctgctacaggaaattctttccatgtaaaattcattcttgtccccaggcctagttcacagccatactgaatgcaattcagcatgtattcaccatgctctgttagttgtgtccagatgttgcatgacgggggagcacactcacattgtgtctgtgtgactcatgtccctggagttatgcagcgcacagcctacatggctgtacagggcagatctgattggatctcctaagagcaggagtgagctgccttctttgtacctgcgcctgctctgttgctgccagttgatggtgcctgtcagctggtgggcagccctggagtgtggatggaagaacaggcatgcacctggttttattgaggccaggggagagctggtgtgggagcctcaggccccagagagccctcgggacctcctgatggacagccagactccaaagctatgagaagtacagaaagcccacagttggtttccggtcctgggactctaacctgtgcttggttgactctgcaggtctctgatgagggggcagctgctccctggtggggctcctctggggacaggcagcttcccaagggtgggcgtgttctctcctccaaattccccttccttccatttcctttccctttcagttccaattccttccatttaggaaagaggcctgtggaaatcctgtacctccagagctcctgggaggaacccgagggtataagagagagctgcatatggagactggggaagacggctcaggtcccctgctgtggtcagtccagccccgtgctggggccctgggtcttgcaggcacaatcggggcagcccagtgggttggggtccatgccatggctgcagatgggggacctttcagggctggcagcagcaggaagggaggccccttcagactggtccagccctactggcacctgggcttggctggggtctgtggacat

SEQ ID NO: 161078 - DNA, 1000 bp, Homo Sapiens
tttttttttttttttttttttttttttttttttttttttaaggttatttttatttacaacttttgaaaaatgtacatttttttttacatgggttacttgtgcaaagttagatttggaagtgataaatgcataaaaggtgacaatagaacattagacaaaacatttacaagccttgtcccatactgctacttaaaggtactatatatctaaaagtataaatatccaaaaaaagatcgcagacattggctttaaggttctcagatgctgaaagggaagaaattaaagcatgcagcaataactcaggatttgagtggaaaatagtttgccacagatatgctatgctcccttccttgaattcattaaaactctaaaataaagatggacaattgagtttattcacttagggcagcactgatcctttaaaaagattaaaggagctccaactttccctagctcaaaaactcacgattgtttccattcctctgctcccacacctcttttaaaaagcaaaaacccagaagaccaataattctgaaacttggcatgagtgtgcccagtcagcagcttgcaaagagaggatgtgtcagttactacaattgctgtactcctttagctgagtccttcaactttctccttcttgccagtaaatactacgttgtaattcatatgactgagatcttagtatcacaggatttttagctcccatgcctccttcaaaattgtttacatggatttgtttctattctctgtaggccatattccaaacacattcacttctaaatccaacacaagtgaaggaccagccaggatgaaacacttcagcaatcattttgttaaaaataacatcctggtcatcaagctaagcataagcacctcttgtataacaattcatcttaaaagcttaaagtacaataataaaaataactgcctgaaaactggaaatgaaatacaacagaaaaactgaagcattagtaatttttgcaagtaacccaggtacagt

SEQ ID NO: 161079 - DNA, 1000 bp, Homo Sapiens
ttttttttttttttttctgataggatgtgtttatatttacacggtacattttaaagcaatggctacattggtcatacatattagaaaccataaaaaaaaagttaagaactaaaatgtacatcatacacttgtatatatattttttacacagaggtaaaaaggcttattataaaaaaatcaatacaacagggtttttagtatacaggtaaagaatgaattatgcttcaggcactttaatttgttaatgtgagcaaatagcttggggggtcggggaggcttctggacagaaaatcttttggttaatgttttgttaccacagatacaaaaataaaatctgaataatttctctcaaatgattgacgtcagtatggcaaagctgactgggaaaatactacacactgttcagctgcagtgtggcaattagagacgtatttacataaatgtccccatggctgtctttgtgcccttaaccgatgccttcacaaaccaaaaagtatacgtggagtaagatctgctagcgtaactcttaaaagggtggaaaaggacagggggtgaaagaagagagaaacaggtaacaactaaatagaggtgacaaacaaaaaacagctgggatatgtgcgttcttattgaaataaataggggcacttgaactgaggtctaaggaaacgaacattagtgttgtgctttgtagagaggagaccctagagaaagaccccaaggaagtgcctccgggtcgggggaaggtggtctctcgacagcactggaggctggctgaaggttttctagatgttctccaggcatggatgaggttctcttttcttccatcaatccagatggacagctctctgctccttttccaaactggaaagcctaaaccagttactccaatgaatgaagacgtctactaactgactcataagcacactgggtatttacaccggtaatctactaaagaaaatcgatgagcttgtggacgagctggaaacagccccatgaaggt

SEQ ID NO: 161080 - DNA, 1000 bp, Homo Sapiens
tttttttttttttttttttttttttgaagggtgaggatgggtagaaaagaattttattgagcaaaagaacagctctcagtggagaggggatgcagggagtggtccccaacccccacagcagggtgatttctctcctcactgcagctgagtctgggtcttttatgggctcagaataggggaatacacgttgactgatttgtaagtatgcaaaggcaccactcaaaaggtgggcacagcagtgtaaaaaccaattaggaaagggcaggtatacgtaaaataggtgaagggttgggatcaatcggaggaaagcacaccaaatgggaagacaggttctcaattcagtatgaggatttagccgggactgtcttcagctttaaggttgggtttcaccaggtacccacccctatctgcctgggcatttgactgcctcctgccactatcattacctgaccgggtttccacaacccaccatccacagtgaggaagggcagggctcctgaaaatgagccagcaattctccttcaggtggatggagatacaagtcttaccagtacagtctcatgcataatcacacacagaatgtctccactttggtatctagcaatggctgaaaaagccacagcactgtgtgtgtcctctggtgtctgatgaagtatgactcctggctaaaggctgtaccacattccctatacacataaagtttctatcctgagtgtgtcctctgatgtctgataaggttggacttccgactaaagccccgtccacactttctgcaaatataaggcttctctcctgaatgtgtcctctggtgtctaatgaggtgtgactgccggctaaagccttgcccacactccctgcacacatgaggcttcccccctgcgtgtgctctctggtgtttaatgagagttaacttagcacaaaagccttgcccacactccctgcacacaaaggcacctgagtgtgccctcttgtgcctaaacaggttaggcttctgccgaaa

SEQ ID NO: 161081 - DNA, 1000 bp, Homo Sapiens
ttttttttttttttttttttttttttttttttttttttttttgtctaaaaaaggacaaaaatgcatttatttaatatacaagggctcaaccgaggcttaatttaaaagacaaaaacaaaacaaaaataccacagctcaagataaagagtcctatacagaaatcacaaaaaggacagaccatctaaggaaaaattaaaaagacgacacaaggacaggctgggcagcctgggtcagggctcctggctggtgacctgctttgagtaggtttcttgcaggtacttcttaaaagctgtggggtttttccagagctcggcagcatgtgtgttcaagggactatcaatgttgggttctcctagaaggctctggatggagagcagaatggtcctgacatcatacagggcagaccacttttccttcaggatgtccaggcatatgttaccctgggtgtccacgttggggtgatagcagggcgtgaggaacttcactgtgggcgcattgtaagggtagccactggggaactctagcgagagcttatacctcaggtcttcatatactgttccagctgctccatggatggtccctacccatttgaaaaggttgtctgattcagggaaggcagaaatccctttatcgccagacatcatgagggtcatcagctcctgctgtagcctgaaaaaagagtattcggggttacctgggagtctggatgggccaggcctccagacggtgcatcttctcccacctgaatctcagggggagccgtcatggaggctccccacatcaccaaggtcaggctcagctcagggtatactcaccagatccacaggacgatcctagcgagtcctcaccctccctaattccagactccctcgggatgattctggcatgttcttaattccccaggctttagcatctcttccttgcccgactcaacttctcccttcccctgtctcggccaagtcacgagggtccttgagcgtcttcatctaggcccaccagg

SEQ ID NO: 161082 - DNA, 1000 bp, Homo Sapiens
ttttttttttttttttttccagcttagaatttttattaaaacaatcatttaagttataatcgttccccagaatagaaaatagccttctatgatctggccctgataggaggcaggactcgggccctacaggaagaagtgacgtttgacatctttgaaaatggatggcgcttccctgaaagccctggaggggctggcttgggcccagggtcactgggccaggctgtctccctgccaacgctgctccctccaggggtggtgaggccccaccctgtcagtgaggaacacttagacactgcagctggttgtcagtctctgggcttttgacaaaaaaaagagagggaaagagagaaacctgtccccaaaattacaagacacagccactcatgaagtgttatgtaatgccacggggtgctatctagcagggcctggcaggtacatgaataatagggtggacaacacaggttggggggactgctgtggctgaggtggggccttgatcaggatgaacgaagccatctgtgccacacagctgcacacggctactggccaaaaggacagcctcacggacatcatgagctgggcagtgacctcatgaatggtcccggtgctgtggggcttctgcctgagagccagcagaagggctcgtaatgaaaccaccatggtcaggacgctgctctttgggcttgagacttccttacttgacaaactcccaggccctaaaatgttcgcttaaaaaggacgcagtctggccaagcgcggtggctcatgcctgtaatcccagcactttgggaggccgaggtgggcagatcacctgaggtcgggagttcgagaccagcctgaccgacatggagaaaccccgtctccactaaaaatacaaaattagccggacgtggaggtgcgtgcctgtaatcccagctactcgggaggctgaggcaggagaattgcttgaatccgggaggcggaggttgcggtgagccgagatcacgccattgcactccag

SEQ ID NO: 161083 - DNA, 1000 bp, Homo Sapiens
ttttttttttttttttttttatactcctggataacggaatttattacatttacatactctaagttcaagaatgatttactcacaatttagtaatgactttggaaagtacagtaaaatgtgtgagcagttttagttacattattatttgttggagtctaaagtactccacaggtgttttgatacatgcctgtttggggttagcaatgtacttttctggttaaacatcaatgggggttacacatttatcttctcaacaaaacaggctcctctaatatatgtaaatatgactggtcacctttttctcttaagctaaatgtgatagttctggctttgcttatttgctttctagcagcctccccatgttagtcttgccacatggtcagtcttctgtttggtaggttttataaatcctaaaagttctagttcagaaacagctctaataaaccgagcatggataatttcattcatttcttctgaggttgcagaatttgcatccattttttcagcagctgtcacaactgttgcaaaagcctctgaccagtccacgaggttgatgagcctgctacactctaggtgcagtttgtatgctatgcagatgtctggggcgatattcggaatgcagccttcttcgcttttcagtgcttcattcttgagataatagtaaggattgttgagtgcagtatggagggcaattcgcggagcagcatttaaatgctcacgaagggcatgggcagcactgaagtacaccacctcatggagaggctgtgtctcaggaggcagaaggtattctctcactagacagtcaatgaagttcacaacattttctctgagtacttcaaatttggtttgcttcttacttcttcttaactccttcatttccaataaggacttctgaagatgatagaggtctgtcttctgaagcccctttggctgtgacccagaagcatcttcttcctctttggtttctgcatcgaggctctgaaactgggccaggaactcc

SEQ ID NO: 161084 - DNA, 1000 bp, Homo Sapiens
ttttttttttccagccaagcagcagctttattagtggtgctgggttcttcccataccctacagcgtgctcggaagcattcccgagggtttctgcccaacgcctcccggcgctcgggacaacactgtgtagcattgatactggaatgatataaataaagctttggtgtgtaggtttgcaggagagagtacaggttaacactgtgatacgaaaacttcagacaacaccagctctcaatgtgaattgggtttttggccaaggggggaacttctaagtgactggacactgggcccgttgccatggctactcgaggcaccagtggcaggaggagggagtctagggctgaggctccgcgtggccctgtcgcttcgccttcatctgcaggtaccgccctttgccttcctcaaagcgcttcttctcgtcctcggtctcgggcaccagctggggcacaggcagcgacctgccttcctggctcagcgacacgtaggtgaagaaggcactggcggcccggtagcgcttctgagagctgtccacaacagggtcggcgtccaccaacacctcgatctccatggacttattgctcgtgaaggtcatgcgtcccgagatggtgatgacgcagcagggagcacttcgtgccagtgctgggagaggaggaaggagctgtgtggtcagcgccagcaggcattacgtgagcttttctgatcttgtcatgaaaattaatggcgtccacggaagctgtgacgatgttggtcttgcagtggcgtgcagccacgatcccggcgacctcatccatgagcttcatggtcacacctccgtgcacaaagccgtgcagggtgcagtctgaaggccccaccaggtggatcaagctggactggctgtagctgacagtgttcggctctgggttgaggactggctggacgatgtccccgttcctccacttggtctccatgcgctccagcttctgggcttcataccgcttccggccctcctcctcctgctcct

SEQ ID NO: 161085 - DNA, 1000 bp, Homo Sapiens
ttttttttttccagccaagcagcagctttattagtggtgctgggttcttcccataccctacagcgtgctcggaagcattcccgagggtttctgcccaacgcctcccggcgctcgggacaacactgtgtagcattgatactggaatgatataaataaagctttggtgtgtaggtttgcaggagagagtacaggttaacactgtgatacgaaaacttcagacaacaccagctctcaatgtgaattgggtttttggccaaggggggaacttctaagtgactggacactgggcccgttgccatggctactcgaggcaccagtggcaggaggagggagtctagggctgaggctccgcgtggccctgtcgcttcgccttcatctgcaggtaccgccctttgccttcctcaaagcgcttcttctcgtcctcggtctcgggcaccagctggggcacaggcagcgacctgccttcctggctcagcgacacgtaggtgaagaaggcactggcggcccggtagcgcttctgagagctgtccacaacagggtcggcgtccaccaacacctcgatctccatggacttattgctcgtgaaggtcatgcgtcccgagatggtgatgacgcagccttttctgatcttgtcatgaaaattaatggcgtccacggaagctgtgacgatgttggtcttgcagtggcgtgcagccacgatcccggcgacctcatccatgagcttcatggtcacacctccgtgcacaaagccgtgcagggtgcagtctgaaggccccaccaggtggatcaagctggactggctgtagctgacagtgttcggctctgggttgaggactggctggacgatgtccccgttcctccacttggtctccatgcgctccagcttctgggcttcataccgcttccggccctcctcctcctgctcctgccgggaatacacaacaggaggcacctcgaggaccttgtccacattcttcagcgacaggggcacataccacag

SEQ ID NO: 161086 - DNA, 922 bp, Homo Sapiens
tgtgtccctaggatttctgtgttctccttcccctttttgtctttcttagcaggggctgccctgcctgtaaagctctccacaacctgtctggcttccctgaattgtactagagaagactgtggcttcctcacctgagaccggaatctccaggaggtcactgggttctgaccatacctgcaggatatgcctgcgagagccatagcatctgagcatccacctgtggctgggggtcacagggcccacagggaacagggcctggaactgcccactgggggtcagctgtgagtccaaggtccaggagagcttgtggtctccttcctcagtcagaatgaacctgtcgaatctcagccgtgagccacactggagggtcacgttctctcctgaggtcaccacaggactgggcagggctgagagggtgggtttgttgtagaatcctgtcaccaccagctccagggggtcgctgggctctgaccagcctgcagggctgtagtagtaacagcggtatctccctgcatggtgctctgtcatggatgggatggagaatctggccttgttcttgggctccagtgggttctgtgtgtcccagggttctgggcttccctctttaaccagacggtattcctgggcctccagggtcccctgacaccggatggtcacagagttcccccggctgatcacagagcctggctcagcccagagggtggctttggagaggttccctgcctgcacgtgggtcctggggcccagactcagcccgaggcagagcagaaccatgagggcagggctcacggcgtctcctcccactggctgcagctgtgcagatggatgagaccatggtgccatggtcagtgatttttcagccctggagatgcttcagggaagatgcaggtccatgccacaggcagactcagatcagcagaga

SEQ ID NO: 161087 - DNA, 1000 bp, Homo Sapiens
ttttttttttttttttccaatagcattgacttttattcattcatgttaagtcacctgaaatgatatctgttgcatttaaatgctcattaatgtaaatggctgaacaaatccatttcaatggatactcaatatcccacatagataagtcacttcaacacagcctcatgacaactcccacaccaaaacagtactttattttgcaaattttgacccattattactcccatgttgttttttttcagctgtcaagtgtacaaggtgaagagaaatttcagttagacaggggctgcacctggaaaataaatttcttaaactccataaacacatttcaaaactgctgggtcccaaaagtccatctatgaactctagggctgccagtatcatgtgcagcacattaaagctacactatccaaatagcttattaattctgcataaatcaggtcaagcaatgtgtcaacctgtaacagactgtgcactttaactgaacatggcaaaatattcactctttcgaactttacatcatcatttgatgtcaaacaatgaagcaaatcccaacagtatatacaaaaaacagctttgcatttacaaaagattgtttcccatactgattaatccaggcagctaactcattggtttatgcaactttattgaagaaaaataaatcaattactagcagagctattagttgatcactcatccattgacaacttgcatcatttattcagtgctatattaaacagtgtattggaagatagattaactaatagctccaagcctcctaacaatttaaatgaaaattacaaaatgtttgagaccctattttggaatacaaagggtgtttgacttccaatttccattctctgtagaacaagaacaggtcattcctttattgacatgcataaaatacatcacattttctgttctgctgatgctataaattcaataccaattctccagccacatcagttatgagcataaagcatatcatgtaacctcaaat

SEQ ID NO: 161088 - DNA, 1000 bp, Homo Sapiens
ttttttttttttttttttaatgtaaagtaagtttattaaattaaataagatcttgaaaatatgtatgatgggtcctgggcaggatgttctttttcatcaacgtaatctttctttaggagaggagtactcatttgcttgcaaaggccataatctgttctttgagtggagacactgcatttgtggcctgcaagccccacgtcctgagcaacacaagcggggaggcactggtagaatagagcctttttagtaagtctgtagcagccagaagagcagtgttgtgacgctgtctttctgtttcataacctgtgaggtggctcacggaacctaagtccttcccattgaaggctgccgtactgaggtgatgggccaagctggagatatccccaaagcccatgttgacaccctgtcctgcaagcggatggactctgtgggctgcatccccaatgagcgccacccgaggcctgacgtactcagcagcatgtcccaacccaagaggaaacagaactcggcttttggcatccaccctggctacgcttgggggcagctggcgagccgagaccttagtgggcttcagaaggctgacagcatactgcagcatggcaccagctgtgtcgatgaagtccgtgtggtcagcatcactccaaaaggcagagttaacggcatccacaaatttttcctcatccatgctaactagctctgctgcatgttcatgggacgtggaccaaaccaaggaactcaaggtgtctgagagcgggagcagagcaataggcccagagggaagaaatctctgccaggctacgttgttttctgtggcctctgataaatgcagagtagccacaacagcagactggtcatagttccagctcacattctggattccaacagcctgccgtactccggagttgtgaccatctgcacctatcaacaatttggtctggaaggtgctgccatcacctagggtaatatgaacccaagggctggagtcggccataggaaatgg

SEQ ID NO: 161089 - DNA, 1000 bp, Homo Sapiens
ttgtcctcattctggtttttaatggtcaaggtgacaacagtgtacagtttttccagacccatatgtaggttccataatctccacctgctggagaaaacaccgtgacagatgccattgccccagcaggccactgccggtgtgggaactttgggatcaaaagcaccaagccaagtcccttgctcaggatgggtcttggttgaaaccacaagcccttctgcagttctaggtggatgtagtgttggttcttggctcattgcaggggtgaagcaggaaagagaaagagactggtgaggcctgcttggaaagaggattgaggcacattacgattccaaaccaggagatcctgagtcagcactgattctgtctctggtttgtttaatacgggaaagggttccatccaagagcccaataggcctcctctcccaaacctgcatagcaatcaaacttataggggtggtggagggtctttaccaggctaggactactgcctatgtttctgcaagtcacaagtcagcaggtcaaagaacaagtgtgaagcagaacctgctaagcaaagccaagtagtgacactcacttccaaaacatacccagcagaagcctcctgcaagtaccaacagtgacaggtgcttgtagcacagaaaactcaccccttcttcaacagttgatttgatttgccacacatcactagtgaacagctcggtggcattttgactgtttatcttatagggcaagataccctgattctgaactcacttaggatgggttggcatgagctgtatcctagtgaaaaaaaatatcccacctacctcctaggtccactcaagacttctgcacgtggagtaaatcaagccataatggagcccctgagaatccccaggaggcgagcagtctggatggtaatggaggaaagggccaggcaggcaggtggaacagaatctcaactggccaagacctggcaagattagataccccaggggttgagtaaaaggagcacagggaa

SEQ ID NO: 161090 - DNA, 1000 bp, Homo Sapiens
ttttttttttttttttcatgaaacatgccaacatttatttgctcattggttaaatattctctacctattctacatggaatgccaggaaaaccagcagagggcttctccattatccagaatctgttaggaccacttatatcatgctctggggtgcaaagaagagacacaagaaagaccatcccagctgcctcaggcttccaacctaatggtagtttcctatgtttggttcaaatgttcatgccaagttggggaactgaagacacatgacaaatgagacttcactctcttttgagagggaagctgggagtaaaagcaaaattgaatcaatcctgggcacagtctggcctttttcacctcccaggcctcaagagtgaaaggggtacgagaagacagggcaggtggcctctggatccgtggcaaacaggagagggaacatgctgagggaagccccgttatttagactcttcaaactttaggatgtgcaacgccgagttcaaagcaccagtgattttccctttgaggattcgatggacaacctcatacgaactcaaaatgtctttctccagcatgaatggctgagtcaggggtgggatggtccagaagtcgtcgctgtctaggctgcgcagagactgcacagggatggtggccaactgtccaaaatcaatgaacatgaccacagcccaggtgtccaccctgtccagcacccaacacctgttccaggcgtgtccataatcccccaggtggtactctgccagacagcgagtcccgcgcataacggtggagccctccaggtagggctgctgctcctccgcctgagccagggtgctaaacagagcctgcatgttctggtgcagagcctcagtgatgtgcatggcccagaaaaacggggtcttcgggacgatactcgtcaccagcagccccgcctccccacggacgctatggatgagtgccagccagctcaggtctcggaagcattccctcaggagcagcaccaggaagg

SEQ ID NO: 161091 - DNA, 1000 bp, Homo Sapiens
tttttttttttttttttttttttattttaacatgatcttttatcagtgattgaagcctaccaaagcattacataccacccattctccacagtttgttgcaaagaccagcaaacactggataactctagcagcttctaaatgtaatcatttccccctaatttctctcaacagggcagtgattctaaaacctttttgtatctcaccactttcagaactattttgtacacaaaacaagtctttcagctggtgtcttggacaggcactatcagtatcaatcaatggaattcaagctgttgaactaggacatcttaatattttaacccgtgtctaagtagctggggaatgtggtactcaggaagctgaatgacctcaacatatatccataattcctcactgtcacttggaaattgctagcagaattccatagagctaatgtctatgacaccctcagtggtcctgccctccaatctgcagtatgccatattaatgattttctcccaaagcgatggagggaactgtgccccagtccaaacatttaggacagattttcgataggttaattactgaagagggaaccaaaaagatggtaaaccacaattaaattgttcagctatgcttcagaatcaggaaacactacttatccatcattctccaaaacagcaaagacggaacacatgtatattgttaagtcttttctatccttccctgtctatcactttattatttccttcattcttttagtagcgacagtctctgggctagaatgctcatatactattttcggctttggctttttgtcctagatagtcttcttattcacttttccccaaatttcaatcagtaatttcatttagcaaatgtttaccaagaacctactggacataagatgctcagccagacttactgggtggtactctagagaggcaaaactccaggttggttgtcctacaaataatccccaagaaaatgatatgaacacaataaatgcaatgaaatctgc

SEQ ID NO: 161092 - DNA, 1000 bp, Homo Sapiens
ggagtacatgttcagttagggtttattttggtatctgtcatagaaaacccccaaaaccagcagcttacacaaggtagaagttgagattggttctccccttctctctcccatttaaataagtttgtgctgatatctggctctgccatcatcagggaaccaggctcctgtcatccctaaaggacggcactcgtctgtacacgtggcagtatggctgccagggctccagccatcacacccacattccaggaaataggaagggggaagaaagggtgtatttgtcttttaagaatccttctagaagtgtcatgtaacatttccacatacatttcactggccagaccttaactataagggcagctgggaagtgttgtattttaactcccaaagtgctaggatcacaggcatgagccaccacaccaggccaaattttttaatttttttgtagagatggggtcttgccatgttccccagtctggtctccaactcctgggctcaagtgatctgccggcctctgccttctacagtgctgggattgcaggcatgagccaccacacctggcctccttatctttttaagtcccggcacaaaagtcgcttctgtcctccatgaagcctgcacactctggtgtggctcctgtcgcaatctggacctctctccagttctagagtgttgtctgcttttgtgttaattcctccgtcagcagtgggaggagaaccatgtcactcgtatcttgtctctctggtgcctagcagagtctgggcacaccgtggcactcaaacataccccctgaatgagtaagggccaaccttgaaatacctgggagctgtcatcgaataccacggtgtcatttgtcccatcccgtcacagatgtgaaactgcaggcctggcatagataagtcgactcccgttggttacctagctgaggccactctaggagctgaggccgaaaatcaggagaaaaagaaatccagtaaaaaaaaaaaaaaaaaaaaggccaggc

SEQ ID NO: 161093 - DNA, 1000 bp, Homo Sapiens
atagagttgtttgagctccttatatattctggtaattaatcccttgtcagatgggtggtttgcaaatattttctcccattctgtggttgtttcctcactttgtttattgtttcctttgctgtgcagctttttaacttgatgtgatcctatttgtccatttttgctttgcacgcttgtgcttgcagggtattatcaataaatctttgagccaagcatagtggttcacatgtgtaatcccagcactttgggaggccaagatgggaagatcgcttgagcccaggagttagagaccagcttggtagagacctcatctctacaaaaaaactaaaaattagctgagtggtgaaatgcacctgtggtctcagctactcaggagtctgaggcaggagaatcacttaagcccaagagatcaaggctgcagtgagctgtgttcacaccactgcactccagcccaggcaacacagcgagaccttctatggagaacacagccagtaccagagtttatgcagagcgtgggtgaagctgttgatctctttacaatctgcacagcctattgtgagtatttctgggcaggcagttcctctgcctgtttcaggagaggtttactgatttgaggcttatatgttaggtctttggtttgggtctcattttaagggttgtttgggggctgggtggtcggccttacacaggaagcggacagacagtggatgaagtcgccgggtgtggtggctcacgcctgtaatcccagcactttgggaggctgaggcgggcaaatcatgatgtcaagagttcaagaccagccttggcctcccaaagtgttgggattacaggtgtgagccactgcgcctggccagatttaagtctttaatccattttgatttgatttttgtgagataggagtctagtttcattcttctgcatatgaatatccagtcttcccagaaccatttattgaagagactgttctttccccaatgtatgttcttggcatctgtcaaaa

SEQ ID NO: 161094 - DNA, 1000 bp, Homo Sapiens
ttttttttttttttttttttttttttttttgatgtaaatcaaaaccaaagtctgcatttatttgcggaaagagatgctacatgttcaaagataaatatggaacattttttaaaagcattcatgacttagaaatgtgtgaattataattatactcatatacttattataatcataaaataacctgtagtaaaaaaataattgcacatttaaaaataattaaagtggccaggtacgatggctcacacccgtaatcccagcactttgggaggccgaggtgggtggatcatgagctcaggagttcgagaacagcctggccagcattgtgaaaccctgtctctactgaaaatacaaaaaattagctgggcatggtggcacctgcctgtagtcacagctactcatgaggctgaggcaggagaattgcttgaacccagcaggtggaggttgcagtgagccaagatcgcaccactgcgctccagcctgggcgacagaacgagactctgtctcaaaaaaaaaaaaaaaaaaaaaaaattaaagtgtataactggactgtgtgtaatacaaagaacaaatgcttgtgaagaataactcatttactctgatgtgataattacatgtcatatgcctgtatcaaaataatccaaataagccatgaatagatacacatactatgtacctacagaaattttaaaaaatttaaaataagaaaaataatacaagtttatatgggagcaatattctccaatttatttgctgtgtaaagacactggaattagagattactagaaatgtcattcaactatgttccttgccagtatgaattcgcttgtgtacagtaagggttgagggccgattaaaagctttgccacattcttcacatttgtaggatttctctccagtatgaattatcttatgtttagtaagggatgaggaccaattgaaggctttgccacattcttcacatgtgaagggtttctctccagtatgaattctcttatgttta

SEQ ID NO: 161095 - DNA, 1000 bp, Homo Sapiens
ttttttttttttttttccaagtcaggtcattttatcccacagagttctcagggccattggcagtgatggttgacatgaagtggctgggattcagggcccgctggcgggctgcttctcggtttgcgtagagggcctggccaatgaggtactcgctttcctgggccacatctgacaggcgcaagtcaaattccaggagggtcttgttgtctgacatgccttccaggagctgcttcccaccgtccagcccgatgtggttgcaggacaggttgatgctggtgagtgtggtgttgatggcgagcacctgtgacaggagtgtggcggtgggctcagacagctcattgccaccgaggtgcagcgtggtgaggcacttgttggtctgcaaggcatgggcaagagcctggccaccctcatcctcgatgcagttgagacgtaggttgagggaaatgaggttggtgttgtgtgccagagcgtgagccagggactgggcaccgggtgcacgcacctggttgttagccaggttgagcacacgcaggcggctgtggctcagcagcttggcagcgcctcgtgcaccacggtctccaatgaggttttgtgacaagtccagctcctcgaggactgggtggtccagaaggcttcgaattatgatgcgtgccttgtcatcatccaccttgcttcgggtcagcttgaagatcttgagggtgtggcatgccttgatggcggctgccaaggagaggcagtcgcggtaggtgaagaggaagagattccactcgaaattcatgccgcagtccttgacatcgtacaccaggtccagctcctccaggtggctcaggccagctaccagatcgcccagttggtagtggtcaacggtgggctcctccatctctccctcgctgcctgagtcggactggtcgcccggccggagctgggccgggagctgcaccggcggaaggaactgatcgacgtggaccctgcgcacgtaattccggcagagcggcagcag

SEQ ID NO: 161096 - DNA, 1000 bp, Homo Sapiens
ttttgaacttgtgaaaatcaataaaatgatttattttatatatgcaaaatcaaaatctctttgtacactttaatttttgcaaattcatacaaacataacaatactgctccatataaacttttgtataaacattaaaggaaatatacacatattttgttcttcttgtgcttccaaagcacagaatgtataagtccatctgaagactttctatcatcacatgcaagaacaaatgtcagaggttgggggcagcctcaagtgcactttgtaatgtctctagacaaaagagaagagagttggaggtagattgtttggtgactctccctgccccttcccacagagaaataagttacccaaatagcagcttcttacttctttgattcaaactatcctgaatattgcatggtttaaaaggcacaactaggaattgttgaaaactttgttcagcacacataagattgccatttcctttctgtacacctattctttctgaaggacacagtaagagcaccaagttgtgctccacttgcaggtggcccctcgccactctgagaatgcctggaatggcaaagttcaagtgagtgacctctcattacccgtggtaggggcagtggtgtttaccgaatttagcctgtgaattaataacatcagcttcctcaattgaggaaaacaaaacaaaacaattcatactttaaaaaattattaaggcaaaagcccagctttcactgccagataatcataaaattcaaaagccccactgctgcttcttagcatctggaaagcaattcccttgactcaaacattccaggaggcttcaacaatatcctgttccatcctacagcacagaaaacttgtcatttttttctcactggtctttgcactaacatgatgatctgctgttgatgtgactaatgttgttgtgaaggtggtgggaatttattttttctagtaccttctcaaggtactgaattaggactcgtcttttaaaccttgcggcttcctt

SEQ ID NO: 161097 - DNA, 1000 bp, Homo Sapiens
ttttttttttttttttttaaactatttaattcactcctttattctgggatgtatattacagataacacaactcacaaatataccatcagacattgaaaactaaggccattctgtgagttatttttaaaacttggtgttttgcacataatgatcttaaaaaaaaatgaattaccaaaaccaagattctcttctaaaatgaaaatttaatgcaggtacaggataactttagggctatatctaatctgaagcttatcaggtagcaaaaccattttcgttttctacagcataaataacagctctaaggcaaccactacctcagcatgaagctcatttctccacgttagagtagtgtttacctgctacagtgaccagtgtttagagaccatttccctttcagtagcaaaaagagactttacctaagaaacacactacatactacagaatccttggaacaagaaacagaaagggagctgtaactaaggcactgaaagcacattatttgtataaagaaatgtaaacaatttaacaccaacaggctccctccgttggagtctttattgtaaatgcacacaggggcatcatagtcagggctagagtttgaagtctgggtgaaacaaatgtttctgcagagttcagagtcttggctgccaatatatttctaacatggtgctgttgaattaactatttcaaagtgactcaagtggaagctggtatttcccttgaatctgagttttaatagcattaacaaacaaggaagaattttataggagtcctaaaattacgggctctttctaacatttatttgagtcttttatcaagttcttctaatgaattttaggattattttggcttatttcatcaaggaagtttggtgtaagaacttgttacctaatgagtgcccctccttgtaagttcatatttcaagttacatggttcatgccataaataaaccacacttgctttaacatcgttcagaatggtacatttaacaattggacat

SEQ ID NO: 161098 - DNA, 1000 bp, Homo Sapiens
tttttttttttttttttttagaaaagtctctttttaagtttttaaattaaaatttcgccctggtgagatgggattctgattcgggaactaaacccaaaggcaggctctccactttggacctggacacgcagcgggaggggcagtcaagtcccctgctgggcagagcctggcctttgaccaaagtcagctcctcagtgccacatcagccctgcacattcagcaggagacaggggtgatgagctatggggccacaaccagcaatcagaggtggggaagaggccatggggagagagccctgataccaagagggccttccacagctttgacctcaggccctcctgggacctgcagctgctatgtggctgcccggtgactgcaggagtggtgtcctcttccagattccagaaggcatggctgttaaaggaggcagctgacagatgccttgtgcccacaacatcactccatcagctctgcagcatggcagccctacccccgagcaccccaggtgtgccaggcccattctcacgcacattagttatatttatctattcatatatattatagttatatattaaaaacagaggaaaaacttgcctgaaaaactcctgaaggacccacgtggcccaggaagtttactgtccccccgacccacaaaaattcttttataaaatcttccagtgcgatcttcgggaaaccccctgccctccccggctcccccctccctggccctcctgtgtccccacaaccctgggctgcccccagctccagcccagcgcccggcggcgtccagtctcatctctggccgtccatggccgccatggctttctgctgggcgcccccctgctgtgctcctgggggccacgtgggctgtgggcggtggaggtggtggaaggtggtgggggaggagggcgggatccagggcgcctggtggctgggcggggacgaggcccagaaggggctgaagtttgcaggtggggagcaggctgcggctgtcatgggg

SEQ ID NO: 161099 - DNA, 1000 bp, Homo Sapiens
gcacactccgaaactagatttattattttttaatttacaggatagagatatttttcaaagactcccaatttccatgtgacatgcaccccttccccagattccacattactcataccatcttcagcaagccacaagttctggtatgtctgtttctcttaccagtatttagaaagaatatcaaactagacacacgttgcaactacagacttacgactcataggtgcagtcagcatgcaattgctaggacgcagttttaggtgggtaggccttgagtgagattccaaccacattttaagtcttagtcctagatctactaagctgtggtttaccagttcttggtttacgaagatactgaaccaacgtcctccagacaaataagttattattaaaatactgtctaattaaagatgcgctcctataatgaaacacctatagaataattaaaggaaaggacccatgagattcataagatattactggacctcttccatattcccacaattctatagaaggcatgtgagccactcaaagtgagccaccagaggagaacacatttggcaaatgtgaatatctttaaatttacaacggttagtttcacaagccatcatttccatcctgatttagtcaatcaatgtcaggtccgttttggtggaggatgtacacaaaggccctgaagagccactgtctaaaggtaaagtttgaggccaggcacggtggctcaagcctgcaatcccagcactttgggaagccgagacagatggatcacctgaggtcaggagttcgagaccagtctggccaacatggcaaaaccccgtctctactaaaaatacaaaaattagctgggcgtggtggcgggtgcctgtaatcacagccatttgggagtctgaggcaggagaatcagttgaacccgggaggcggagtccgcagcaagccgagattgcaccactgcactccaatctggttgacaagagtgaaactccatctcaaaagaataaaaata

SEQ ID NO: 161100 - DNA, 1000 bp, Homo Sapiens
gcatgctgctgcatggttttattcctcatgggtagatgaacacacactggtatatggggaaatcctcacccgccctccgctgctcttctggaggtctgtcctcttgctttcctcctctgccccagcctggtgctgccccaagccctgccctggcaaagagagaactgtgcacagcggggaggctctccaagccagaggcctcgcacgcagctgaggaatgacgcaggggcctgcaggcagctcacgcggagacaggtctgtggggccccgcgtcagaacccacttcacatcccaaagccccacctgctttgatcttcaatgctgggctcaatgtcagatctggctgaccagaggggctcaatgaggctcactggctcttcatgcaccctgctgtggcctgagcacgtccccccaaaacccacctgcttaagtcctcacctgcaaggggatggtattaggtggggcatttgggaggtcatccggtcacagggcaggggcacagcctcatcatgggaccatcacccttacaaaagaggttgcatctactggtgctttcatcttgggcttccagcctccaaaactgaaactgatttctgttgtttataagccactaggcttacaatattttccttctttttttttttgagatggagtcccgctctgtcacccagactagagtgcagtggcacgatgtcagctcaccgcaacctccgcctcccgggttcaagcgattctcctgcctcagcctcccaagtagctgggaccacacacacccaccaccatgccaggctaactttttgtatttttgttttttagtagagatggggtttcaccatgttagccaggatggtctcgacctcctgaccccgcgatccgcccgcctcggcctcccaaagtgccggggttacaggcgtgagccactgcgcccggcccaactgaacggttttataatcacaaggggcctcctggcaggtcactggcaccaggagccacgctggtg

SEQ ID NO: 161101 - DNA, 1000 bp, Homo Sapiens
tttttttttttttttcttcaaatgtttttattggatttaaaattcatttaaggggtatacagatatacaactagtttgatcagctactaatatattttggtgtccctttatttttgtacccaagagccagttcactttttctccatgttcaatatttagctttggtaaaatgttgccatgttcttcctcatctgttactgaagcgttagtatttccaccctgcttggtgcaagttcctcttttaggtttcttcctgtgggtacgttttgtgggactcttctgttttttctcaacttcactgtttgcatcccacaacgtgatcttcccatcattccctccagtaagcagcaaataggattctgggagaaagcagacctgggatacccctgaagtgtggcccttaaatcccagttcctgttcacacttaactcccatcacccgaaagattcgaaccttaccatcttctgcaccacaactaaaaatattaccacacgaagccacagagatagaatgggctagggcagggtttaagagctgaccaggtgactgtgggccttccatttcttctgtttcatcctcctgtaaatttgtaatccagagtggtcgggctttttgaagactccacagcatcacctgcatatccagtccacatgacaccaggctctgaggcctctgaggccgaaaagccactgaggagcagatattggaatgtctcttcaaggatctgataactttcttgttttccaagtctaggattttgattgccccagagtcgtcagcagaagccagcaggttttccgtttgattcaatgaaagacaattgatttcttcttcattcacatgaaaatggtccaaggaatctttgagggacctgacatccagtacactaatggtttctccatgtgaggcatagagcttggtgggacaggagggagaaaataagacactggtaacatcatcagccccttggaaccgcgtgtgtcctaatggagttccatct

SEQ ID NO: 161102 - DNA, 1000 bp, Homo Sapiens
ctgattcaggatgttcactcctgtgttatttattatatagaaagatcaaggggactggttaaactagacatatcacatccagccgctgctaaaaactaaagggaaatagtaggtgacaaaagcaggggtcctgaacagtggtgggctcaggggattggagttttttcctttatgtttttctgtattttccacaatccacgcttttcattgccattccatcagatgatgttaaggaggaacacagatccagtcacctgaggggatacttcctcactgccaccttctcagggtttagaccaacatgtgggttctagttcccccagccccaaagctgttccctgcaaggaagagatcagtctttgagcaaattttggctcaagactaaagacacagaaggcgaggctcctgcatgcacagcacacggccatctgatcctgtgctgcagtggacgctgactttcgccacgccgtcctctctggcccagcaccggcctcctggcctcagaggagcagacactcccagtcccagggctctcagggtctcttgtccctgggtccattctgggacaggaacttctcggttggaagagaggggctgtacccctcgggtggtggttctcaatccagggcgcaccacagaagctttgaaagacatcaaaggctgggctccacggccgccaagggaatccaaatctctgggccagggccaggggcttgagaaccccagccctagggcagacgccagccaagcatgaaggggctgggacttagcaagggcttatcagcactgacagaagggtctagaagcactagcatgttgggcttcagtgataacaatgaccaacatttattgagcacctaccacactgggtaatcctcacaccaccctgggacggaggtgccatcgctttaaacgtggggaatagaagaaacttgccaggaggtgcagagaggaagtggcagcgctggaattcaaacccaggcaaaggagcaccttttac

SEQ ID NO: 161103 - DNA, 1000 bp, Homo Sapiens
ttttttttttttttttgaaactaacattctttattttccttttattttttaaaggtcacctttacaaagtagcatttaaaaataaatccatctcacagctcaaagaaatttctgacagtactgccctcatgctggtcagccattatttactgtgtgtctgccacatgtcggcacatatatatagctcttcctctcctttcctgggagcaaacccttagcgtttcttccacgtaaactttctgcgggctccctcttggcctggcttcttccgttccctcacacgtggatcagtagtaagtagtccagcttgtctcatccactcgacctcgtcctcggtgacaaagctgcacaaggcttttgccattgccagtcgtattgctccagcctgcgctgacctcccgccccctgagactgtgcaggtcacgtcgtgctttcccagccggtcaacaaagtggaaagggaacatcagctgttctctgtcctgtgtgatcgggaagtaaagctggtaatcaattccatttacttttattcttccacttccatgtttataaacaattgcttctgcttttgcagtctttcttttaccttcgcttttgctaaaggccattccttgctcatcatactgtacaggttcaatcagctgtttttttgattcaagagttacacttcttcgaaacctctgcacaaattcttcctcagcagcaccacactgcgatgtcaataacttttctagcagccgaatgaactgcatataatctagatctgacagtttttccactaacatttcttctagttcctccttaatcagccatctgctgccaatcacgtctctggttacagttttttctgggagcagacttttggcttgcaagtgactttgatgtttttctaaattgagtaacattccatatacatcatgcattaatgaatagtatgactgtttgccagtatagaagagatagtgaaatggacggccatcttctccccactggattgctct

SEQ ID NO: 161104 - DNA, 1000 bp, Homo Sapiens
tttttttttttttttttttttttcaatgtcaaaaacattactttatttttctaggatgaaatgtcctattacgtacaaaagaattgctgtttagaatttgccacaatttgttaaaaacatagcaatctattgcctacaggtaggaaagttcttgctgcaacaaattttaaatgattaagcccatatatatttatatatatgaataaatagtacagaaatactgtgacgtgatgagatgcagaataattttataattcattaaaatgtagaattcttgcatcagcacagtgcatacaatatgtaacattttttaaaaaagtaaaaggacaaaataacccatatttaactacttccatcttaatactttaagcaaaaattttttcatgttttcatattgagcgattagtctttagtttgtaagcataagtttaagtgacatctttatgtacaaaaaggaatgggcttcattagataaaattaacccagaataacctgtacacctgagcctgtaataagaaagaatcgggaactgtagcaacatctttcttttaagaaactgaggtctgggaaaggttttgcatagcagggaaacattaaaaggaaagaaactttgaaaaacaataattagataaattccagaagttggtaggacaaagctaatatgagttagtgcaaaatctagtaaaaatttttgcaaagctgcataatccaactatggcagattttatagaagctattaccacaatgcagtgatacaacgtgtaagaacactgaaaggaaaaacatgcaaaatacatcttcctctgtggtttccattttctcgctactgtttacactacttttccttacgtggaagaaacaaacaaaccaacaaacagaaaacaaacccaatcaacaaataacacagaggatgaggtcatctaaaaaatgcccttcataaaatataagtagctgtgtgtaattggtaatttgcctggtatcacagaatgtacagatgaag

SEQ ID NO: 161105 - DNA, 1000 bp, Homo Sapiens
tttttttttttttttttatttgaaaaaatgttattttatttgtacagttaaaaagttatacatagaaacttataatacagttctgtaaagctgaaagaactgtcaggaaaaagggagggtgttactttttttgattgatcattaaggaagttagaggaataaaaacacagtaaaaggtttaaaacattaaggaacatttttcaggtataaattttataaatacaaaacaaattcacaaattactctcaatactaaataaatatctagttaataaacttggacttaatacctgcagccagcactggtacagcacttcaaggttataagattggattcattcatgtgtagtgttgaaagaatgtactcaaacaattaattaagacataaacaccttttctaaactgtgctatagcggaagactcatccatgtagataactctcccttaataccaccactttaaaaaaaaatcatcaataacaaaataaatcgtgggtgaaaaaatattttccaagatctctggacacatgaatgatctcaaaaatgtacaaaaacctctgtaaaccagtactgtatccaatacatctatcaaacttattagatactgaacaaaactgtagcaaaggatatctttcctacattctcctgagtgcttaatattaaaattgagaatatagtgcaggccacactttcatgtggtcaatcaattgttattgctttatacagcatgatttaatgttccattttcatgaacaatttgtttttcttcaaatatatcctttagaaggacaaagtcagattcgtgactttttcgcagccggtggtgtgctaacttggtccacattactgggtgtgacgtggagtccaagcttttgagcctgaatatgaaaaaatgcttgaagcctagttccagcttttgcttcacttgtgttacgagggttgtattcaaagcagttcgaaaacattaactcaatgtcatcaataaactcagatgctaattta

SEQ ID NO: 161106 - DNA, 1000 bp, Homo Sapiens
tttttttttttttttttttctgcccaagtaactttattcgtgtcttctcaaacatttcagatcaaataatgccattttctaatcttgaaaccagcaagattagaaagagaatgaggccatcctttcactcagactttcccagttactcaagattgtattcaggaacgaagtcaaactcggcctcacttcttaattagaataaactagaatcaggtccattgcataactgctaattgttttgcaccagggagccacaaaggaagctaaaactagcctttctaagttatcctaagtttttactatctaaccagcacttctgattttttttcccttaaaactctaaagtacaggtgttgtatgtctgccgcatctgaaaggctgccccggaaatcagagcctatctagcgggaatgtctgggcagtcacccccatcctgcgcgcagatagcaaagggctgctggcaggtgtcagacacacggtaccgcaacagcagtcccgaggtctgagattctgaatgtcagcaggtggctggagagtatcaccagagccactcaggaaccagccatgcggaatggctgggtttcttattgaacatgaaatgcttcctctttggcctggactgttttgctaaaattgttagtgggttttggggcaggccagtgtatgggaaacttttttttttgttggggggggcgatggagtctccctctgtttgcccaggctggagtgcagtggcgcaatcttggctcaccgcaacctccacctctttcttgggttcaagcgattctcctgcctcagcatccctagtagctgagattacaggcgtgcgccaacaagactggctaagttgtgtatttttagtagagacgaggtttcaccatgttgggcaggctgatctcaaactcctgaccttaggtgatccacccgcctcggcctcccaaagtgctgggattacaggcgtgagccaccgcgcccagccgggaaacatttaccagggaca

SEQ ID NO: 161107 - DNA, 1000 bp, Homo Sapiens
tttttttttttttttgcaacaggcttttattacttttttttaaaacccatataagaaagacatttaaaaagaaaatatcctggaaacaaacacttacacactgagcaacacaaccaaagaaggcactaccagcagttactcccacctctgggagggaacgggtactcgatactatacttttttcagaggtttagacctcagcataggccttgggtctaactgtgctttagtaaagtctgaattgtccaataattttctcatttcataaacacccttatctctttatatatagctatatgcctttatgtgtatatatacatgactttttttttccttctcaaaaataaaatagccatccccatagagggaggttctcagcagcattcacagcggttgcagcaggagccatgccttctattaatgttagagacatgcaggacgaaggaaaatgactctccacctgctccctttaatatacagcagggagagagtttctaaagggagggaagtgataaggctgagcatgagatggctaaccagggtttttgtggtttaaaaaaatcttagagttgcgagcttgtgttgcctttgaagctctggagactatgcacagttcatacgacgaggggtcagcattccttctgggatcaggggcagtatggactcagcctgggtcagagagggaacttctgaagctacacgaacaagcttgggcttgaaccgacccaagagggacttgggaaggcagaggatagcaaagaaatggtttctcagaggctgggttggaaaaccagccctgctttgaaaattacaagtccttctccctctgcactggagtgtctctgcagtcctggctacttgttggaattttttgactaatttattttaggattcagcctaaacaagaagccagtgcaaatgtaagtcaggaatttgatcctccctgtcaatgtggtctggtatcactgattggagtcaaaactcaggcacccagatggga

SEQ ID NO: 161108 - DNA, 1000 bp, Homo Sapiens; identical to SEQ ID NO: 158166

SEQ ID NO: 161109 - DNA, 1000 bp, Homo Sapiens
ttttttttttgcagggcagggaaaacacagaactttatttcaacagtcattaggttccaccacacaacagggacaccatgggattgttttttcatttaataaatacaaatgaataaaaatactttattttgtcaagagactgcctctcctccctctcccgatctcacagaagcctccaggcaattgtgtgcccctccagggcctgcacccacagaccccgtctacttgcacaaatgactcttctttacagagagggctccatctcatttgcctgcaaatacaacataggtataataccgctcctttcccccatctccttccaaatacgagttcttgccctgcgttccattttttttttttttttttttgagacagagtctcactctgttgcccaggctggagtgcagtggcgtgatctcagctcactgcaagctccgcctcctgggttcacgccattctcctgcctcagtcttcagagtagctgggactacaggcgcccgccaccacgcccggctaattttttgtatttttagtggagacagggtttcactgttagccaggatggtcgcgatctcctgacctcatgatccgcccgcctcagtctcccaaagtgctgggattgcaggcgtgagccacagcacccagcctccaaattttaaatgagccccttgtgagaaggaaaagaatctgctgtccacagaagccaggcgtggagctacttcaaccagaaactgtcacccatgacactctgtgtgggttcagtcacacagaccacgatccattatggaagggagggagaaaaggatcacatcaaatctactgtatgcctcatagaccatcccttatttcaaaaatagaaattcctatttaaatgccgcccgtgtgcgacaggcctgatatttgcttctgcatgtggcagatctgttattgcttacactgtggcctcctggcctgtgctgctcagctggccctgttagagaacatgggaaccacatcaaaa

SEQ ID NO: 161110 - DNA, 1000 bp, Homo Sapiens
aaattctttgtctttttatttaggaaaataatcatgctaaaagcaagttgtactttatatagattttcaaacaaaagattgattgtgctttttgaataaaaaagatagggtatcttccaacctcactgacttaaaccttgtggaatacagcacttctaaactaaaaacacacgtcaaaaagaaaaattaaataatcccagtgggatgctcaaaaatcgtctttagaaggttttaggattggctaattctgctattatcttattggctgcggcaaaaaaagaacacagagctgctgtctaaaatttctccaaactcccctccgagttcagcaggcaacactcagatttgaaagaaactctgcagcaacctggacatatggttagctgagtcgacatttgattagcaggcattttaaactgatttcctcttaacatacgcaggagagaaaacattttcttcctgcagggcatgttctactacatcatatttctgaatcccttcttcctattcggtcactctctgaaaaaagctggtttgtttttcccatgtagaatcactctgggtacaagaacctttatttgttccaattattatttgttttaaatttagaacctgtgttgggtctaaaatacccatttcccactcccacaagcagatgatgaccaggctgctgccaagagcagcagaaaaagggaaaaccaaaccagaacatgaaggcaagtacccagggctttgcagtcaccacgtgggtcgtcttctcaagtctaatggtccatgagcggcttgtccaaggaggcggccgcctcttggtaggtgaagatgaaatctgcaacctttctaagcacaatacacacacacacacaccaaaaaaataacccccccagaaacacaaccctcatatttaaagctcttaagttcagggtagcggtctcaaactgccaaacactaggatgaggatgtgactctgcatgtgttttggatgagaggaagcatcgtccca

SEQ ID NO: 161111 - DNA, 1000 bp, Homo Sapiens
ttttttttttttttttttttttctttcaactcctttattaaattggttgcaaaaaagatatacattcttatattgacaattcttgtcatgaataaaagcatcaaaaataaggcaacagcaagatgtgcttcacatataaacaatcatgttgtaagaataagaaacctgaatccctgtacaacaaaaagattaggaagcaaaatgtgaataagcttgtattcagaatatacctatatgtgtgtgcaaagacaatacactcatcatatacctcacttaggttcctttatgatgcataattccttaatcattcatttgtgaaacaagaatgaatattaagaaacatgaaatccaaattgcacttattttcacaatatcaatgctaaactcaaaatagcaacttcattgactctcaatggtaaatttcaaacatggaaagcaatcttaatttttttaaccctttgactagggtctgtaaaaaacggtggattattttactgtacttacaaagaggctgggtctcagcctgcacttaaacagcatgagcaacaaaggacaggaaacaaatatcactaagagtaatgcccatacatataaagatatctagttgagccacgttctacttacatagcaagcctattaaaccactagcataacagatcatatctcatgaaacagaattactaaattaactacacatctctcagaaatttccaaatccctgctcccaacacaattttagtacacctattaagtaccacgggtcatttagaaaaacagaaaaaaatatacacctagtctttgcaattaaaaaaaaatcataacataaacaatgttagatataaattttgaactcaatatgttttttcctacatatttatgtaatcaaggctctttaagcaaagacaggtggtaggtatatgatctgtacaaacttacagtagtgtatattccaaataaaggtttttcttcctactatggtatgacaatataactgttttct

SEQ ID NO: 161112 - DNA, 817 bp, Homo Sapiens
ctgttcttacatttgtttattgtgatatttcactgttgcataccctgataccaaattagtgtaagtactgtgtaagaaaaaaacaaacaaacatgtaactaaatacttttccataccgttttccaagtcaagaatgaccagaaaaagtaggtagtctctcatatttgtttagcatgtccactttttacttattgttaaattactcagtctcaaattgtacaatgcttgaaaacagatatgacaatttctgagattaaactttattaaagttacttttccagaaaattcagtaaatatggtaatataggaacaaacttaggctcataagccttttaactttttacataatctttaatgatgttgatcaggaaattctttcattggtggaattacttctccagtctccagaattgtatcaccagaaacatgatacttcatgtaataatgaataatccagacaggtacaagtacatgagtgaaaacaaagatactctttttgtataccccatggaccattttcctccaaggggatttattctccaaaaatttattccagaatttctccataggccccatcttctgtgggggcagcaccggctcccgagggctcagctcctggtccttcagccatcgccttctcagctctcgcagctgctgcagccgcagtttctcatccggagtgtaccccgtcatgtcgccgctggtaccaacgcaaaaggacacggcgcaccctcgaactacggactagttacttaagcgcgctcccgctctgcaaagcgaccttgcgggaacgccgagcgccgcgcgcggttattac

SEQ ID NO: 161113 - DNA, 1000 bp, Homo Sapiens
ttttttttttttttttggttataaaatcatatgtttattacataatcattgacaaatagtttctgtataataactggcagagtagctctaaaacatatgcaaggaaataaataaagaaaaaacttacaataaagagagtaactcatattttaacagttttgtgaaaaaaatagaaaatattttatgtagcttatagtacatatatttttttacaacagaagaatcgcattctgattttccatatggatcatttccctatgttgctagaccagtacactggcaacctggtcatacaggtgagtaatgttttcagaacatattaaatggtgttttttcttttaattaatataatgactttatgtttttcttctcttaaattagcttttcttgtcaagttgaggaaggtcaaaccacaacttaactgagtactccagatgacagtaactgacttgaagatggaaaaatatcaaaatagaactttatattgaaaatcactgcttccatagattggcatttttagctattactatgacttatataacttatacatataattttgaaaataacaactaaaagatgtataacatagcaaaactgcttaaacatcccattttgacacttgtcttgcagttagtttgacattttgtagttaatgattccaaattggtttagttgggccatctcattcttcacttcctgtaaaccactccatagatttgtctttcttcaagaaattagttttctttcctttatttgattgatggtcattgactacttcagaaccagtataagcttgagaaggatcacctattatgtccattgacagtgagttgtatgagtcctgagaatgtttttctgtcacccctgctgtatgactggataaagatgatgatgaagacaatcccagtctaacatatcttctttttttaccacagagtgaacaatctactggtgtggcactaggtccccggggcagctgaacttcatctctgttgtagtt

SEQ ID NO: 161114 - DNA, 1000 bp, Homo Sapiens
ttttttttttttttttttaaataaattttttattacaatgacaggaagactctggatacaaacacatttgctaatataatcactccactggttacctaggcctagacgtacaaaagggcacccatatctcatcaggagaaagacaattttgagtttctgggtgtagtaccaagtggttatgatcaccacgtacgtggtctatccagttaactgtgtggcaatttgctatttcaagtcctctcataacagaaattactgaaatatgtggaacaccagtcaatataaagaattcatttttaaacagactagtgaatttgtgtcataaacacacttgcgtatggatattaggagagcattgcttgaatatctctaaaactatttttaggaattaaaagctttcatagttaatggtatgatattggccttcagaattcatattgataaaagcaaaccttagtcatttaacaggaatgtttaaattttagagattctaacatgcgatgccgaaaaatcctaacatttccacttagtaatgtcagggttgtgccagttctaatttcccatagctagtaacatcagaaaatatttatcagagattcaatattggtttcattagacctgataaatgctaagtatggcaactattaaaacttattgttattcttgtttctaaaagggaataataggatgtagctataaaaataatgaagcttatttttcataaacatatcataacctgagcgtccaaatagattttaacaattaaaaatgcctcatttgagaggacatacacttatttgatattgccattcttcaaaatgcttttgggagtccttataatgtccttgacaactggtatacaacaagcaagaaaatataatccatcgcctaacttgctaccttcctttattttgaaacttgtttgaagtggcttttgactgtttctaaaggagggggaatatatttatcaatcagttttcaaaggataataattttccat

SEQ ID NO: 161115 - DNA, 1000 bp, Homo Sapiens
tttttttttttttttttttgaataaaagatttatttttttttctcaggaaaaacagaaagttagggaaacacactacatttgacaaccaacattaatttgtagttggtcctaacccttcctggcacagctatcaaaagtacagctgtttaaccagaaccaaggtgttcaccccccacagaatgtacatgaaacactagaggactgcatgtttttccctgagagaagcgtaagacaaacagaagtcaaaaagtagtcactgggagcgccatccttctaagcaaatcctccctttcccttttggaggatttgcccgaactacgtagccagtcagcacttagaccacctgcctcctcctccccctataaacccaccactcccctcctcctttcccaaaccacttggggtgtcctaagccctcactgccccaagcccaaaatatcaactaagatccttgtctgtatttccacagtcatacctaatgaattgggaagtggggcccctaaaaaccaattcacatctatgcacttgtttccactggatttggcagacaggcttttttagttaccgtaaccagatcttaagattaattaaaaactacataaagtgcttttaggtccttagagatacatgatataaataagcggcttatgatcaagaacgataaatacataggtaaaaatagctctagcaaagatgaccttatggctctgagatgggcaggcagggcagttcttccccattacattcttagtcatcttattcatacctatttttaaatggagtccacagactaaaggtcatgttccgagactgaagctttcaaatgaccctagttccaatatagacactttcttcagtttatcagtagcttttaaactctgaggtttaacacagctcacctctttctgtaaatttaagtgagcatactcctatacaaaggaaactttagagaaagcctcataaaatgttctttcctctgaaaattcctgaggggacttt

SEQ ID NO: 161116 - DNA, 1000 bp, Homo Sapiens
tttttttttttttttttttttttttttttgtatttatattgtgttctttatcaaacataaacaaacttaattataagaaatgccttattgaaacttttaatataaaacacatacctcttgtaaggtattaatatctactccatccccttgaataactctaagataaggtggcagcaacttgtaaccctttgagttctcagtaacaggaaacttcttacctaaaatctccaaaacctttaacacagtgtcaagagggtttccagaatcaggtctgattattagtggtgcctgtgtacttctcgatactattaaatgtcttagatcttcaccccatattttctcacacgcattataaatgtcatagctatcgctgaccacagatacaggcactgatgaaaactgtgttacaatatgttcaaaagcatctttttcatggtctttcccccaagctgttatggtactgtgttctgctgctggaacagaatagcctggaacaggatctttcgttccataatattttttaattagagcaagtcctgctactgtatctgttcctttgaagttaaccaagtgagcagatgctcctatgccagcagtctcttgggaagagactcctctgtagccaaaatcatgtaacttgtattccagaccatctaagttaccagaagtttctaacaaatatttggccaatattttcttctgctctctagaatttgtggccactgtgattggataccaggactgaacaagaatagtctcaatccaatttgtaagccagtaacactctggatctgtgttttccaccgtgaagagaacatttcctctgggaatgacaaagccctcaggaacagcttttatttctattggaagatgcccatcatacttctcaagaatgtagttccatcccttttcattaaagacatcatcttggaaatgttctttgtagacatctttggcttcctggattttctctttggttactactttaccttttaagtac

SEQ ID NO: 161117 - DNA, 1000 bp, Homo Sapiens
tttttttttttttttttttttttttttttttttttcacagagctacaacatttaataacgtcatttttagggggcggtgatgagactccccagcacacagggaaggaggcctgctctggggctcaggtctgctgagagttagcggtctccttctgggggctcaagggcttgttgagcttagagtctgagctgggcagcaggggctccagctctgagggctgcttgaggtccatggagtgggtgagggcactctgtggtgtgcaaagcggggtgcgtgagtaccccccattcccagggggtgacctgctcaagggcatattgcctgacaaaccaggcctcagagtatccagaatccagtgggccatgacctggcaaagatttctaaacccattttgccacagcaggtgacacctaatttctccaagggtccccagggctcaggtgagtgtgcaaaggttgcctttgttcctcgcctgttccctcatcctttccaggcctttcccaggagccgctgctgagcttctggccacgggcaaagcacagctggctcaagagcaggagaagtcagggtctttgctttgcggggctgggcggtcccggggttgaacttgaggggcagttgtgagcaggcctgtttgttctcgggaagttggcaaagtggagcctacatcgtggccatctgagaagggtgtgctaatttgagaatcttaggctctatggattcaggggggtagggccacaagctactctgcccatgagcgcagccagtcctaaagcacagtgtcagggcatcctggagatgcctgcatggacccctcatccacagtcatctccttgagtttcacagcaccccatgggggaaagggtagttttggcaggggttttctgttccccttagacaggtgggggaattaagaccgagccttcggttggtaatggagcaggaatgggagcctaggactcctgacccccagccctggagttggctccacaatggctt

SEQ ID NO: 161118 - DNA, 1000 bp, Homo Sapiens
tttttttttttttttccctgtggaagtgcttttattagcagtaaggctgatcgtacaaaaaattctcagagcttcataggacaaggtagtacaagtatggatgatacaggactgaggaacgggggacggctcaaaagaaatcaacatcgtctggggcatccaggtcccgatattccacaatggcccttgggtctccacgaaccatcctgttgcgaggtttcccaggataacctccctggcctcggaaggcatcatagttccctcgaccagcaccatacggggcatgggggtatggagggcctcctgtggggactgcagggcggacagcaccagctccatagcccaagatcgggggccggggctgaccatagggcatcaggccctggggagtctggtgtgggtaggggagtcctggggtcaaacctggggggagtatctgggcggggccaggtggctgggctggcttgatctcaggcagagctgggcgcttagcatcagtgaggaagttgttaaaaaacgcgacttcctttttcacttcctcaattttctctgcatgcttgttgaagatatgtttgcgcacaaactcaggacccttgaatttcttgccactgagaggacacagccacttatccttgcccagttcctgcgtgttggaggtgacgaacttctccacttcctgctctgggtctttgcgccccatcttctgggcctcttcctctgagagtgactcccgcacactcagcaacggcgtgagcttctcctcaaaagtcttctgccactccagcacttccccgtgactgatgcggttgggtggcatgggcccccgaacgtggatgatcccacagcgattgggcatctcgtcctcgttggggtactcacaggtgttgtaataatccaaggaatgcacgatgcgcaggtaaaggaggagcttgtccaagaccttaatcaacttctcatcccgctccacgttgatctctgccgggttcccttccttaggagg

SEQ ID NO: 161119 - DNA, 1000 bp, Homo Sapiens
cctaatataggtaaatttatttatttataaattattttcatgtaccacaattggctagtgtctcaaggcataatatgtgcttaaggtgatgcttaccattaaggatagtaaacaaattcattttcaaattatattcttggtcatcctgggctttatggctggcttcatatcatatccgattatgtgaaaacaaagtgtgacctcgtaggatggtgacattgcgaaggatttctccatgctgtgtgtccactgccttcatctcctccacgatcatggagaggttccggacgttgaggtccagccgggcactgagcaggctgaagcgctcccggagcaggtctgtggtgcccagcatgatggagacagacttgttcaggtagtagagctcctcggcatgggtgtggaagcccagcgtgcaggagagccgcacgtcatccaggtacttgagcatgctgtgcacgtggttgtcggtggcattgatgttggtgaagatggtgccaatttcaatctcgtgagaagccatgcgtccttccagagactcaaacctctccacagtgcggttctgggcgtagtgggtatggtactgaagatcatgcatgttctcttcgtggtcatccaggaaggacgagatgttatccagctgcagctgcaagcccatgacctggagtaccaggtcgtgcatgctctctgagttctggctgatgcgctgtgaggaggcccccagggtggcctggatgttcttgaccgcctctccagtcttggtggaggtggtgcgcaggccgctgaagagccgtgtgtagttctgccagtcggtgacaatcttctggagggtcagggtctcctcgtctgtcttccgctggatcccgtggatccactcggaagtctgccccacggtgaagttgatctggtgcactgcagccttgacatcgtagcactcctgggtgaggtccttcagagagaggtccaggccagctgtggtggcctgccagcctctcacctg

SEQ ID NO: 161120 - DNA, 1000 bp, Homo Sapiens
tttttttttttttttttttttttttttttttttttttttttttttttttttttttttataattcaacattttatatcagaaaagatcagctttccaacatttattccatggaatgagtgcacagcattttcatgaactacctcagggctacatcagtacaaaatagtttaaattagtaaaataaagtagtttcaaagggaaatcattgatgacttcaggataagtgccaccaccatttgggaacagaggatagaaggtagccatgtggttattccatgatgcaggaatcaggccggcaggtggactgtcattgctgtcttgcagcagctggcctctgccttcagggtaccaccgtctccaggacacaaatgggcagcagaaaaatgtcaccttgttgatgctcagcagctcatctattgggacaaaacttccatctcggccaagggaaatactctgttgagtgaccagcggggcccagcccccagccctatttatctcatcaatatggttcagggaagataaaaaagagtgttctatgggatagaaaggtgggaatgacaaaaaactaagtggctaggcatggtgattcatgcctgtaatcccaacactttgggaggccgaggtgggcggatcacgaggtcgagattgagaccatcctggccaacacggtgaaaccccgtctctaccaaaaatacaaaaattagcggggcgtggtggtgcacacctgtagtcctagctactcaggaggctgagacaggagaatcgcttgaatacgggaggcggaggctgcagtgagccgagacagtgctgcagtgagccgagatggcaccactgcactccagcctggcgacaaacggagactctgcctccaaaaaaaaaaaaaaaaaaaaaaagaaaggaaaagctaagcagatgacttatgtggcaaatgaggaatcaaattctctatttgtggtctgagatgccttttcctggcccagttttctgtccaaaaggctct

SEQ ID NO: 161121 - DNA, 1000 bp, Homo Sapiens
tttttggtaaagcatgaacatttatatttaatttacattttgacaatttgcacataaataacattgtaaaccagtatgtaaacataagatagtttgttgttctagcaaagtaaaaagccagtaactttggtcagttttaactttgagtagaggaaaaaataaaaccactgttgattgtgggctcaacattcacatgtaagaggcagaaaagagaaggatggatggtgagagaagcaagaagtctttataaaaattctcactatgggaaagcacaaaaggagaaaaagaacaaacgagtagttgggaatcaaaagtatttggtctaatgtcaacgtgatgctttggtttaccttcagttaaggactgtgtttatcaaacactgatacataaaaagctgtcagtcttggaagttacagaagaccagtaaggctcttgggtttccctggattattcgaaatttgttctcttctacaggtgaacattagttgatgtgaacaaaatgtcaaatataattataaaatagattggagtaatgtatcagtatttagtaaggaggaaaacagaaaaattgcagcggtaaagtcagttttttatttctgtgacttgggtgtgaccacataatcataaagtggcaaaaaaaaaatagagctgtcttagatggtccttaatactaaaaaatgatgtatctcttcctccctggttgttttgtggtccccaccactgcaccaaggttttagggtctcttacagtaggcaagggtgcccaatcataccgacgtgattgtgaggtcaccaagtattaagcaaagtctcagaaaggagtgttcttttttttttttttttttttttgcccttagaaaaagtagatcttttacatggcttggctcacaatttaagtggttataaatatatatacatatgatatagtggtataaatagatttataaatatacatcattttttgctacactttgaacaccaacatgtaatctttgggctta

SEQ ID NO: 161122 - DNA, 1000 bp, Homo Sapiens
tttttttttttttttttttttttttttttttttttttttttttctggctaattttgttttttaatgagaaacatctgagttgtacatatcacaaacagcttcaagtttctgtaccaaccccccgcccccacccccgccgtggccaaacagttaaaacccaaagcaaagcatcactttggatgtgaaaaagtcttagaaaattaacttacaaaaacatccctatcaagtcggtagtttggcatttactttacattagtcaaaagctccagctaaaatctaatttttttaaaaaaaaatcgaagtttacattattcatacagattgggcattgttaaaaaatatgcacaaataaccacatccatgcaatacaatttctttaaaaatttaaagcaatataaaagagcagagctaggtactgaacagaacattttggtgtataaccggcagctcaaaattgccagctgattggagtaaaactgattctaagcgtattaaatatgattgattgtttccatcagctaagggtgcctatgagtttctgaaccatttctagggtggaatgtcctcgcttgcttctataatatatgtgatggacaccactgctcattgaccatacctacattataataatgctgttttacaaacaaaccagaattcacaaagtgcttggctcttcaggaaactgacatttccagagatccctaaactaatcaactagttctgccaaaatacccggggcacctgccacacaggttccctgctcctggggaggaacacaatctgaaagctgccctgggctccagggagcccgtgctgggtaagcccagaagaagtctgcacaggtcccgggaccttgccaacactaagtcactcagattggtctggggccacgtgctgggcacccttggcaatcaggcaggtggtgtagcactgtggccagctatgccctctatgtggggggtggcccattggtgtacctcagcatggggtaaaaggaccg

SEQ ID NO: 161123 - DNA, 1000 bp, Homo Sapiens
tcacagtttccgctccacaggttgctgtagacacagttcgctgcccgcagagatgatgggcaagtgattgtccatgtggtagctgataaggtgactgacactttcaaagcggtgatccttagtccgaaccacaccctcagggtccaccagtagcaaatgcttaggctgcccactctgcaagccagtgagcacatactggccaggtgtggtcgtgctctcccgtaccaagaagtccccattgagctgcagcagtgcctcagcctcccgccggctcagcttcccatggaaccagggctcccctcggagctgctcagccatggacaccgactggggaggtggaggcacccgaagagcatcttcgaagggcttcatgtcaaacaggtcccggggtgcactgccattgatagcaggattggggggcccagcaccacccactgcttgccgggccttgtctaggttctggacgttgacataggagggatcatcaaaaagctctctgcctggacagggtggtggaggtggcatctgtttgcggacttctggatctcccccaacaggctgtcctacaggcaatgtagctcccaagtggctgggggtctgggcattgggtgcagtgggtcgagcagcccctggagcggctccttcccgaagcctcatgtctaccaccccccccaaggggggttccttccccgggaagtcattatagtactgatggtcaggtggctcttcctcctcctcatcccatgctgagccatcaaagccagccatcctgtcatgaggggtgaccagtttgggtgggttcctgaggtattgtttgaagcgcaactcgaaggcctggccaatggtgctgatgacatcctgggcaagcccttcgggacactccagaatgtggcaggctctctgattcacagggtctttggcaacataggcgacatactcggctgtgtccggatccccgccggatgcaaatgagatagattgcatgtggtggttggcgatg

SEQ ID NO: 161124 - DNA, 1000 bp, Homo Sapiens
ttttttttttttttttgacaatttgattttactttattgaatactatcacacacataatatttacagatgtaattaaacagaatttataagattaccatgtggaatatttttcaaagttaatctgaaactcttaatgaaaatcatcaatacatgtgtgttacaatacaataatagaatgtagaacttttcagccaatatcatgatggttcatttaataaaaactctcttttcaaaaagaggtaagtcggaggaaatataaaaaaaaattcagaaaaaatatttccatatctagtcataatcttccagcttttctgtaaaataaattatagactttctcaattgcatacatgactattttcttaaataccatatttaacttttagcatattggagttgtttttcttttatcgtattttcagcataggtttaaatgtttttcttatgtttcaaaaggaatacataatctaaatttaaaaccacatctgaatattactttaaaaatagcaacgaggcacgtggccaccatcactaccttggctctttattacggctggtccacggaagggaaccacatggacaacaaaagtgagggagtcctctaaccagttctaagtgtgatttattgtagatgccagttgctttcacagacattaagaagacatcagaaatatggcatctacaccggtatgtctgagagaatacacgcatctgtgggctaatggtcctaacttccatctataacaatattcttagactagaacagacagaaaatgtagggattatggtagcacagtgacatatgagggagagttaacttctctatccgcacaaatgtaaaggcgtttcactctgattttcagtgagctagatttactacccatacacaaaagtcaagaattctagcatttctgatctttaaaaagtagagaatgtgctattatacagagttgattttgcttttgaaaaagcatagttcttcaaaagatattactatcattt

SEQ ID NO: 161125 - DNA, 1000 bp, Homo Sapiens; identical to SEQ ID NO: 159122

SEQ ID NO: 161126 - DNA, 1000 bp, Homo Sapiens
tttttttttttttttcaagtgaatatgttttattaaatgcatactaatatctttctatagtatgtgagtacacataataaattaaaatgtatatatttattaaatatagatagatataataccagaacatgattatttcagatgagaaatcaaaataaacccatttttaagtatcttttggtcactccaaattgatattgctcataaaaaaatacactagttttccctggggaaaaaaaattaattccatagcaatgcagttaagggacgtgttttatttcatagctttctgcaagcaaaattgctctgatacaaaatgagttcaatgatacaggtgctactgtccactcaagcaaaagaaaacctcacatgtatatgaacgcactttatacttatattcttacagtataataggtctaatatccaggatgcctctggcctcattgaaagcaatggcagagaaatgctgcaaggtacttgaatatcatagtactggcaagtgcttgaagtaacttcctgtgagttctctgtcagatactgcaaagactgcgtgtgggtgtgtttgtctttttgtcttccatcttttggtttacatttaaatcatctcaaaaaatatcccctgcatgtatcattcagcttctcagagtttccataaaaacaggaaaatgtcatgaggtatccctaacgtcagggattgatgtagtgctgtggctgtcagagaggatgtagacttacctgtaggtacagtaactgagtttagtgtgtgcccggcacgttacagtgcagaaatgttagttcatgttaaacttttcctcctcacatatgatgtgactttaaccccagaatatctgacaaaaaaaattatacagataaaataaaaagacaaatacacaaataaggccatctgcagaattttaaactcgcctcttgcaatatttcacaagaatttctacaccatattttacatcgttcaaacttaaataataaatgctcaaggaag

SEQ ID NO: 161127 - DNA, 1000 bp, Homo Sapiens
tttttttttttttttttttttttttttttttctaattataagatgatttttaaatttatttttattttaagactaagcatcctctttgacaatccaaaaacataatccttgctcactctggacacacacacctaaaacagttaaaagtgattcctcaatttgcaataacaaagtaggaaaaaaagaatacgttctcaagctgtagttcaatttttctgtcctcttttccaaaaaatgttactttgctaccaagcctcccaccaatgataaggaaagacaatttttcaaaaagccaacaaaacccagaaaaaggaacaggtatcaattcaaaattatcacccagaacactgctgttgcaaagaaagagtatgaagccaaattcccatagcttgttagagaagatctttaaaaataattcagaaagttaggactggaactactgtagtatagacaggttatactgtcactatatgcatatacagtggtaaatgcagatataattcaagaacattcagcttgggaatatattaagctttctcctattccagcagaggaaataaaaacatgtgttcctggaattaatattaaaatcatccttacaaacagaaggtagggcaaaggtaaagagagagaatgtggaacaaaagtagcaaagacaagccattttgaatctaggttctaacacccaggaaggctgaatagaacttaaattcttctgagccagtatcactaaattctagatttggcctgaaaccagtggaccatatacaccactaataaatatcaagtgccccacagtgtttgtggtattaaaacatatatttatattataaatttccattctgaaaagcagatcaaaatgacactggaccatccagtcagttacggagtaatgggcttcctccaaagagaactgacttggcagaaatttaggttggtaggaatgtgattaacatggagtaaacgagatcaggttctcagtataattttcataaggctt

SEQ ID NO: 161128 - DNA, 1000 bp, Homo Sapiens
atcaacatttatatgctttattgaaagttgacaagtgcaacagttaaatacagtgacaccttacaattgtgtagagaacatgcacagaaacatatgcatataactactatacaggtgatatgcagaaacccctactgggaaatccatttcattagttagaactgagcatttttcaaagtattcaaccagctcaattgaaagacttcagtgaacaaggatttacttcagcgtattcagcagctagatttcagattacacaaagtgagtaactgtgccaaattcttaaaatttctttaggtgtggtttttgtcatgtagcagtttttatgtagatctatatataaaagtccacacctcctcagacagccaatgaaacaactaaatttcaatctgtacaacctaaatagtagttacagtcctctattgtacaaaatagttacactacatacacaaatatacaataagcaaaacaaccttcatggtaagatagcctaggtcccagctacctgtcaccattttgtcactctcatagttttgtgtcatccattgtttgagaagaaagaggcacagtactattgttttttatgaattttggtgacagttgtcaaatttgtacagtgaactctgttccccctcattttagtctttttaccctcctttcaagttcctcctggggggaggagaggagagaggcgagtccagtgaggagctccatcgcttcacaaccccatgtaggacactaagcgcaagcaggagagagaacccttggaagtgaggggtagggagccggaagggatggaaaggcacacagctcctgagcatgaattaaaccatttctcagatatctgccaagctgcatgaggtcccggtatatccatgctaattctcggattaacctttaattcacccaactaagaaatttctccaagccataagcatatgagtgtttaatactggaaaaagagataatggcatatgtcagtctcacgtctctttcgcag

SEQ ID NO: 161129 - DNA, 1000 bp, Homo Sapiens
ttttttttttttttttttttttttttttttttttttttttttttttttttcccccttaaatagctgtttatttggcagtgtgccggaaagggtgatggacttagcattcacagacgacaccacacaccactgtcacgagggaagaaagagcgcgggcaagccagcctggagccccgaggaggcggcctcctcttcaagagtgggagggggcagggcctggagtgttgggggcagcctgggaacacctccgcttaataggcgtggttagagacgaagagggactcgctggcagcagccccagcctgaccgctcggagtgtactttccttgacaggcaaggctgttggccagggctcgcttgacatactcctcctgcgcagccttcaggttctccttcttcccgccccaggccttcagggcagaggcctgcagggctcggccgtaggagaaggtcagggcccagggcttcagcagggggcacttgttaatggcattgaggttgatggacgcctcctcctcactctggcctccagacaggaaggtgatcccagtgacagcggggggcactgtgcggcgcagcgctgtgacggtcgccatggcaatctcctcatgagaaaacttctgagtgcaagcatggcctggggtgaccatgttgggcttcagcaaggtgccttccaggtagatgtggtggtcactcagagccttgtagacagcagccagcaccttctcggtcacatactggcagcgcttcaagtcatggtccccatcagggaggatctcaggctccacgatgggcacaatgccattctgctggcagatactggcataacgggccagaacattggcattttccatgatggcgagggctgagggggtgtgttccccaatcttcagcacacaacgccacttggcgaagtcagctccgtccttcttgtactgggcacagcgctcagacagcccatccaacccttgggtggtagtctcgccatttgtccctgcca

SEQ ID NO: 161130 - DNA, 1000 bp, Homo Sapiens
tttttttttttgagaggccagctatcttttattaagctaaatgttaaagagatttgtaaaaatgtaaaacaataccactcttctcattttttgttttgaaaaatagtcattcttcttatttttttaacataatttttaaattctaacagaaaatatcaatagatttaacccacatacatgaaaactctttggggttctcacttttgaagagtgtaaagggatcttgagaccaaaagttttgagaattgctgttctaatgcatggctgtcatttactcaatgacttttgtatgaggttcttttgcttctttaatgtattccagatacgaatcctttgacagttccatgcattgcaaacatttccttgtctgtagcttgttcttttacagtctctattgttctacagaagccatgtttttatgcatcattttttcctgtgtatgcttttgtgtcttgctttaaagaaatccttcccatttgcaaaatcatgaaaataaccttatagattctcatttaaaagttttgtcttcatatttaggtctttaatccctttgtttttggggaagggtataaggtagtacatattgttttccccatagagcttgccgtatctgtcaaaaatcaagttcccatataaacatggacctgtttctgggctctttattctcgtcagggatcccttgactgacctctactggcaccagccacacactactttaactggtatacctttaaaatattctttgacattgttaggacaagttcatgcctcttcctctcgtccttcttcaaaattatcttgctttttcttaatctttttcttcccatgtaacacattttgaggtgtaacagaaggcctactgagttgggagtccaggcatctgccctgttctactggcagccgcccctaaccagctgtggctgtggagctcatatctccctgagctcagcttcctcttccatagaacaagaaatctgaaaatcacctctaatttttcctc

SEQ ID NO: 161131 - DNA, 1000 bp, Homo Sapiens
gcaaaacaaagaaaaatattttattgtaacttaaaattcatcccctagacaacagataacgcccacattggatgttatttagcagacatagtgaagatgcctttggacaattatcagcattgatgaatatgaagatgtcacatcaaagtcaaactttttcaggttattgggtttcctgaacataactggcaaaaaggaactttcaacacaacaagtagtttagtttttttttttttatgtcacttattttatttactaaccttgacagggactaaagaatgaggtacagaaaactttccagaagtctgagtgtggtgtagaagtccaagacaacttggagctccattattgcattattaagtagaatgaactgttatgaaattctccatattccaggtttactacatagaaaagtactatttacctacctcacagaggtattgtgaggatttgtgtttataaagtgcttcaggcgccttcgaagaaaggcaacatacaagtataaaataatcatacaaatttcaaaataaatgaaaagatgattttggcacaatgggaagggtgcctcctatttaaagaacacttggctattggtttataaaatcccctgacctcttgggttttaaaaaaattattatttaaaagaataaatgtttttccattgccaatcttataaaaattctcaatccaggctgtgttatcagaatcacttgaagagctcagtaaaattatagatgtttgggcaacagcctacaccagcagaattaaaagttctatgtgtgatacccaggtacctatattttcaaaaagatctatagggaattctgatgcataccaaagtttaaaacccatttctttagaaaaaaaatcaatgtattaaacattggagtttatcccaaggacatttttcttaaggttaaatgcaactgcataagggtattaatttcttattgcccttttccattcccatatcccatgcagacttagagcatgcatagca

SEQ ID NO: 161132 - DNA, 1000 bp, Homo Sapiens
aacatcctgaactttctattaatactatctgaccaaattttaatacaaaaggttaatttttatgaacaaatggataataacccaactgcaaactaccaacatatattctatctgaactcagcagttcccagggatgatgtttggaggggaggaaattgaatgcgtacagagcacgaagtctggctaacaaggcctgagccaacaataaccttgctctttctcttcgtcttcaggcagcccaggctgagggctgcaatcataaaaccaggctttggctttcttatgaagtctgagttgaattgaacctcagcacttgcagatcacagaaagattgcagatcagcagactgtttcccccagaattccagaacctccttctcaaggtgttccagggcctgaatatcctgcttaagactgctcaactcttgaagaaccaaattttgaaagcgctctagtttattgagtctgaacagttgcatctggtttaaaagttttattaggcaatccggtgctttctttgcattttctgaattaaacggacgctttctgtacctaagctcatattttcttttccgttttttagtgaagttttcaaaggttgggagaatggcagaaccgttcaagttctctggcacaacttctagggatgaagtggaaattccttctggcaactctctttcttctgttattgagaaaggggatcccgaagcaacctcttcttccaatcttgattgttgtgacttagcaaaactaccttctggtatgtctttgtcttccaagtttctcagcttatgtttcaagctagtactttctgttagtgattcttggttcacaatcttaggtttttcttcatcttctgagtgcttcaaggaagagagctcactcagtgagtgaggatcttgaagctctgttttctgggcagaatcttcagcagtcaaaaaagcaaaactatcttggaatttttgttcagaagtctttggagatgtggtgttattttgctc

SEQ ID NO: 161133 - DNA, 1000 bp, Homo Sapiens
ttttttttttttttttttgatgttttaagtgtacatcatacatttattaccaacaaccctctcaactccaaaattgggcacagggattaaaaataaaaattcattgcactacttagtaaagcattactagtaactttcataaaaaatgtacaaactttgttaaaaatttatcaagccttcaaatgatttggttacagatatttataatacatacatttaaaactatatgttaactgatacaatggaatatgatttgagaaaatgactcagcaaatgattccaaaaaacacccctgtgagctttcacaatctgaaacggcaaaatgaggtaaccaaatgtaccaacagggggacaaacaaacagctttctaatgaaaaggcccaaagataatctgtgaaaaatattctcacaagtgagtcggtagatctcattcaaaattattctaagaggcccaaatttaagaatcttaacaaatcacatttcagatagtatataaaatctaaatatgctttcacattttccagattttgctcaaaaaattaaggacagaaaatcctaatatgagatcttgatacctggaggccttatttttttgaggggctgggggttaaaaaaacaccaaagatgacaattcatgccaaaaaacaaacaagaacccacaaaaaacccacagctgagttaagatttttttgcagctatataaaagtgtataagatgggcttttgccattttaaacatgattttttttcattaaaaaagattaaactatatgtgatttgtatgtagctgattattatgccaagaattttggtctttaacacactttttattcatcaggaacaggtgagggatatcctaatgatttaaaagtaacatgtgcattaaccatgtgcatttttaccactatttagaagtatttctgatgcactgacaaccctaggggcaaacacagtatgcaaaaccctacttgtaggactagatagaggcaacaatgtctcgc

SEQ ID NO: 161134 - DNA, 1000 bp, Homo Sapiens
ttttttttttttttttttttttttttggggtgcgcggcctggctactctggctgcaggccgagggttgaacgtttattcatcacaattaacagcctatacaagcatctctagaacagaggctgtgggtccaaacgggtccctgcagctccaaccctctggcctctccgggcactgccctcacagccgatggagcatggctgggcaggcagacaggacacaggctcagtcacagggtgtcagggggaagctcttctagctggaatgattggaagttggcccagcggctggggctggtctgtcccttcccctcctgggaagttccacctccactgtagttaaggccaccaggatgaaagcagggttaggtccagggacccagtagagccttgggatgcatgaggtgggggtaaatgggcttggcagagaaatggagattgggaaggggcctgattagaatagaaactgatgatgttggttcagcacctgcaagatgaggaaggtgactgcagcaaccttagagcttcccaaaggaagcaagtgatgcccccatctgccaagagggtacctccttcagcccttggcacaagagccagaccaaggtgtccagggaactccacaggacagaagccctgccgaggttagggggatggtgggtgaaggaaagtcttcctggggcctgcagcccagtctcaaacaaggaacaaggacatggctcactggtcctcatttgtgagccagtaggcagggagcgagccttctctagggtagatcacagcctggggaattttccttagggttaggatgcatccacggagacagacaggttagggccagtttccgggaagctcagtcaagtgctctgggctcctcaggcctctcaggcagaccttttctgtagggcagtgccccctaggctgcagctctgacctttaggaaaagatggaacgaagcttggctgatcccatgcccactagcatgcaccagggtccccaaaccaac

SEQ ID NO: 161135 - DNA, 1000 bp, Homo Sapiens
tttttttttttttttgatcaaaatgttgctacattttattttcaacttaaaacttcattataaaatttgccaaataaacatgtcaaaaacaaacttaaaaacaaagtgtagctgatatccagaaattgcagcactgtattgataaagggctcttttcattaccagggaaagaatttaatgtccttccttcctccccaaaagcttccttggtgcaatccagtacagaaaacgccaccactttctgatgccaggagaaaagcaaaataaaaaaactgcttgcacacattagcactgataaaacaatgacaatttcactaaaagaatgtttaaagactaccggatgctggagcaaaccaacttcatgactgcattaacataagctaagttacatacacttcaaatgcagtatagaattaacactgcatatctaaatggctcatatataaaatgtgtaattaaaacccaaacatacacactatgtttattacattcccctacattgaaagtactgagaacaatttaactctgaacacaaaagtttagtgaatttgctactgttccattacaggacaattaaaaatgagactatatcaacttcactagaatttaattgctaaagctaccttatgcacatctattaaactaaaagaaacgactttaaccccttcagttgtttttaagacagcactcctttacagggagtcaggtttggtaaatataaaggatacataaaaaatacagtataaactgcataagcttaacagtagcaaaaacactgatgaacttttaaaaagtcaaaaatatataaaaatattagcctgaaatggcaaattttcaaacaccgatctgtgtaaaaatgtttaaatattgatgttactccaaaaatatatacttattctattttttttctatttgcaacagtttataaaggcaaacaaacacctgcaattgaggtagcaaagccaaattcacaaactttggatcaagaaaaatacccttc

SEQ ID NO: 161136 - DNA, 1000 bp, Homo Sapiens
tacttgtaaatttcatatttattgtaacaaaaattatgacatgtccatttgtgcattctgcttgagtataactctgggtatgtaaatggcctaatggggcactatacaaccatgctgattgtggcagcagtaaggaacacagttaaaagtgtctgtcaaagtgggaaggctgggacaggggaggaaaatgggttcagggcccttgggtgcaggttcttgtccagtggcctaagatccatttcctccggacagaaacactgcagctgctcagcctcctcattcagtgaagtgagggtgagttgtgaggcaggcaggctcctcagaggggagggggaggggaaacgtcagttacttgggctgtgtccttacgccaagactacaaaacatcgtaagcctcactatacaacactgagctatttacaatggaaattctcaatcagctgttctctcagagaaaattagtgaatcccagtgacttaagtcacctgacagagtaaagcaactcctaggagttagtctccatattctacaaatgtctattattttcaagacaaaaacaaaacaaaacaaaacaaaacaaaacaaaagccttttccccccaaagaaatacagaattacaatattattaaatcatttagcaacggcagcctgccctgccttccaaacaaacaacaaaaagccattttaaaaaatattacattatcattaactgtttctctgtaatatattaaaccttttgttctttgtctttacatatctgatatgttagggggagaagttaacaaatgtaaatcatattggtaaagcatcactagaagaaagtggtgattacttaaaaaaataacccaaagaaagagaacctacagattagctgcgatgacaggttgggaacagtgtctgggggaaggatgtggagtaaaacccctggtttaatgtgagcctgggagactcttgcaactcagtcttttgtggttagtttatttgttaaacagctcggctg

SEQ ID NO: 161137 - DNA, 1000 bp, Homo Sapiens
ttttttttttttttttttttagtaattcttatggtattgctgggtctctcaggaatatgtatcatttgattttgagcatgtggggttaaggtattagattactaccacaaaccgtagacccctgcatggcaccacatttattttcaggagtagatgttacatggcaggtatcaaaatgtgatgatcaattctgtgttttctgttgattaaacctcctcatttggttaaatagccagtgtataccagagagttctacacaggtcaaaattatatcacttttagagcagcaatacgtgatccaaggttttcttgaaggtagtgcaaaagatgcagttcataatgttctcccgattcaggaactcttatgctgtgtctctcctgaggatagatctgtaaatcatatggctttccagccctcactaaaaaactcagtaatatactggtatgtgcaaaatggacattctcatccaggaaaccatgtaagagcagtaaacgatttggttcagaggggaacttttctgcttgcatggccacagatcctaagtaatagccctgttcattctggtcagggtgacccatataacgttccgtgtatcctgtatcatagaagatccacagagtgactggggccccagcaatagcaaccattttatatttaaaggcgccttcaaatttaagccctcggtgacaggatcccctgttgtctatcactacaaccacataacctagagaggctagggtattcaagcggaaatacttgactcctttaaaccgattattcaccaactgcacctgaggaccaccatatatgaacagcacagtaggatatttctttccaggctgtagatcatgaggcttgtagagcatcccatacaatgtaaatccagtagtactttcaaaagagaaaatttctggaggagtatagtcaggaagaggacctgctgaatccaaaatggtggcccaaaattcctttgttttgcaagttgggtcatcttcagga

SEQ ID NO: 161138 - DNA, 1000 bp, Homo Sapiens
tatatatatatatatatatatatatatacacacacacatacatacatatatatacatatatatatttgttttttattgattgggtgatgcagaaagccacaaatgagaaaaggacactaaggttttaataaggggaacaaaaaattgttttcaccagcatagattcacattacagtacaccaatattgacagcattctcttgtctatttttggtacagaagatggtatctctctacataaccttgtaaggcttcagtaactaaaatgtaaaaccaaacaaaacaaaaccccaaaacaaaacaaaaaccccagcctattagtttacagtttattttaaaaattccgaaagacactgcaagttctaaacttttagtagtgctacccatacacaaccatctggttaagaacccagtaaaagagcccccttccaaggaagctttgcaacagtagagttgtgcaatatggatgtttcttactacaagaaaaaaattatacatggcacattctcattcatattctgtaatgtaaaaagttacaaacatacctaatcaaataaataataataaaaaaagaatttgaatgtatttgttaagtatcctaaaaccactacatagaataatggcaactttcactcacagattatttacatggtaatacccagcgtgggtacactgctacaaaactcaaaacagaaggagtaaacttgaaatgttttccataataaagatctagcagcatgactatctaatgctgttttatcccgattgcttctgcaacgttcctttttagtctgtgtcttcatccagttcataattgtctttatcataaatatcttttactagaagaacccgtacaagcatattttccaaggtgtttcggtccagtgaagtagacgtataccagacagggctatctgtagaactagagcattctggttgcaaataaaaaacatccatcctctgattaagattctgtggacttttagacaagtagcattcaa

SEQ ID NO: 161139 - DNA, 1000 bp, Homo Sapiens
ttttttttttttttttttcaaagctaaaaacaaaacaggttttaatggttaaaacagatgaattaataggtttataataaccattaactaagggaagccctagaacaagaaataaggatttttaattgcatgcaaaacctagttaccataaaaaccaatgcaataccaaaatatctcagcttcctagcatagactccaggtcttttcatttccaatacttggcagtcataatatgtacactttcatatgcacctggttgtggagggataagctcattcacataggactacaaatatctctcacaggtaggagggcacaaaagaacaatatcttcctccacttttttgggtccatcttgaaaaacaaaaaaggcactcccaaaggttccttggtaacacctttgttaggtttcttaattactaacataatctttacatgtaaggttaatggtccactcatttcatagatctgggaaccatcaggcattggaactgcctttaactcacatgccaaacaactggctttcttaaacaatgacaaaaactgtatacttgttttaaaaacatttgggctttgtttccttgacaacttatatatgcttaatcactggactttggcatgcagagccaaacatatcatggaactgaaagaaccacaatatgacatggtgacagaagactctttgaatcattattctgttttccactatcagctgctccagctcccttatactaatccaactttgtccctcagagcacccatgctctgaacctaggtttaatctctctgctgaaagatttattaaagatacttagataaattaccaagtctttctctacgatcatcaaagagtaagggaagtcaaatgctcatgggcagttgtccactattcacagaatctttagaaactatttgcctgaggccaaggagaatttgctttatcactaaatctgacccatgttgagccatactaaaactgcacttgggtactagtctcaaa

SEQ ID NO: 161140 - DNA, 1000 bp, Homo Sapiens
ttttttttttttttttttatctttaaaaatcgaatacctttatttgtgctcccttaagcagcatgtgagaagtggcagtgacctcagcagcaggcctggtatctttgccctgttgagaagccaagatctcagctgtactagtcaggtgttttttcagacagcaagtagaagaggtggtggccaactccagtgctgtatcctggaggaggtccgggtcagcactgggcaaggtaggtagctagctgcctgacccctagtctggggttggaacttctgtttgcctgagtaaagggatgtcagtcctaagatttctccacattgtgtctttcttctgcagtggtaaaaaggctggtccttgaattgtcctgcatggtaccctaaggcaggcccactggctctttttgatcaaggattctgagaaaagctgcccttggaggcccttgaaataacatagggagcagaatgagtgctcgagtcgtggctgacacagtccagctcacactgccatcacagaggctgagtgagcagtcacccagggagggggctcccagctcattccattcccatggggcaagtgactagaaggtaagagcacccgagtaagccagtgccttcctgtatccacacccaggaataccttccagttgtccaagcagccgtagttgtaaggattcctaaatactctgcccttggcctgtagccgacgtctctccttcttgttgatgtgcctttcgatgctagtctcacctcgactgatgagaacagcatgccatacagttagggcacccagggcaagtgccacagaactgcacaggaaccagaggtagacaagactcttgtgagtcatcctttctcgaaaggagaaggtgggtggtggggtctggtgataagtctcaatggcagcataagcctcccggaaaaggtcccaacttccatagctgcagtagacacagcccagagtcatgaaaaagcagaaagagaagaagtaccgatggttata

SEQ ID NO: 161141 - DNA, 1000 bp, Homo Sapiens
ttttttttttttttttttccaaaacaattttcagggtctttattttttatattgtatacctaagttgatttcatcaacatacaagccaaacgaagatcccatttcaattagatataccactcaagagaatctccaaagatcttcacatttttccatcttctaaaacaaggattgacaaacttttttctgacaaaaaccagacagtaaataattaggctttgtaggctttaccatctctattgcaactactcatttcaaagcagccacagataatatataaacagatgagtatagctagttccaataaagctttatttgtgaattctgataattttcacgtcatgaattattagtctttgatttcttttcccaaccatttaaaaatgcggaaaccattcttagcttacagggtatataaaaacaggcagcaggctggatttggcccacatgctgtagattgccaacccatgctacaaaatataccttaaaagcctgtcacctcaaaatttcaaatcactgcttcccaaagacttaaagtgattattcaaatcttcctcagtaacttcttttagatcagctggtttccattttggactctggtctttatcaattaaaacatacaagcttgacttagccgatactccatagttagtacttcttgcaaggtctttgaagacccctccatgagttgccttagtgtgatctttagagatgttggagacattttattaattaccttcaattgctctagggcaaaagatgaaccatcttgctgtaagttttcaataatttcttccacagtattggctgaaaaacaactgtttattttgtccatgtgttcctcaagtataaaagacttgtctcgatcaatcttagactctgtatggtaattttctaagacagatgcaatattttcttttgaaggagatttcaaggctaacaaatcttcctctaacatggccaacttttcagaatctacaaagtgtgtagcaattcctgc

SEQ ID NO: 161142 - DNA, 1000 bp, Homo Sapiens
tttttttttttttttttttttttttcactgaagcatttattatgcaaaataggaaggctttagcatgccagtataaattaaaacagtagaaaaaaagcagagcagagagcgttttccatccatggcctgtgccctgtaatgacgcagcagtatcctagtacattgacgggtttttcctgtcctgccactgtccgctgggcagttataggtcccatgtgttgggtcttcctgcgaggccttcacaaagatgattttgtcattcgctgaaagcgtgaagtgaatcaacggcctcctcttgctccgcagcactttattcacactgtgtaaccacatgttttttatgccactttgtgcacagctcatcaaggtcagtctgttcatcttctggcccctgtagcacatggtacagttcaatggtgcggcacagaggcctgaggcagggaggctcccgctgccctcgcaggccctggctgaccctcccctgcccgcccaccttcccatgcccctgcagctccctggttgcacctggcctaggctcctttccatctgcccctctgcccggccctctcaccagggaggcacaacatggcccagtacagttaccttgaaaggaggtgaaggtgacaacagaagccaaatttacagcaggagtgaagccactcagacacagagtgatacagacattagggcatgtgctagcatctgcgctttctctggggactttacaaaacagactcaacaactcagctgtgagaggcagtgcgcccgcctcccagggagaacgaggaaccgccaggagacaggtctacctgcaccaccggcaaaccagagggcccaaggccagggccgtaagccctgggagtacactcccttaaagagtgcagggacaacagtctgtgtgtgaaggtttggagctaaatataaccaaagcatcctgtacataaaggggaatacttcagtggctgagaagagtgaaccgggttgtaaatgcttcatcctg

SEQ ID NO: 161143 - DNA, 1000 bp, Homo Sapiens
ttttttttttttttttttgggtggagacccagtttccatctactgtttattggacacctacagtagccaagccctgggcggacctgcttatacttatgtaatcgccagcctcacaataaccaggggaggtaggtgttctgaccatggcggacacagtgcgtcccggctggagctactcggcgctgtggacgcgctggtgctgaatgagcttggtgctctggtggaagcggcggccacagtcctggcaggcgaagggcttctctcgtcggtgggtgcgcagatgctgcgtgagcgtgggccgctggcggaaggccttgccacactcagggcatgcgtagggccgttcacccgtgtggatgcgccggtgctgggtgaggttggcgtgctgccgaaagctctggccgcactcggggcaggcgaagggccgttcgcccgtgtggatgcgctggtgctcggtgagccgcgagacctgcgtgaagcccaggccgcactcaccgcagtggtagggcttttcgccggtgtgtgtcctctgatgacgcgtgagcttgaggcgctggctgaagcgctggccacactcggggcaggcaaagggtttctcgcccgtgtgtacgcggagatgctgcgtgagcgtaggccgctggcggaaggccttgccacactcggcgcaggcgaagggccgctccccggtgtggatgcgccggtgctgcgtcaggttggagcgctgccggaagctctggccgcactcggcacaggcgaagggccgctcgccactgtgcacgcgccggtgctgcagcagcactgagcggcggccgaagcgctcgccgcactcgacgcagccaaaggacttgtcgcccgtgtgtaccgcctggtgctccagcagcacggcgcgccgcgcgaagctctcgcggcactcgctgcacggaaaggggccgggaggctcgggcgcaccaggaggggccgggggcttagcgccagggcccgggggatcgccgtggatgcg

SEQ ID NO: 161144 - DNA, 1000 bp, Homo Sapiens
ttttttttttttttttttttttttttttttttttttttttttttttatttttagaaaaacagagcaaagtttattgaaatttcaagctacatttggaaaatcaaaatccaaatcctggaaccatacatcaggataaggtgtcaaaaagtggaaagtgttcactctcacaaaacccgctacagacaagctttctgggcacacctcccaggctccattggatcaaagccatccccttgttcatccctcatccacagtaggacaccatccttctgttcacttgaaagttttccacaataattacaaaacaaaacaaaaaacgttttcaaatgacactgtgaagcccaaactgatcttctctcaaccccattctatgtagtcagcaccagtgaatggtgggtttggcattcaaaacaggacttcacgtttcagtggacagctggggaaagggttgcagcagcaaggcatccgtggccgcattcagaggctggcccccctccttgcctttactctcgagtcttacttaacctaaaagacaaactgggtcaacttggtaaatgaacacagtcaaagacttagccataagaggtaagggaccagtcaatactcccaaggctggttaggcccttcaacatgtaggtggatgtgtatatgtatacatcgctacactaagatacagatctagccctatgggtatatatacgcatttatggctatatagaaaaactatgccaatactaaccaaacagaactttgtaagcggtcatcccaaagctgtaatcccacactgggctgtgcacaaagccatgcattataccatattaaccaacagaaggctgacttggctcaatctctcccatctgtgtcccctgccttcacgaaacagaggagaagagagaggttgcctctgcttaaaacacaagtggcttcttcataggaacagtcgttgtcaggtgaagctgttgaagatgtccatggagatgagaaacagaccccttaaact

SEQ ID NO: 161145 - DNA, 1000 bp, Homo Sapiens
ttttttttttttttttttgatttaaccaagagaaatttattgcctcacagttctggagcctggaagtgcaatatcaaggtggagacagggttggtttcctctggaggccataatgaaagcatctgttccaggtctctgtccttggcttgtagatggccatcttctggtggatccacacagtcttctccatgtgtatccttccttcagtttcccttatagggacaccagtgatgtcagattagggatcgaacccaacaacctcatttgaagttactcacctgtttgaaaaccctatgtccaaatacagttatagtgtaaggaactaggacttagggcttacaaatatggagtggggcatcatccagaccataccatttaaattgcagggtttctctccaatgtgagttcacatacacacattaaggtttgtgggattcagaaaggtattcccagattctctacattcatacagtttctctccagtgagatttctgatgtgtttggtaaggcttgagaattcagcaaagtcatttccacattccctgatgcagggtcttctccactgtgaattcatatgtgttcattaagacctgagatacaaagttgcttccacatttttacattcatagggtttctccccagtgagttttcatgtcttcagagagaacagggacacctttaggttttcccacattccttatgctgacagtctctcatccgcatgccttctttcatgatttcgaaaggaactggaagaactgaaggctttcccgcactccttacattcatagggtttctctccagtgtgagttcgttcatgtaactgaaacgaattggagtaactgaaggatttcccacactgtttacatttgtagggtttttctccagtgtggatccgcatgtgaaggttaacacacgtgggaaacttaaaagctttgccacattccatacacgtgaatggttttttggcgctgtgggtccgcatgtgattattaagact

SEQ ID NO: 161146 - DNA, 1000 bp, Homo Sapiens
tttgtattcacttatttaataatagttcagaagaagctatctcagctgtacaagaagtaattcagtttcagaacatttctcactccaacaaggtgcattttcccctctggcgctcagttgtataaatctgacctctttccctctcactcagagatctcttttatgtatttcccaggttggctggcatagtcaccttagaatagcccccaaatgtggaaattctgttgtcaggagtcatcatttccagtaagaaactcactgagtgacagaaaatgaagactaaagatcaaagattactaaattaatttgcctaaaaccaattcacctaaaaccaattagtctaaaataaatatttatcaaatctgcagcatttcaaaaggatttagcagattcacccttttagttattactgttgtctgtataacttttcattgtaagtcaactgaatatgcctcatgcctattcatttgtttaagatatactggcctttttaacagtaggaatgtagaagttagaccaaagcatcaaaatcacattgaactccattatatttttcaaggcatttaatttgtaaaggaatattggattaagaaacaaaaaaatgatacacaaaatgtctgtaccaattgtatttattgctagaaactttaaactttttaaaaaagtttttgaatggtagataacatagaaaaagacatccataaaggtaggaagcaatctcatcatttacaaagtgctgcaaatttgataaatttatgttgctgataatagctcagaagtactcttggatgaatagatataaatccttgaaatatccaaagcatgacaaaaaagaataggacacctaaatggatataaacacaccaaaataggaattgagcttttggcaaattagtcattaagtcattaactttaagcaaacaagttttcagtaaattggttttaagagatctagctttaggtgaactagtttcaagcaaactgactagtatcaaatcag

SEQ ID NO: 161147 - DNA, 1000 bp, Homo Sapiens
ttttttttttttttttaggagaaaaccacttttaattgaaaaataaagcaatacatctcaaataagactctgttttaacaataaaactgtaatttgttgaaatagctttcctaagtggtattgtgaaatttaggtattggagtatcaatacaattccctcctttaattctgactcagctataagtaatattaaaaataaacttttccccataaatttaatttccataaatctgtaaagtctatccctattcccaatgcactgacaaaaagaggggaaattttaaacaatcattttcatactgagaaattctcagataaaagcaaataaagtattttccttatgaaaaagctgatatgtgagacacacaagactatcaatgatatttaactcattcacaaaactttaaaacacaattccatcaagatgacctctactacaattttcctttaaagaagttcccaaatcccagaatggtttaacttgacatattggatgtattaaactttgcaaatcccagaatggtttaacttgacatattggatgtattaaactttgcaaatcccagaatggtttaacttgacatattggatgtattaaactttgaaagaaactatgaaagttattgctttaaactggaaaacactatggtcaaaagtcttaaaaaggagctgttttttaaattacacccatgtaactgaaagaaaatgctcaagcacacacatagtaaacaccactctttaaaatgacagaacaaaggcgtatgttcattaagatgtatggcttttcttgtggttgttattacaatccataaataaagtctttactgtttgactgaaaaaggtttttacaaaactgcacttccaaaattaacatttttattaaatcaagttaaaaaaaatgttcagtgtagaaaagtcaacaagggttttaacaaaaccaaaatatacctttttatacaatatatgtatatattagcagcaaactacttctgagattctc

SEQ ID NO: 161148 - DNA, 1000 bp, Homo Sapiens
ttttttttaaggactacactgcattttttaattccataaattataatcctttaacatatatgaaagtttcatattcttaaagtgctttaaaatatatttaatttttttaacaagtggaaaagaatgtttcttaaaagacatttaattttttagtggaaattaatattaccaaaaacattctgtgcataacaatttgaataacaatttttttatcttcaagaaatgggatttttatataaaatacacatgtagcactgaatgccaaagtgatgggtatccatggtcagaattcaaaattagattcgctattaaacctgtctggtttgtgtcctgagtgaagaatgatctcgagctggggagggaggtgcattgggtaatcagtgcttttgaaggtgaatttccttgctgtgaaataggcttgggttactggtcaggacaaccattcagactgacaggcccctggacttccaaggcttcagtgacagggacagggatgtgattgacatgaatattcctcagacagccaaagaatgatttccacacagggatcctcagtgtcgtcaaattggctggagcacctccaaggtgtagtggctcttgagtgctggcaggtgggaaggggatctgtccagctgtgtagctactgtctgtgtccagttccaggtgcaggatgtgttgttttatggtgactgccaccgagtgccactgtccatcacacagagactgctttggtgtgaccgacgttgaggtcccacctgccccactgtccatagaggccgtgacctttcctgcctccaggtaaacacataagtgcttcccgggctgacttccgatgtgtattaggatcccagtgagacttcttgggcggatgctgaaaacaagcttaaattctggccccaacaatacagagtgagccaagacgacatgacctccttcttcagagaaataaatgcctttctccaaaggaccacccaagcaggaagacaccccgaagcttgaa

SEQ ID NO: 161149 - DNA, 1000 bp, Homo Sapiens
ttttttttttttttttttacattcaatcgtaattttttaatcaattaaatccaccagctaactaatcacagctaacagttactgaaagtcaggtataatagtgctctgtcagacagaagagaaacagaacatgctcttgagggacatacaatctagtaggagaacgcagacatactgaaaacattaaggtatgatccctgagaatgctaagtagagcacagttataagtgggacagcattacggggaagggcaaaatcactgctaatgggtatgggggtaggggtgttcacgcagttaggcttcatgggaaagtgggatttaagttgggcctggaaggatggtaagggcaggaggatattggcgcccagggatcagaaggcacagaggtggccgttagcaagttgctaagtggaggaagcctgataagaagaggtgtgtgctgaggagtgctgaggagtcgaggctgctaaaacagatgctgtggcaggcagcagggagccactgaggtctgtggagccttgggcaccatgacacgactggtatgttgtaatgttctgccccatgccaagccatattagagcctgggacaaaaggaaaactcagtaatactaatcctgtctttattttaaattttaatattttgttcatcatggttttttttgcattaattctgatttttaaaaatattggattgaaatattacttactttgattactgtatttttttggcatcccttacattttgtgcccaaggccagggtctcccttgcctcatcctagtcccagtcatgagttctacttctgaagtccagtggtgggtacatgggtatttatttcattgttattaattatagcttactcatgttataaatattatttggttagtaaacagcacttaattaaaaaaacaatgtaaaagacatggattttaagattaattagaaactattgagcctgagaagcatgaaagagaaaagaatccttcgtgctgccaagtcg

SEQ ID NO: 161150 - DNA, 1000 bp, Homo Sapiens
ttttttttttttttttttttttttttttttttttttttttttttttttaagggtcttaccatttgctttatttttttttttcatttttcccaggtcaatgaggcagcaacattaacaaaaagtgagacatacttttttcttgcaagataattcaataattcttcccaaactgatgctccacagataatcctaagaggttttcattacatttagcctaatctggaagatctggcattctacatatcaaaaataactcccaggctgatatgaggccaacccatgagcactcaattccacacaggggcaatacctcaagcagagagagggcttcaggccaccccacttctggctctttccagtcctagcaggtaaaagaggagatccaggctaaattttctggcccttcaggaaggctggcacctctggctctccctacctggggaacctccagggctactggatcagcagggactttgggggttgtttatggacccagaatttgtgcaagaagctccatgcttgctgcccaacaaactcctgaatgatctcagcctctctctccttttctgaacacactcctttgttgaaaaaggagactaaacagattcaagaggctcactgatgtgcacttggcaatgacgctattgtcaaaagaacacagaatttatttgtagcagcttgcaatgtcccagggccagagagggtggattctcttaggacgcctgggagcatctcaaatggtaacatttgggacagcccagctggggaaatgctgcaattttagctgtgcaaattgcaaatgcacgtggaacccttgctgccacgcaaacaggggaagcaccagaatccttttctatgcagccagaggctctgaacggacaggctcccctccttctccttctctctctgattcccaggttggcttgctgagttctctcactcccatcagcttttctctgctgctctgtccaagttatttggataaatgggaacaaagaaa

SEQ ID NO: 161151 - DNA, 1000 bp, Homo Sapiens
ttttgtctttacagctttaatctagcaggccagagatgtggccagtggggcagccagagaggagggctactgccagctgctgacggaacctcctccctccccccaccccagcccagaggggacaaacagtagggccccagccttcctggctgggatcttgggagcagagggactatttgaaaacaggcactgtgacccaggctgtcatctccctcccttgcccccagtaaaaatagcccataattccaagccctccccccaacccctcatagttctagttcagctcctgttccacttccctggggctctgtccccagtagggcccagggcttggcttggtctggggcctggtggctggaggactcctgccacccccaggaccagatgcaggtacaggatgagggcatctcccaaggttggcatcactgaaggggcagcagagacatggctggttcctcaggctcccgggtaagagggctgtggtggcatatagggaggaggagctgcagggttgtagactgggggcccagctgggtagagtggatattggggagcaggaccactaggtgggtacatgaagccaggctgtgggggtgcagggccagctttggggtcctgggggtatgggtatactggctgcactgggatgcctgtcattggaatctcctggccttcaaatgggctctggagctgctggcgccggcggtacaggtagcaacaggaacagaggaagcagcagatggtggtggcaaccacagcaacaaagaggatcacagctgaggcgatgcctgctatggtcttggggctgaaggccaggcagtgcttctgctgcctctcggtgataagcaaggtcaggtccctgcagcagtaccgatggtagcaggtcccgcagcagaaggtgaagaactcgcagttaaaccccggatgccaggagccattccggtccaggtaccacaggcagtcctcgccggccagcaccaggggagcccccagcaccaac

SEQ ID NO: 161152 - DNA, 1000 bp, Homo Sapiens
ttttttttttttttttttgaggcagggtcttgctctgtcccccaggctggagtgcagtggcatactcatggctcactgcagcctccaattcctaaactccaatgatcttctcacctcagcctgccaagtagctaggattacagatgtgtgccgccatgctaatttttaaaaattttttgtatagatgggttctcactatgagcccaggctcatcttgaagttctgggctcaagcaatcctcttaccttggcttcccaaagtactgggattacaggcgggagccaccatgccagccgtcactctcatttttgagcacaggaattgtgcccaaaggctaggataaggaattaaagatgcatgccaagaaatacccacaaacattaattataaaagggagactatactaatgtttgtgaaaagcttatactaacatagagcaatatttaagttataaagttaaatgaaaaagggtataaaactgtatgaacagtacaatctcaactatgtaaaaaccaaccaaaatctgccctaaaaaggctggaaggaaatagctcaaaatgttaatgtgattgtatttaagaagtgtatctaatagggatcttttttcttcctttttagttttctgtcttttccaaatgtttctctactggggagatttttttaaaaagctattagggaaggagtagaacaaaagtggaaaaaaaaatctattagttacaaaaaactgagtctgatagaagcattgaatttgagttaatgaatctaagtctagcctataagaatttgtacatttagaaaactatgaaacagtccaggctactccatgaatccattggtaggaccagaggctggaggtggaagtgccacctggtcctgcctgataaaaaatgctgaatcagccaggcacggtggcccacacacctgtaatcccaccattttgggaggctgaggtgggcggatcacctgaggtcaggagtttgaaaccagcctggccaacatg

SEQ ID NO: 161153 - DNA, 1000 bp, Homo Sapiens
tttttttttttttttgagagacaataggaatttttaatgcatggacaggcctgcagggactctgggcagacccacaggtagcaggaagaggcagggtcccacaaactcaataatgtccagcaaaaaagagagagaagtccttaaagacccatgcttcctcactgcaaccatcctcagagcttccttcctggtgctgaagaggtcaaaactgtctcctctaggggtcaggtcaaaactgtccctccataggtctcctccaggggtccatggcaggaagaaagcagagtgtggcaggaagaaggaagaagagcaaaggccgcttggtctccacctgaaaacttctgcctcgggattgacagccatccataagaaaaggtttaaaaaggagagacttttgatagagtcaaataatatgtgtttcgggccattgacaccatcttctcctcacacgtgattttggtgtccttgaggatgctataccacaccatgcctgcaggccggacctcctcgctgcggcagaaaagatagggcactgtttccacgcggctctggatgtaggcactccgcaggaggctggagcagtggctactcaccctctccagtcgccgtagaatcaggtgggccttcctgggccccagctcatcctcacttctccagacgaagtcgccaaacttttcatagtgagagttgtagtggtgctggactcggaacagcatcgaggctgagacctccatcagtgtgttgtaggccatctgctgctcctttccacttgtgtacccattgtacagattgtagatcttgtcagctatttcttctgccttgttgtcatctaccagtggacaggccgtcctcagggtcaccgtgcttagctctgagtgcctccctcgtgtatccacagcatacagagtgaacttgtagagaccgtcgggctccagacacttgaagatgactgagtagatactgacttcagggacctctccatggcttcgaccagctgcta

SEQ ID NO: 161154 - DNA, 1000 bp, Homo Sapiens
ttttttttttttttttttacacaatatatgattttattaataaatagtgcaaaagcatcagtgataactgtttgaacattaaattttttaaacagccatgtcttggcattagttaatattgtgcatattggcctctatggcactacaagtaaacagatgaaaatattgcccattttcatgcacaggtattcagctataacaccatttacaaatcattatgaacaagataaattctgcaataatattcatttggatggccacaattaaatgagtgttatatcaagaaatagcctatgttcaatatactccagatgtcagattgtaaaatgtaatgttatttaaaacttaattctttattttccttaaagggacaccttttgtgtatttgggtactcaaatgaaaacttaggaatgcattctttgaccataataacaaaattcacacaaaagaggttgtatgcttcctcctctaaaagaagcaatacatttgctcataatctctctctccaggtatcatttctcatattattaatgaaaatgcttacaagcaccaacaccaaaattctgtcttcaagggaaggttacaaagttaaaaaagagtggttcattatataaaaaaagacaaatcgtggcaacactattgctaaaaatgacatcgattcaacttcttagcatccacaaagtatattatttccatgagttttctattatgtggagattttccttaagaagtaaaatgaagtttgaatagtacagtctgtggggtggtgacatcagcaaccgccagttcttgtccatcaacaagccccaattctttcaatgttttggagagatttggccttgttcgttcttcaatagaggttaccgactgtaagtaaagtgttctattttttccctctagggtggctgtgatggctggagatttcatttgcagagaagcactattggttagataatccaaaacctcctgtagtttagctgatggagaaaactgaatatt

SEQ ID NO: 161155 - DNA, 1000 bp, Homo Sapiens
tttttttgcccatctgaaaacgggtggttttatttcttgtcaggctacagagctgtctgatgcaatacttgaaggataccccaagagcaagaagcagttctttgtaagtggagctctcttccttctttgcttccctgtggtcttatcctggtgacatctcattcacttgtctccctgtctcacaggaggaagttgggatagagacggatgaagattacaacgtcacactcccagacccctgaggggcccacggtcaggactggtggggactgcaggatgtcagaagagtgagatgtcttgcactggctaccttgtttttggttggcttttgttgttgttcctgctactttcacctttaagcagagcagtcaggagacaagcataaaccagagcactgggtagagaggatgagggctggtggctgggggtagacccagcccatttcattgtctaaattgcagtagcttgaggttaacatttagacttggaacaatgctaaaggaaagcatttggcaatatttattataatttaattttatataaaaatatttaatttcctctggatagtcaaacctgccagatatcaaacctgaggaaggcagaagtgaatttggagaactagggtagagagaggttgctataaaacgagcatttggagggcccacggcttcactcaggacctgctgggcttgtgtaccccaggagcccttttaagtatcttttgtacgcttttcaccccacccccaagtcctgggagaaatgcaggcaacactgagacatgggagaggccaagatatgcttgacagaaagggtgattttgaggctcagttaatatttcaaaattgtaaccgtagcaaaactgcattggtatttagaaaaataaaaaatttccaatatgtagtgctgtgttatacctgcctctgccatgcagcatcatagcctgtgggaaccgggagggcttcccttaccacccagagcagaggaggaaggtgatggaata

SEQ ID NO: 161156 - DNA, 1000 bp, Homo Sapiens
gcaattataatgttctcttaagagtttattataaaccagtttcataggccacaaggagataaaaggactatgtacagccttacgggaaacaggcagggagctgaggagggccaagatgagtctagggccttggtgggcgcattcccgggggagggggccctcgcatcccagggggaggaggccgcattcccggagggggcatgcccattggagtccctcttccaggggggatccccattgggggacccataggaggtctcataccaggaggtgggcccatcatgcctggagggggtgctcctcggcccataggtgggggaggacccccacggccaggtgggtactgggttggagccccggcaatactggctgtggcagcagctgcagcggctgcaacagtacctcttccttgtggggtcatcacctgttgggatggcccgccaaccccacggactggcccagcaagtcctgcaggagcctggggcatgggaaccccagctgggattcctctgccagcagccctgccgatccctgggcccccggcagctccagcaagtggaactcgagcaataccagtatctttgggaggaggtccctctactgtcattgagaccagattctcccctcgcagcagcaccagaccgaggactcgcttctcttccctttctgcttgtttggagttctttggcttgatctttctgaactcatcacagtcacagaggatcaaattcatgtgcttgtcaaaagccttgaaggtgccaatgaagatccggccgtcctgcaggatgcacctcatcctgtaatcaatatgctgcagcatcttgctgctcttgcccaccgtcatggtggcggttctgatggctctgatacccgccggattcgcctcctcagaggcctagcctctctcccacagccgatttcccgccgccgctaccggaaatgcagcaccacgtaaaatgcggtcgggtagaaacctacttccggtccagctcactagccc

SEQ ID NO: 161157 - DNA, 898 bp, Homo Sapiens
tttttttttcaggtgtttgcaactgcgttttattgaaagaaagagtggaggggttaacatggggcccacctcacaacccactcttcacccccaaaatcacgcagggatgggactcaggaaagggaagcatgtgtgtgttgaataggagccctaactgtagttacttctttcacagcagggaaggaagagggaagaggcagctgtggagaggatgaggttgagggaggtggggtatctcgctgctctgaccttaggtagagtcctccacagaagcatcaaagtggactggcacatatgggctcccttcacaggccacaatgatgtgtctctccttcgggctggtccggtatgcacagttggggtacctggagccgtttgtcaggcggcagtctgtgatgtgcatgctggagttgctcttgtagcagttgccctgcccgttcttgcaggtgaccttttcctggaaacagacattctggacatctaccaggggctcgtgcacaaaggtgttcactggtttgcaccgcccctgtgtcatattccggcgcctcatcatttggttacagtaggtggagctgctgctgggggaactgtctgagtccatatgctgccgctggaatttcttggcccgggattccttgcccagggaaggctggacccagcccagcaccagcagtatcaggacaagcagaaggagccggacaagagacttctccagagccatggtggcctcactttcccagaaaagcgtgtacccttttccacgagcgttttattcccactctccaaagcgaggtcttcctcccctctaggtggtgacctggatctgcagcttggtgtctgagagagatggaaggccagtttctgcaatcactcagctcccggggtgtggaccttatac

SEQ ID NO: 161158 - DNA, 1000 bp, Homo Sapiens
ttttttttttttttttgaaggatatttaacttttcttaaaaaaaaaatcttaaccatgaaaggaagaaaataaaagagtatacattatcttaacagcagaacagtcatttccatatctatattttatatattatatatatatttatatatatatatatgtatatatacacctagcacagtgtgtatattctattcatcagggagagttgggtgaggacgtggtgatggggccaatgctgcggtggccccttggatggtcctgggtgaattcagggactcggcattcagacccctgtccccacctcctggggcccagtcctcagctccgtacctgcttcactggttttctacagggacagggtggggaagagggggacataggtggggtaagaaacccccatgatccccatcttgtgaagatgagaagtccagggagggagggagtagcttggcagcaagctgtggagggcaggctctggagccaggtgggatggggagccagaagaccttcccactcacagggacaggaacactcaggcctggctcccgctttaggctcgatcctggaactgggttgttaactaaggagatacaagtgaaacccctcttccctaagcagctccttccataactgcctccagcacttcaggaacaggaacaaaaaaggtcaaagttatttacaatagcaaagatgcacatacgatacatacatatttataggaaaccaaagtgacaaagaggggaggggaggcacccacctctgcctggggtcttatggagaaagaggggaggaagaaagtgcatttacacagaagcctcctcctttcacttgcatgtctgagggcagcgcacatacaggcgtgcgcgtgtacacacatatgtggggtgagggcagaccatggtgagtgggggcctttcggatgcagtcagcatgcttaggagacatgaggccttggagggttgggctaagggagggaaaagacactgaaacctgactccg

SEQ ID NO: 161159 - DNA, 1000 bp, Homo Sapiens
ttttttttttttttttgagcttaattgaattcatgtttaataattacaggcaccgtgcccccccttccccctgcccaggcaacagcaggggtggtacaggggctggggcatatgcccccagcagcgaggacggcagtcccgagagtgattttcagaaaataaaaaaaaggaccccaggggcaggcgttggtgcccctccccaccccaagacacaccaaatttcaagactttatatataatatatctctgtgccccagggggaggagagggacacctggcggcatcctggaggggggcccaggcagccccaagccatcctgcctcttcagccactttattagttcagacacatcacactacaggcacccactgccaccgccgctgctgccgcccccctgcagtccaggcggctagccgggccatctgtgtgtccatggggctccaggtccccggccccaccagccctcagttgtggtcagactcctcctctgcttcacggagccacttgaagaaggctgtgacagatttaagggccacacccttgccctgctgctcagcggggtccttgctactctcccaactgtagaaggcatcctccttcaccacgtcctcgtcatacagtgcgtcaaagaacatccgcagcaggttgggaggctgttctaaggtcactacaagggcctggagggcgtagagcgcctgtagctccttctgctcgtcacacaggtatttctgcagcagcttcgctcgcgctttcagcactgcaacgtccactcggaggggagtctcaaaaataattgcagaatagcagacagccgtcatgagggctcgaactaacgtgttggatactatctgctgctcactcaggttggcctctatccagtcgaacacccgctggttactgctgccctccttcagcagcttctccagctgcctgttcagctcctcggaggggagtgccctctggccaggggcttccgactcctctcccagggtatactcc

SEQ ID NO: 161160 - DNA, 1000 bp, Homo Sapiens
ttttttttttttttttttttttttttttttcacacttcaaaatgtttttattggatttaatttcccaaacactgacattttagacaattttgcaaggactctgaatttttgcagggctatttttggatactgtaaaaaaaaaaaaaagaaacaacacacacacacacacacactcatagcagagctgctctgctcgctctaaggcctctttgagggaaggacagttccaaaaggcactgaccggtgacatgggtgggccctgcccctcctcaggcagccagctcagccatggccctgtccaaggggtccacagaccagtaatcatcatcccagccaaggaaccagcccacaaaggagggaggctcaaagccttgcttcaccacggtgatgggcgtccgccgatcccgattggctgggtccgtctcgatgtaccgcttagcagaagtcaaggcttctgtcttttcttcttcttgagaatcctttccaacccagacaaagacctggtcccaggtgtccagaagcatgacgtcatccgttgccaggtcttcctgcatgagctcaccaggaacctcttcgatcacaaaacgtccaatcttgttggagcaggcaaagaggcgaggaggatgggcatccatcttcttgtccttcagccgtggggatgtgcggtaggcagccttcccgcccagggcctcccagaagccatctggctcgctgccttctgccacctgcacaggttgggcccgcagcaccctgagcagctcctgggcccccgtcttctctgcctcgctggctcctgtacccacccacaggtaggcggctgagggggttttcagaacaaaggcatcgttggagttcagtgcaccagccttaggcaatacctcaacagcccgggtggctccagcgctgttggcgcggacctggaagaggcgggtgctggcaggggctgtctgcccgccctcgcgggaggtgccgcccttgtagatgatcatgggcttcccac

SEQ ID NO: 161161 - DNA, 1000 bp, Homo Sapiens
ttgttataaggcactttattaaaataaaagtgcttacatccctttaatgcattaatctatctcctgaataacacatgtaatatttgacaaatactgaataccaagtctgtcccttataataggaaaacatactattttagtaagttttctccttccaccttttacatttttgctcaccacggtattgactgtagtatagttaactggccttaaaaagggtggtggggaggggatttctagctagtgttttctaacagcaattgccaaatgctacagaaactataaaacaaattcaaagaaacatcccaggtaacttaaattaacaccagttttgagaaaaccatttttattatcattaccacccagcttatctgtgctggattatgtaccaaatggccagatcttctaaagaacatctacataacatttctttcatgtttcaagagatgaaaataactgtacaaggttaagtacaaaagtacacaagacagcggacacgaaaaaatccatgtatgagattttatccccacctgcagcttttatatatttgaaaagtagaattcatgaactaaaaaatattatccttctatagtcctgtcaagtttaatggaagtgggtttaacctgattacaacactaacaccagtatcactgatctgatatttacaaaaatttgtatttttcaataaattaaagtcaatgcaacacccatgcaagctagagtgctagctgtttggtgaacaaggacgtgacatcagaacaagaagtctataagtcccaaactttacaagtgtgatcattttcaaactgcatccattcctcgcattgaagatgtgaaacccaaacccattcctctttgtgtgtgggtttgtgatcttgccatttcatactgagcatctaaatttcgaaatacttcttcctgctgcttcagagtcttgtaactttcttcatcaactgagctacatccagcttcatcttcactcttaatacccatcaatttc

SEQ ID NO: 161162 - DNA, 1000 bp, Homo Sapiens
tttttttttttttttttttttttttttacactagcatccaaagtttatgaaaaacttccacacactcagtcctcacaacaaccgtgagggaggtaaggcagtgattatgatcccatttcacaggttgaagacaccgaggctcagagaggggaaatgactggcccaaggggacaagacgcatcttaagatgtcaagtcctggacccttccctgcaaggccccctgtggaaggaaatagctctgctggacattcagccactgaagagagcccccagtccagaggcttggagaccactggaggctctggcctggtgaccctgggtctcaagagaaatccgtgcggagagggaggggcttttccattccactgatgaggagctcaggctcttgggacatcgtggaggtactgggcaccgctgaggtcttcaagctgcccacagtaacctcttccttttcctcctgccgcaggtgccggagaacctcctgggacagcgagaagctgctgtcatctgcaggttcctggtaggcaatgaggcggcagttgttctgagactcaggggcatctgccaggatgtcctcaagtgtccggcagaagagtttggcctgctcaagcctatcctcccggctaaagccagcttgactgtattgtgacatggcaaacaaagtctgcaagggggtggcgtactccaggacacaggtgcccgcccgctgcccgttctccagaagctcatagatgctgttgctgtaaacccgatccttgatgccagcatggtcaccggtctgctggggcagtttatccaggaagcgaatgttggggtcagccatactcaggttatcaggcaccccacagtccaatgggaggagaatatacagccgctggctcactgcaccccgtagcaggttgttgtaatgctgattgtaagttcgaatccgggcctggagctctggcaggatcagccgcagatatccgatgtaatatgaccatgccagcccatgggcca

SEQ ID NO: 161163 - DNA, 1000 bp, Homo Sapiens
tttttttttttttttttttatagtatagcagtacgtatgtatagcacaaatacatcatttattggaaattaagtgaaagatgttttatggagaaaagatgcatgatttacaaagttttggagaccccctggtctgaggcctaccctccagcacctctgtctttcccaagttgagaacttacaagttctcggacagaggcaccactctggtttcatgtcgtgtcctaattctggcatgccatcctctcacattgcatccaacccagaggacgcaaaatgaatgctcagcatgtttactaaaacagtgtctctacaataaacacagcaggccaacatgtatagcttttatttacctacccaagttccttttacatgtgagttatctgcattccaccttgccccctctcccaggatgaatcctcttggcacagaggaaggggtgccccttcaactagggccagagcctagatgacctggtggatcccccaccatgaaaaaagcaggaagggaatggagaagaaaagtgttgatcacacctagccctcaccacaggagggggaatgaagaggtctgggggactgcccccatgctatgccccagtccttaaatacaaagcaaggagaatgaaaaggaccctccctctgaaatacagcaccgacctcagcatggaggcaaaaggacagtgggcaagaccacgtccctccgaagggagagggctgaaggagagcacataccgttagtggctgcggcacccctccctaccagggtctgatgcagcctcagcaccgggagtggggagaggggaggagaagggatgacagcactgtgccatccactcctccctgaacccctggccccagcacaggcattcctctgcccactagcccaagtcaggggatgtggaagaaactgtgttggaatccaaggcccttatctatttcttcttccgttcttgggagcagcgtgggcaaaaccatttcccccgaggcttggttgtcagc

SEQ ID NO: 161164 - DNA, 1000 bp, Homo Sapiens
gaaccccagaaatgtgtttattaagttggactcgtattgctgtgtggggtcccagtgcacgcgtgtgcacccgctacaagatccaggaaagatggcacacggcagacgacgacaggaaggacacctgctccccacccttcccgggaccccgccatgtgcaaaattcgagctggggtctgcagctgcttggagagacccagggcctcttgctccacagcctgcaaggtctgagcaggcaacggccctggggcggtgaggcccccgcctggtcactccccgcgccccccatgcaggcagtggaggggaggacacgcaggaggaccagacgctaaaggtgtaaacgggcagccgtggcactcctcacccctcaataaataagataaataactaaataaataaacaactaaataaagacatgaaggaatggatgcagagacgtgaacggatggcgcaggacgtccctggtgggggccacggtccccttaaggcatgtgggaggctgcaggcctctggtggtaggtgggtcagaggctggtggaggacacggacagcgtcggggaggatggcggcgggaaattgagcagctccagcaccgccacacccacactgctgcgccgggtgaacatgcaggatgcggccacccacttgttggtcctcgggttgtacttctcgatggagttgaggctggagctaccgtcgttaccccccacggcgtacaaccatccgtccatggccaccaggtcatgcgtgctcctgcggatattcatgggcgccacgctttcccaggctccagcctttggactgtatctctctaccgagttgaggcagctggtgccgtcgttgccccctgccacgtacagggcaccctccagcacggccacgcccgctgagctgcgtcggctcagcatggacgccacgggcgaccacacgttcacctggggctcatacttctccacagtggccaggtgtgaggagctgtcgtagccgcccacagcataca

SEQ ID NO: 161165 - DNA, 1000 bp, Homo Sapiens
tacatctttaacagaaactgctctttctctcctggaccgaatgtcacatcctctcgtccgattcctcctgtggatgtaccccgttctgcctgagcattttttcctaaagggaagaatcaatagtttctgactgttttaacagctgaaagctccaactggaggcagaagatgggatggcttttcacacacgtgcgtgcaagtttagccacctccaaaggccttgttcttaaagcaacagtgctgtttgcattatgaaatgtctctggagttcccctttggaaaggctgctggtgggccacatggtcacgatactttcaagtcacaccctactttgtgaccttatcctcagagtaaaggctttagaggaaaagggaccccacagtctcacccattacctggctgtcagcatctccatatgctcctggctgagttttattgagcatcagctggggatgtgagcagaaacctgaatccttgagacaggtggttttcaaaaaggaagccataacaatgagtggcttagtactggcaattgatcagttggtccatgaaatggagccagtcaagttctgtccttccttcccctcccacatactttgtcaagtcccaggacctactgatatgggctcagcaatgacaaatgccagagtgctcagaggacacacccatcccttttcagggtgtgaacccagactggaaaggagaaccaaaggatgggaaaggcaggcccgggacggcttgctgctgctcctgctttcacaggaatcctggtcatgccaggaacactgccgcccacttggggtgggactatgtggaagtctagctagtgctcggcaccccttaacccaatggtgagaaacaggacaaacatgctgggggttcagagggtggaccgcagggatggcccccaaacaggtcccagtgaggtaatgcaaggcctcctctcgggggctgatgaggtcttctaggccacagactaaacgcactgcccagcctttag

SEQ ID NO: 161166 - DNA, 1000 bp, Homo Sapiens
tttttttttttttttttttttttttttttttttttttttttggtggaacaaatcttttattttctgaagacaagtgatttgaagtccagactgaatggcatttaagaattaggaatcctgcgtgccatcctggagtgaattaaactaaattagagtccagaatatgcagcttctttaagaaaaaattctcctctgaaatattttctttcccactgcattaagtagtgttcctcatgagacatctgaaaacattgattgttaaaatgtggtcctgggaccagcagcaatgacatcacctggggccccacttcagactcctggactctggatctctggagggtggaggcatctaggtgattctgaagaaccactggcttaaaagtctccttggtcagtgctttccactaatcagtaaatatatagagctagcagagctggagctctgtttatcacttctctttttagaatgaagtctctgtttgacagtgggaaagcctgctagaatgatcctgagttgcttgtgaagtcatacaagcaatgagagagagagagagagagagagagagcgagagagaggacttccctggctgcagtccagattggatatctgtctgcttctgagaacttgcagactcgcttacttgaaacacttcattctccgttcaggcgtctgtaagctgctttggttgttctcctggttctttctaaaagcaccttctaagatagttttcataacctagaggtcacaggcaggatactccccacccttaacatccccgacccccaacttccaaactatactggcttgaggccaagggagttccccattctttctatgaagctactcaccccctattcatattgagacacaccaactacctgggctgaagctggagcagggtaggctgggagttttacccttctgggaagaccggagaagagagacctatggtgggtgtgggtgtgctgatgatctggaatgggagaagggctcactgag

SEQ ID NO: 161167 - DNA, 1000 bp, Homo Sapiens
tttttttttttttttttttttttttcagtgatgaaaacaatatttattttaaacatactctattaatatatatccttaaattaacaattcagtaaatgcacatataggctactcactgtgttatggtctttctcaaataatttgttttcaaagccacacacacacaaacaaaagcctccactgaattttcctttttcaaatacacaaagttcagagccaactactcatgtgcttagataagaaggccaccaataaatacgtcatctaatcaggaacagtccttgatttttaaacttcatgaaaatgtactctgatattccattctgttttgaaaaatacatttggaacttatcgttgcataaatttatatgataaaataagagaatcttcatttaggtatatttctacttaggaacacacttttaaagaatgtgcacatttgagaaagattaacatttacaactgagtgtagaaaactacatttggttccagagaagtacaatctacacattacctgagatgtaaagcaggggtcttaaaacccaaaatgcctttatcttttaaactgattaaagaaacatatactcttggaaggcagaatcacctacctgagaacaatgacaacagtacccttacattgtgtgggttaaagatcaaacatcttaacagatgcaggttgtgaatactattatcaataccaaagccaagtcattttttttaatttagaaaataattcactaagaataatttactgaagtagtaaaccaacatagtgctttatagttggtaaacatcatcacagaaaattgatatggtactaatttaaatcctgaaatgttttatgtagctgaaatttggataaagcttaagaaatgccataataatgatccacttaattagaggtcaattttctatgttcttaattaggctggaacctagcaatgatacataaaaagtattttagtactgccatcccagaatccaaaaatttccaattgag

SEQ ID NO: 161168 - DNA, 1000 bp, Homo Sapiens
aaatatgtcagtaactttttaatatggatacatgttgaagtgataatatttgggatacattgtgttaaatcaaatatattattattaacgttaacttcacttgtttctttttatttatttatttatttttgagatggtgtttcactcttgttgcccaggctggagtgcaatggcgcaatctccgctcaccgcaatcttcgcctcccgggttcaagccattctcctgccttagcctccggagtagctgggattacaggcatgcgccaccatgcccggctaagtttgtatttttagtagagacgggtttctccatgtttgtcaggctggtcttgaactcccgacctcaggtgatctgcccaccttggcctcccaaagtgctgggattacaggcatgagcaaccgcacccggcctcacttgtttctttttagttttttaaattgtagttactatgaacaatgaaatacataaatatatggtttgttagcatgtgatacattctttgggaaaaacgatcacaattgggcacggtggctcacgcctacaatctcagcactttgggaggccgacgtgggcagattgcttgaggttaggagtttgagcaatcctcccaccttggcctcccaaaatgttgggattacaggcatgaacggaggggtgtgaaacccctagttgtcactggtccctgtcacagtctcttctgcccatggctccttaaagggcaggttggcctgggctctgggatgatcctttctgtgcagcgtccgcctgcggtgccactggtgcagggaggcgcgggcctcggagctgagcccccggggagcgcggtctgtttcgggctggtagtgggcaatgtggtgcagcgccccaaaccacgtggtcaggtagtacccagcctctccccgcagctcatctggatctaagagctccataagaaactctacgtccagctgcgtgtccccaatgtccgggctccagatgagttcctcggtcagcgccggc

SEQ ID NO: 161169 - DNA, 870 bp, Homo Sapiens
ttttttttttttttttttgacatttaaaaatatttattgacttctgtttgctactttcctgattgcatttaaggttaaatgacactagctaggaagctacagtttcctggaatctttcaggtaattaagcctaagcctgggtaaggggagggcacaggctaagactgacgagagaagaagacactagagagagcaacaaacaaaatgatcttgaaaaacatgctttttgagagcactggaatgatttaggggtgggtacagtgggagagtgaggtgggagaagaagagtgtctggtaggtgtgctcactgtcttcttggctgagaatgtttaattggaagagtgggcgctcagagctcctacaaaggcagagcaaagcttcttagctgacattgtttgagaaattgctggcaggctctggaatgcttgtttggctttctgtggtgcctttggtgtcttgttttcttcacattgcccttgaaatgatcacaggggcactgcttctttggcagcccagacactgtcatgaattttcttctcggggctctcaggaaccaatctttgcactcacattcttggccgccttcctggagccatctcctagaagcctggcctcggtccctgtggcctctggcgacccctggattcaggctgctagagaccatggacatcagcattagtggcagcaacaggaggagggaagagattagaactttcatcgcaactgtcggtgcagctgtaagttgcttgaagaatataatggaaggttccctgctggaggctcctgatccctggggatgactcaggtcaggatactcagcctggtggtctatgctttagtcccaggccagcgttcccatttgagggcgag

SEQ ID NO: 161170 - DNA, 1000 bp, Homo Sapiens
gtgtacaaatgttcataggatttttatttgtaacagtaagaaaaaccgggaacaaaactaatgtccttcagtgggtgaataaacaaatagtggtatattcgtatcatagattattagtggccaataaaaacagaacaatgatatgcagaacaacttggatggatttcaggttaatctgctttagttgaaatagccaataccaaaagggtacatgctgtatgattccatttttataacatgctactaatgacaaaactaaagatgaaaagatttctgattgccaagggttagggctgaggagaggttgtgactataaacaaggagcatgagggagtttgcattgatgcaacattctgaatctcgattacggtggtggtgacatgaatcaatatatgtgttaagatttcttaaagctacatataaaaaacaaacaaaaatgcatgcatgttaaaactggtgatttccaaataaattctgtagttaacagtattgtaacaatttcactttcctgtatttggtaatgaactatgcttatgtaagttgttatctttggaagaagctgggttaagggcaagaactctggaatattttggtaagattttgtgaatctaaacttatttcaaaataaaaacttacaaaaacatcttatttatattaatttcataacacctgatgttacttataaacttaaacatattcaagtatggtcaattacacttatgaactgaatatactgtatccagtttcattctgaagtactttagttattctgaaataacacaaacttagaaccaaagaaatgcaggagctaatcatataataaaatgaggcaggcataaaatactccggtattatatacaatattaaattttagttcgtgattagaggaagtcacaatttaaaatgtataaaatcagtgacaaggcaactaggaatatggctcaagctatcctgttcccaaatgcacatgaggcatattatctgttaaggttagaattgt

SEQ ID NO: 161171 - DNA, 1000 bp, Homo Sapiens
ttttttttttttttttttcgagatggagtctcgctctgtcgcccagctggagtgcactggtgcaatcttggctcactgcaatctctgcctcctgggttcaagcgattttcctgccttagcctctcgagtagctgggactacaggcacgtgccaccacacccagctcatttttgtatttttagtagagacagggtttcaccatgttggccaggatggtctcaatctcctgacctcatggtctgcccgccttggcctcccaaagtgctgggattacaggcgtgagccaccgcgcccggccagcaatacagtttttagttactcgacatctttaagcctataactcttaggctatgcatagccccatgtcctaatcaggcattcactgatcccagcaggtctccatctatttgtaccagcctcctctattcctcccaatctcaaggttactcttaaatactagtaaatgcaaaaagaacttgtaaagtggcaaggcatggcctatcaaaagtcagcccaagggcagttttcagccctgcctcacctgggtctagttcagctgacggatgagctgattgatgcgttcaccccgatagccaggtgtgcccatctccttgaggaagcccactctatttttggtagcatgacgggccactgagaggtggaaagggcacaagaaccatgagatctcctggaaatgcttccctgggaaggcaatttcatgaatgaggtcttccaagcaaatgacgccaaacttccccaggtgctcctcaatcactgtattgtctgtcagagggatggtcttattcttgaccttggcttgtccacgtttcaaaatgagttctcggacagacttcagatttggaaatccccaggtcacataaggttccactatacgcagcatttttagattctggggggtgacttttacaaagacaccactaaaaattttctttaggcgaagtcttgcaatggttctctgcaccagtaaactcacgccgtc

SEQ ID NO: 161172 - DNA, 1000 bp, Homo Sapiens
actttgtgtgttgtgttttattaacaccaaaatgtgccacatcatggtttagaagaggtggagggtgcaggcaggaggctccgaaggcccaggcagggccgccagcctctggcctctccatggactccagctggagagcctgtccgctcagcaacaccccaggcagcaccaagaataacatgcccacaagaacatcatggccaagagacgcacaggcgcatcccgcttccaggcacctttcccacctggccagaagtccctgctgtcatcccgacttgcacggtggttttggtaaccagtgggctgtgcaggagtgaaagtggggtcactttccttcctttcccagctgctggagtcggaactgctgcctttgtttggcggccttgtttcttaaatcagttccctcttagggtttattacactgggcgtggtagcatacatctgtaatcccagctactcaggaggctggggcaggagaatcgctggaacccgggaggcagaggttgcagtgagcccagaccgctcaactgcactccagccctagatctcaaaaaaataaagggggcgggggggactgaggcacaaagagatggcggagccagacgctgcgccacgcaaggctgacggtgcagagatgaaggtgctgaggggagaaaggcactggtggcgaggggtgcagccccagcgttggggaggccagggggcagagacggcagctgccaggtgagcctccagtggagccgaggtctggcgcactcagccaagccccaagcggccgtggcctgacagccgctgctcaagcacatgagcagggctctctgttccgcggggcttctggatgaccggggcagcgatgcgggcaccctggcctgggttgccaggccagaagactcacttcttgcttttgaacgtgcccaggatcttgggcacgaacttgcccaccttgctgtccctggtgccctcctccgcggggccttcccctgccccagggctgctggcc

SEQ ID NO: 161173 - DNA, 1000 bp, Homo Sapiens
gttatagaaatctgtttaatggtttaggaatgtgtacactctggctctgccaagtttccataaaggcaacttttccatgttttaaaaaatagatttggtataaagatttatatattcataaataggtggcatgaaaaattaccaaatgcaaatggaatacttgcgctgactgaagccctgttcaccccaagtccaggccctgcaggggtccgagggtctctgctggaggaggccccaactccggcagcctcttagggaagagaaactgaattaaatgtgtattaggaacccctccagctccttaagccagcgtcgcactggccccaccgaggcctcagcccacctccctctgcttccccccgccacctccaccattgccccctcccctgcactctggcccctgaccccacctgttcccactctttggcaatttatcaacaaaggaagagatgacactgttctccttccgccccagagcccgggctgccgggagagcttagcctgccaaggggaggaaacaagccggctttgttttgtctcacacacttccccgtcttcactcccagcccagttttaagggccggaagggcagtggggccccctcctggtgggatacagcagggcaggagcccctgcaaccccaggtacaggtcttgagtccctggacaccggcttttgtgcctgagagggggtgggaacgcttctctgtaggaaatggcttcagtccaggatccaggggtaggggaacctcgaccatggggtgggttgctcctgccagggggtactaggggcaaggccccagggtggagccagttctgggagctgtgtccagctaggcatctgtgaccccaaatggcatgaataaaagggcaggttgctaagagccaggggagggcatggggcagggagaccaggttggcccagacaggacagaggtgctccagggacagggtgctggagtgaagccaggtggagcggtggagctgtggagcctttgaaa

SEQ ID NO: 161174 - DNA, 1000 bp, Homo Sapiens
tttttttttttttttgagaatttaaaatcatatttattgttttgcaaacaataacttagacatttcttaatattttaaaaaccccaacacaaagtaataaatttggcttcttttccccacaaaaatgggaaatacctttcagtaaaggaaattttaaattatttttacacaccagttggttgttggaatttatagctctttaacatatgacatcagcaaaaataattagcattaactgattaatacataaaacaatttacaatcatatggtaagcaggaaacaaaaaccgatcagaaaacaccgttttatagtaattttcaaacagataaattattacagtatactttatccccaacatctctgagcccattaacagagtacttctatacatataaagatataataaaaggatacggtatttattgcaacagcaaattaaaggttgttaaaatatatgtaacttaaatacccccccaacattgatatagtggcttcttattccttaaacatagaaattccactcttcattgtagaaagataaagttctttcatcaaaaggcacattcttatcttcgaggatgattggcatcaaacaacgtgttgtcatcatcctcatcatcctgttctaaaggtgtcaattccatattttctatgttagtgtccaaaactccatatctcctagtctttcggtttcttcttctcatcctgaccgtcctgaccacgaagtacaccagcaccgcgccgctcaccaccatcaacacggtcagggcccgctgggtcatgggcttgtcgccagggttggggctcacagcaaggccgccacccaccgagccttccccggccttccctccgtgatcgtccgtctcaagcccggccacagggttgctgccattgcctccctcggagccccgcggccccgcagcttcagccagaccacggcccggctgctgggcaggggtagggcccggtggcagcggcggtaatgtccgtggtctaggg

SEQ ID NO: 161175 - DNA, 1000 bp, Homo Sapiens
tttttttttttttttttttttttttttttttttttttttttttttttttttttttttccagtggtttgcagttttaattatcctgatagttgaagttattcaaggtagttgtagacgttttaatctgactcctacgagaattgctgctattttccaaataaaaattgatccacaaaatgaaagtcgaatactactaggacttgactaggtgtcatgcaagtactagttttggctttttctctgagccttagttttcttattgtcatagagactaactgaagtagatcacttatgaatttccccattcaagtgctttcataaattcctcctcagtgaaagatagcatcttggcagcttcaatatgcatcttttgcctttttaaaacatcaattaattttaactgtttcttgaaccctatcattaattctcctttttgtttttctagcttcttgttttctgattttaacacttcaatttttttgtgttcttcatttgctatgtccttgttattttgccttaatttacttaactccagtttatacttttctgcttcttctagagctctattcaagcgaacctctgtggcactttgactacttgcagcctgtttttgcagtcttcttttattttctaattccctttctactgaagacaactgttgctgtaatccatcatactttttgtttgcttcttcgaaaagagttttgtatttttctacttgagactgttgcatattaattgttcgctgctgtctcataaaatcttcttcaaaattttttacttgagactttaaattctgaatttcatcctcctttttattgcattcacatacaacattatccaattcctcctgcataacatggagtttggcctttagaaatctgatctgtgcttctgttccaatgtcattactaacaccagaaaaaatatcatctatatattcaggtaagccttcttcctccagttgcccttcaattttgctaattgtttttgcaaggga

SEQ ID NO: 161176 - DNA, 1000 bp, Homo Sapiens
gtcccttcaaagatttttttttattaaatggttttttaagatcctaaagtctcccagtttcccctatatacataagaccatttaaaccacaacctggttgccaccgaccctttcgtgatgattcttggccaaacccctgaactacaagcacatccatttacgcctgaaaccagaattgtcctgagattcgagcaagacacaaggcggcaattgggtaccacagcttcatggaagtaagtggtgggaatttgcatattattttgttaaatgagggtccagttcttttgggccatggcccaaatttgttgatcccagtgagggtacagatgagggcctggatttagggtgtgcggtaaggactgcccttcacagaagcaaaacaggcagctgcccctttcagcaggctcggagtctccctccaaggcagggtctgccccgagggcttacagggggtttttccggacatcaatcatccccgggctggctcgtcgcagttcccgccggggcttggacaaaggcccaaagttccagggcaggcctgcctcacccacaggaagcacccgccccaccaggggctcagccgcctcccgctgcctcagttcctcgggggacccctgctcctcaccacacaggctcgagcgtttccaggtcaagggtaacggagcgtggaccaagtcccgcgtctcctcccgggtgcggggggccccctcagtgaggggggacagccagagaagctcgggtgccaggtggagctcatcttcatttccaggagcctgtctgccctccgagcacaggctcctcttctccccacccctgctgtggcctacagcgttcacaccgccgagcttctgtttcagttcctggtttatccacatgtaacggcccagttccttctccagagcttgaatccgggcctcatactgcctcctgctgtctgctaacccttcaccgaggtggtctcgactctgctgcaggagcagctgcatgttctgctcgtgct

SEQ ID NO: 161177 - DNA, 1000 bp, Homo Sapiens
tttttttttttttttttttttttttttttttttttttgaagaagcatttattagcatgcagggcccatgctagaggctccttatttccagggcaaggccagcgagacagagcccattgctcaggacgcagcccagattgcaaagagaggacagcccatggtagcggaagaaattctggcggagagcactgtacttggggtccttctctcgcagctggcggtagggatcgggaccctggtggctgcctggtacctccccacccaggcctcgctccttctccacggtttgcagggcccacatggcagctgtggtgcggggttccagccagcgggcgttgacagtggccagcgtaaggctcaggaacagcaggtaaagctggctggcctcccagaatgtgagctgagcccaagcatgctgtgaagccaagatgcagaggttgatgaaggcacagcccatggagatgtggaagtagaaggggaagagtttgctctgcactagtccgaaggtatgtcggggaaggcttcggaaaagcaggaagcctgagacgaaggtcacccacatttgcatgccccaggcacctgacaagaccagtagatggaccatcttaatcaggcctcctaggttcccgccttcctccatcttgcagtcctgggaaggaggcaccgggtggctcagaactttacctttgcctcatgcgtggccttcagaccctgtgagcccgctcggggacagggttacggccaatccagcagagattctggcaaagcatcccgggaatgagagtgagaaaggcccaaagcagtcaaggcccaaagacaaccctcgaccccatctctccaaatgtcagccctcaagatctcaggctctctggacctcaatctccatgccacttcagaggccccaaatttcagccacagcagctccagatcatagccctaggtcttcagagatcactccactaattcccaaatatcaccccagggatccagttctgacagcc

SEQ ID NO: 161178 - DNA, 1000 bp, Homo Sapiens
gaggtggagtcttgcttgttgcccaggctggagtgcagtgatgcgatcttggctcactgcaacctccacctcctgggttcaagcaattctcctgcctcagcctcctgtgtagctatgactaaaggcacatgccatgatgcctggctaatttttgtatttttagcagagatggggtttcaccatgtttgccaggctggtctcgaacttctgacctcaagtgatctgcccgcctcagcctcccaaagtgtcggggattataggcatgagccactgcacccggccatctcaacagtcttgagttctggccaggtatcttgtagaatgtaccccacgtctggatttgtctaacatttgtctcaagatcatacactgggaatttgggtttttggtaggaataccagggaagtgatgcacccctctcatgacatatacatgacatcacttggttaggtgtctgccaggcttccccactataagtttgtgacttttccctttccctactttagtcgtgggaagtatcattaagtctagttcaccttcaaagggtggtaatgaggtgggaatatgggggtaaggacaggaattaagctccacctcgtctatagaagagtgtccacatccacatgtattatttggaaggcactgttttgagacctgtttttctgagtatcaagtagcctgacatctctccatccagacaggctattcttcacctgagcaggggcagttgagcatactgtgagcacttttcatttgcttccattcttcttgctcagggagaagaaattggcctctgactccacaggctgtgaatgctttgtgctacctcctgcagggtctgagtggtaggtggcctggaaggagcctgtagttagccttaacctcaactcctgccccaggcagggcagtggcagtggccacaactggttgggaaccagggcacgcccactggggaggcacatgcaatcaagtggccagggtctaaccatgccatagttct

SEQ ID NO: 161179 - DNA, 1000 bp, Homo Sapiens
agtaaaaagatacacagatggaacatgacatgttaaaagatgctaaacatcattagtcatcagggaaatgcaaattaaaaccacagtgggataccaatatacacatgaaattaaaaagactgataatctagatgtgaaagtgcagtgggaaaaaataaaacaatagtaaaaagtaaaagactgataagcccgaaggttgaaaaggatgtggaagaactggaaatctcatacactgctggtgagattgtaaatggtataacaactttgaaagaaatttaagtttcttctgttttttgagacaaagagttttgctctgtcactcaagttggagtgcagtggcatgatcataactcactgcagactcgaactcccaggctccagtaatcctttcacctcagcctcctgagtagctgagaccacaggtgcaagccaccatgcctggcttaacagtttcttaaaaagttaaaaatacacttcccataccacccagcaatccagctcctctgtatattcatcaaaagtatgatcttctgtctgaaaagtctctatattctcaactgcagtcccatcaaggagccaattatatttttcaacatatgtctcataatgctttcttgcaccttctaagttccgatgtactgctgccttcagtgtatcaacagcccagtgtaacacgtgttcaggaagttctgtgtcaagatttactggtgttgaagttcctgatagccaagaggggattgtttggacattctgcagagcttcggctattcgttccaccaaactcaagacattatcttccaaatcttgaaaggtaggataaaattccattttgtcgtcatcaaatgtcaattctatcttaaatattggcagcctttgttgatcttttgggtcaaagagttttacaaatccttctacagttctccttaatagatcctttagctgatttgacataagtgtggaaacacagctataaaatgcatccaatttttcaggtttaaca

SEQ ID NO: 161180 - DNA, 1000 bp, Homo Sapiens
gaacaacataagtatttatttgaaaaacattttccatttaagtaaaatggcaaattagctagagtagcttcttactgctaattctatttgcactcacagtcacttttattcatcatattcaaagatattgctaccaaaaatgatttcacaaagtatttagaaaaaatatatacagtctctctaatagaaagttaattaaaacaacaaagctaggcaatatcaagctaagaaaggaaaccaattgacatatataaacacaaataaataaatatgtacaaaagaatctatgccaacaacagacaaagaaaatctttacaatgcaagtgaatggtgacaagaatggaaaatctctcaggatcctagactatgactctaacacaatgtagtttaaaaagagggaaaaagaaaagaaaacataatgaaaagagagtctgaattgatgctattctcaaaggtaagctgaactaaatttaggctccccagctaaattcctgacctctgttctgatgggggactaaatggaggtgagaactgcatgcttagaactgacaacagaatttggctcaatctttcaaatccatttacaaatgtttcccttgagcaatttcttaatttttttctcatctggttattgaaaatttctaaagtggagctgacattgtcaaatatgaaaaaaatatttttctggagccatacgaatatgagtagaaatcaaaagcaaagccatttttgaagctatatcttaattacctatatcttaattactattgactaagcactttgggcagaaatctgactagttagaaagctaactaattaaaatctactatgaatgtctaaggttttgggggaaatgtatatgaatattcagtgactaagattcattttcatccatatgtaacctccgccaaaataagcagcctgttaatatatgcctattgaaaaggatttggctcagtgaccttagatttactatcttacttagaatctcagtgacctt

SEQ ID NO: 161181 - DNA, 1000 bp, Homo Sapiens
tttttttttttttttgacggtcttcaggtttatttcttaaatcaattaggaaataaaaccacagtgcccaggaaagttcacatgagacgccacggtgtctcttgccatggccccaccactccaggggccagggggtgctgctggagggaggacagacggacaggcggcctgggtggccggccccagaaaggctggcgtggatgttcgagatgagccaccagcgaagccagtagggatgtctgggccgtcctggtgggattgtctgggacatcgccaccaacacggtgtcagagccatcagtggggacatcggaggggccaccaccaggtggggtatattcaacaggctagaacccctgaggcttgagaggccaacccccggcaggagacctcccctgacccctctgctgcctctcctgtgggaccctccagtagacacaccagatgaggacacccaggaggcctcctcccaggacaggaggcagctggctgggcagccacgcagtgcagggttcagggccctccagcaggagctccatggagatggctaaatggggacatcaaggcaggggctgacagtggtgacatccaagtggtcacagtcaattccggaagctttcagggcatcaggaggggaaggtggggctggggaaatgtgacaggaacggggaagtgcaaaaggcaattggcctagcctgggagattttccagttggcctgggggacccccggctcctccattcagcagggagggcggagggcctgcttggaagtcacatggagctgcagcatctggaacccaacagccacaggaggcctggattggggctccgtaaggcacagccgagagggaggtggggaggccccagtccgagtccagggcccaggggagatgattcctgcagtccccaaaagcagctggaccctacacaagatgcagctcccaggacacgtgtgttccactctcggcaggagaggagaggaaaaaggaaaggccgggcc

SEQ ID NO: 161182 - DNA, 1000 bp, Homo Sapiens
ctgtcagtttaatccattttattgacttctcaattaacaacaaaattcatttggacagtaaatcagaaaatactttctatggtggctttaaattacattttttaacccaaaaatgttatccagagccattttagacaaccaatgtatcttaagtacaaacggtaaaaattcacattcccttcagtaactctccttccacttagaacacaatgaacttcttaggtaggcagagttctcgttcacttaaccacaaccccattttagcacagaactgcagcaaaaagaattgaagaagtgattagaaaggatatgcattattaataaaccatatgctatgtgagtgttaggttcccacgaaatattttactgtatatttaaaaaaaaatcccttctcaagggcactgctttcattcaaggactgatttcattacctacttcattatcttttatagtgaaatgctccttttcaagttattaatacacactggagttgttaccagcaaacactgtcctacacctgcagttcaaaatatgagtagcagtctaatacttagattcagttataaattatatatgtataaaacaaagagttgccattatttatatattgtaataaatacacaagaatgaatacaagttatttttcataaaatacaatttctaatcaatttaggggatttccacactatgaggacattaaatacttaaaacaccaggtaatcccctctgttacagaatgccagccgggtgagatcttaaagagattctttattgatagccaaatactgttgactatactagcaatctgtattttcttgctatttaagaaaaaaatacagaacctagacatttaaaacattatccgtgtaataatcactacagactctcactgggtctttaaaaattttgttaaaaatcgccaaagtcatgatgaacacaattaatgcagctacatcatttgaaaaagcaatataaattatgctgttaaagacaaaaacat

SEQ ID NO: 161183 - DNA, 1000 bp, Homo Sapiens
acatgtttacttttttaataagcagttcaattgtttttcttattcacgtaactcaggatcaacagtaacttcatctaatgtgccatcagagcagtcgcaaattgaatgaaagtgatggccaccacaaaatcctttttctcctgaactctccataaagtctcctttctttgcacatctttgtgctaaaataattagctacttgtaaagacagtacacatagcaacactacacattcacatatttttcccacatctgttgtcttatttaagcgcaacttatttggaatcagaattgaattcaaattgggactaaggcagtaagtaactatgacctcgaggaagtcacttaagctctctgggtctcagttttctcacttgtacaatgagattaataataaaaattatggctgagcaagtggctatgcctgtactcctagtactttgggaggccgaggaaggtggattgcttgaactcaggagtttgagaccagcctgggcaacatggtgaaaccccatctctgccaaaatacaaaaattagctgagtgtggtaatgcacacttgtggtcccagctacttgggaggctgaggtggaaggaccacctgagcgggggacgttgaaactgtagtgagctgtgatcatgcttctgcactccagcctgggtgacagagcttgactctatcttgggggggaagaaattacctcactggatagtacagattaaataagctaatatttgcaaatttccttgcacagagtatgcattcaataaatggtagattaatctccaataactgtcccaagctttgtaagtctgccagatggttttaattatccctgcctggatagatgagtttaagtgacttatccagggttaaacaattcattaatggcagcactagtgcttctgattccagggacccaccccagcccatcacccccagtcaactttatagacttttatagaatgagatgctgtgtccagcacaagaagagaattct

SEQ ID NO: 161184 - DNA, 1000 bp, Homo Sapiens; identical to SEQ ID NO: 157817

SEQ ID NO: 161185 - DNA, 1000 bp, Homo Sapiens
ttttttttttttttttttttttttttttgctgaaaacacaattctgagtttaatgttttctggaaagagctgggggagcttaagcagcgagtgtggcgctctgcttccgggcacgcccacagcaactcggcttcagagtctgacccgcagaagttctttaaagagagggacttagggaccccagatcccggcagccaggcccagagagggaagcaggattagtcaaaaccaggtgggggatggggggaaggaagagaggcagcgggggtttgggggcccagcgggtagcaagagtgaccctgggcatcaacatggggtgaggtggagaggggctatggggttcctggagatcagagtctggggtggccatgggcagggcgagagcaccgtggagacaccgcaaccctgctccagctggtcctgcaattgccacaggggctattgcctctcctgccacccagctcctgagagtgaatcctgacacgggtgattgggacgtgtacttcctcttgactctggtctcaggactgaggctcacaggagcctgagaaacagacaagcgggagctttctagccccttccagctctcccctgctctgaagcctagaaaaagcccctctcaggctactggtcagaggcctggatgagggcagtgggggcagaaggggtctggatcagccttgctgccaaccaacacaacacacgtggaagcggtgatgcttagcccacgaggagatgggagactgcagtgctgcttgaggtgttttataaaaaacagaagccaaggccccggggccttctggggctgatttgtgtgggaggcggcacagaaagccgatgccagggtggcaggcatggagaccaccccccagggctctggggtggcacaggggtggagcagagccacacatggatgtaccaggagctctgcccctcatagaaacatctgcaggcctgggggacccaggggtccctggccactgtcaggagcccttcggct

SEQ ID NO: 161186 - DNA, 1000 bp, Homo Sapiens
tttttttttttttttttttttttttttttttggcattgggcagctttcatctgtgtttattttttttcatataaaagttacatgtttgaaatgtctgcaggaagatgccaccatcagacaggttagctggggcatatatattacaatgtaaccctgtggaggtcgtggggccggagcgggaagatgctccccagaatcgggttcaggtcagacatggtgtgtgcctgcccctccttgcccccccccaccccgacacctgcaggtgaggactgacctctgcaaggaacgagtcctccgcctggctcacgtctgtctgtgaagactgattcccacaacccgcccgggccccccaaaggaacagacgagccacggccaggccgcagcactgagcacagagctcagcaataaccagggccaggcttagggggcacagggggctgcctgccatcaataagttagacatacatcgcaccttgccgtcctcacgcagggagcccctgggcactgctcatgtgctgcctgggccctgctgctcagaacaccaagggctcccagtgagggcctggggaattgcctgggcacactggggccaggcacagggtctgttctgaattcagggaaggtgaagagaccccacctctatccagctcaagcccaagaacaaggcagacagagctgtggacagcacccgaccacagacacggttctgcctgctgctggagtgagaggcctggtttctgaggctgcagcatggcactggcattgcctgtgctacagatggggactcctgcgagtctcacaaatacagggagaatttcagttcacacaacccaagggccctgtgtgcagagcggccctcacacgcgcacagcagcattcaacagagctgggcaagggaaggggagagagagtcaaggattgaaatgaagggacttcaaaaagaaggaacaaactaaaaacccaacccacacacaatactgttaataagccagcgactcta

SEQ ID NO: 161187 - DNA, 1000 bp, Homo Sapiens
ttttttttttttttttttttttttttttttaatttataaaggaaagaggttttattgatctacagttttgcatggctgggaaggtctcaggatacttacaatcatgaccaaaggggaaacaaacacatctttcttacatagtggcaggaaggagaagaatgagagctgagtgaagggggaagctcctttataaaactatcagattatgtgagaatttactcactatcatgagaatagcacaggggaaaccaccgcaatgattcaagtacctcccactgggttcctcccatgacatgtggggattattggaactacaattcaagatgagatttgagtgggaacacagccaaaccatatcagtcattccacatattgagtgatttctctcttctattcagtattcttccacagagagggacccatagtcattaccttcaaggaacctaaatcctggtgtttttatggttacgggtggcatataatatacaggtaagccaatgttacaggatgttgtggaactattcctattcttccataagtagccactaggaccacggctgaaaccaagaggcactgattaccacctcactctaaagagaattactgagtttgtgttcactgctggggccagatctctttgcagggctatgttaggctttacacaatgtgaccctctagtctgtacaaggagaggaatgcagagggaaagcgattcactggagtctctcgtcagtgacctggtggtgaatatatggtaatgggtaaatcccacttcacctaatgaagaaaaggagaaggatgcacttcattcttagaatctaagcaggaacaggaaagggaaaatctaggagaaaagcttacaaagactgtaaatgccttcaagaaggtgagagaaactaatatttggtttactgtcagcagtctgttcgggcggcattttgccaatatagccctatcctaagggaaagggaattgtggttggacaaccgagttctgagaa

SEQ ID NO: 161188 - DNA, 1000 bp, Homo Sapiens
ttttttttttttttttggtttgaaataatctttattttgtaaacatctgtgtttaaaatagatgaaccctgctcacaattcatatatggacccgagacacagtacacgaagttcacccgtcacagggagatagtggaggctcaggagcaggtggcgtgcctggggctggatggagtctcaagacagcaggtgcagaggtggtgacgagtaaacaggccagcagagcctggttaacagtctgggcctcaagacatgccccaggccaccaaaagtttagggtgagcgtagctgcaccctaaaatcccaattctccttctgctcccataccttttcccagtcatggcccttgtggatagggcctatcagtctatagaatcctgattccatgttttcccttccagaacccctagggtacagtacaaatatagtccttctttcctgagggggctaggagagaaagacaatgaatggcaccctgcctgatcttcagggaaagctgaaatactggtccacagattggagccactgcccaatataacttctcaagtccctggctgaagacagacttgagggctggcatcacctacttccctagccccagtgtgatgtggcataggtcttgatacccaaggagtcccatcttcaaggaagcaactccagcctagtcacagcttcatcctagagttagctgtctccttttctcattagccagtgatttacaacttcctgctctcctttgctttccaccatctaagctataccctgtccctaagtcctgagccaccctctcctgctgttttcctggtttggtaagtcaggaggaaaggtttgatggttctttccccacttctttttggaggagtaaggaagtgaggttcttatccttcacatatgagtgccctggattttggttcttagttgatgaatactcaacacccagttctttgttttggctgcagccacgcagtgcagctaatgtgtggcttaagaatgaccctct

SEQ ID NO: 161189 - DNA, 1000 bp, Homo Sapiens
ttttttttttttttttttgcaagagaagaagagtttttattctcgaacaagaggctgggtccagctcagaacacactctttccctcctcctcccgctcagaccctgccaccaggtagacgaacagtgtagacgcccctgcaggtgtgaagagtaccagagaccccagctaggggaagctggcaggagttgggggggttcctcccagatggaatgaatggaaagaataaatcagggacttaaaggcgcaggcaggagatggagaggggtccatgggtggctcaagggtggcgtggcctctctgagccttagtttcctcatctgcaaaatggaagcagtcacgtcatcaatcatggccaaacaggtgaggccttgcaagtccccgacaaaggcgcctaacacggggcacctgcacctcccaagccgtgactggttccaggtgcccgtcgtttttctcggttttgcttttctgtcttgatgacttcatcttgggctgtggccaccctctcaggggtgtctctgtgagtgttctggctccagggacagttggagggaggaacattgccgtctgggactggaggggcaccccccggtgctcaggctgccgcggccgtgacgttgagctcctggcggataaaccaggcccgcgggcgcggtagccagcgccggagcaagcacagcaggcggaaacgccacgggtagaagacgccggccgcgcgcgtggcgccgccgcggatcacggccagggctgccttgggccccggggccgccttgaccctcgtgactcccctgactgcctcggcggcggaggcgcgatctcggaggcccaggacgcacatggtgatggccacgttcacgtcctgcacgtccagctcccgccgcagggagccgaagaagccgtccagcgcaaacttggccgccgagtagggagtggagaacgacgtgggcacgcggccgagcagcgaggacaccaccaccagggagcccttgctgtccgtcagg

SEQ ID NO: 161190 - DNA, 1000 bp, Homo Sapiens
ttttttttttttttttttaggtaaatggatgccttttattttaggaaagacatactgaagtatttaggtgtatgaacaaaactgaggtttccatgatgaagaagaaattccacttgtggacttcagggacagctcctgcatgtttccagcctgcacttcctgatagcctaccctacaaatttagcacttaaccatctggggcccaaaattatgtaaaccaattatttgcaataaatctctatctatctatctatctatctatctatctatctatctatcatctatctatctatctatcatctatctatctatcatctatatatctgtctatctgcctttctagctagctagatacctagctgtcaggttggagcaaaagtaattgcagtttttgctgcaattaaaggttatggcaaaaaccacaattacttttgcaccaacctaatagctatctatctagggctagggctatctatctagggctagggctatcgatctagggctgttaaaagtgtattcaacccaaggtatctaatacacatagtttataatggcatgtgagaaataaactccttccttaaaagattaaatattacttctttttccaaaacctaaattgtttcatcaatttccactagaaatgtatcttcaataagcaggctgggcacagtagctcatgcctataatcccagcactttcgacggccaagttgggaggactgcctgagctcaagagttcgagaccagctggggcaatatagtgagactctgtctctatttaataaataaaaaggataattaaaaaaataataagcataatggtgtagacctggtaaatcttttgacagcaacgtttataacccacatgccatgtatttcactacattcataaaggggcttggggatttatccagaatgacataccattcatttcaaaataacatacatcttttctctagacagctaagaatatttatagttgttaaagcaaaaagaaattc

SEQ ID NO: 161191 - DNA, 1000 bp, Homo Sapiens
tttttttttttttttttttttttttttttttttttttttttttttttttttttttttttttttttttttttttttttttttttttttttttttttttttgttactatatagtttatttaaaccagactatgataatacagagaagagactgaggtggcagctgcccagaatctttgtggattacagatgcaaagtagttaggagtccttggacccacacttcagttacagacagacaaatcagctgcataaatacagagaacataagacacaagacatttcacagctttctgcatttccattttaaatgtatgtatgttacaactttacatattaagttactactccacatattttgtgacaatggctaaggatgcaatggccccatccccctgacataaacagactctggtctgcaacacagaacatttcagtgggataccaaacaagcccttaacacgtaacatacaaaaagatctttaaaaatcagattaatacaatgttcttcatgttatataaggaagaagaaagggaagtaaaaaaaaaaaaagagagacattggggtgctttaaatgtatagtatcttgaggccataaatgtttcattcccttcctccaaaggagaaaaaaatgtttaactaatggaaaaagaaagcaacatcctaacgccctacaatgaggaagaccccatcctgacagtacttagatgcttccatataataaatacagcaggtagcagagcaaagtcacaaatattggcttggtttttatttctatgcttataaaaaaaatatgaagcttctttgtgtggactgaaggggtgttagcctgtggatgttggtcttcggtgcctgtaccccagtggctgtttacattccaggcccctgctaaataaagcaggctccactgccagctgtctgtacactttttcttgggggaagagatcttgtcttcagtttactgcagtagggttcctggctctgttacatgctcatgtgttcc

SEQ ID NO: 161192 - DNA, 1000 bp, Homo Sapiens
tttttttttttttttctcaatcaaacttttttgtttttatttttttaaatttaaaacacccttttctctcagagagttggattttgtaatggaaacaatggctttaaggacagtagttagctatagatttacaaatgtctacttaaaatccaggagccaatgaattgtgtgtctcatccccaggcccaagagcaggctgcatagacagctctttctggcgcttgaacggtggaggtgtggagccagaggctgtggggagaagatggaaaaagccccaagctcagtgtcaaaacacacaccctgccgtagctctctcctgggctaggtgggattgtgggtgtcacatgcttccctgtgaagagactaccaaacaggctttgtgtgaacaataaagctttttaatcacctgggtgcaggtgggctgagtccaaaaagagtcagcaaagggtggtgggattatcattagttcttgtaggtttgggataggcggtggagttaggagcaattttttgtgggcagggggtggatcttacaaagcacattctcaatggcggagagaatattacaaaataccttcttaagggtgcgggggtgcgggcgtggggtgggtggggagaatattacaaagcaccttctcaagggtggggaaggtgtattgtcacaaggtcaattgatcagttagggtggggcaggaacaaatcacaatggtggaatgtcatcagttaaggcaggaactggctattttcacttcttttgtggatcttcagttgcttcaggccatctgggtgtatacgtgcagggcacaggggatatgatggcttagcttgggctcagaggcctgacagtgggtaatttccactctctttgtctgtagtttctgaatttcttacaagaaacatgtataagaaatatgacaaaagttattttataaataaagggacacttccaggcatttcagtctttaagaaaagctaaggcttgtttggctttttgtttattt

SEQ ID NO: 161193 - DNA, 1000 bp, Homo Sapiens
ttttttttttttttttttttttttttttttttttttttttttttttttttttttttttttttttttttttttctcagaaagaaacatttaataggaacttacaaacagaagcaatgtttctagcagccactaaatggcggcactcaccctcccaaaagtaccctttatataacaagcatttttggcaaaacgtgtagctagtcatatctcagactttcttgtgaaacacctgaacactggggaggttagataagcatctttatgaggggttatctgtactaccggcactgtttaaagacattgctgcagaatatcttggtatgcaggagtcaaacagcagtcatcatgccagctgctcttcaagatgacatcactcttacaatgcaacaggctgttttcctacactcgacccctcgaaaccagtccttaaaatcttacatgcctgcttcttctgtgatagtccctggacctagagggagggtgcttgatattgtatggctttagtagtattgcaatggaaatggaaaacagattgggtccagtggaattccacaagagggagatttgcaggcttggttgaatcatctatatagtcttcataataccatgaagaagtaaaacaatgagaaatacataacattaataattggagtagtagaaatctaaataaagtaatatgatgtttaagatatcccttgccttaatagcctataaatatgggaagagtgactatcatcttctgaatttcaagacccatatattccgacagtttcagtaatatgaagattttggaaattctaaaaggttttgagatcatttctaatcaagcatttagctcttatgttagcattaattgcagccccaacttttgcaacttattgacctgcacatttttctgagcacttactttccttatgtcagatgtagggaatcatgagatgaacaagttttggttcctgcactgtagcaaatgaatttaggcaaagatatgaaagatgaa

SEQ ID NO: 161194 - DNA, 1000 bp, Homo Sapiens
ttttttttttttttttgggatggagttttgctgttgttgcccaggctggagtgcaatggctcaatctcggctcaccgccacctccgcctcccggattcaagcaattctctgcctcagcctcccgagtagctgggattacaggcatgcgtcaccaccctcagctaattttgtatttttagtagagatgggctttctccatgttggtcaggctggtctcaaactcccaaactcaggtcatctgcctgcctcggcctcccaaagtgctgggattacaggagtgagccaccgagcccggccgagctttctaatccaaaactttgggaaactctgtgttaaatatggtcaaacatgcccattttttcccaagggtctcacaagtcagacccttgaatgtgaggctcccaggaaggatctgatgaagcatctttttggaatagaggcaaagaatgtggtggtgaataccaagtttgttcaaatcctggctgtggcgaggcacggtggctcatgtctgtaatcccagcatcttgaaaggccaaggtgggaggatcgcttgaatccaagagtttaagaccaggtgaaaccctgtctctactaaaaatacaaaaattatccaggtgtaggggctcgcacctgtggtcccagctactcgagaggctgaggtgggaggatcgcttaagcacaggacgtggaggctgcagtgagctgtgaacgtgtcactgcactccagcctgggtgacagagtgagacgctatctcaaaaaataaaaataaaaaaatcctggctctgtcccttactaaggaaacttggaaaagattacttaagcaccttgaccttcagcttctttatttataacgtgaaaaaaaaaaaaacgtaatagaacttgcctcataagtttgttgtaaggattcagtgaggaaatgctcatgaaatattcaggaccatatctggcacatagtaaatgtttcattagtatcagctcttgttgttactattcagaaga

SEQ ID NO: 161195 - DNA, 1000 bp, Homo Sapiens
tttttgagcccagtcagtgtgagtggctttattctgggtggcagcaccccgtgtccggctgtaccaacaacgaggaggcacgggggcctctggaatgcatgagagtagaaaaaccagtcttgggagcgtgaggacaaatcattcctcttcatcctcctcagccatgcccagggtccgggtgcctggggcccgagcaggcgttgcccgctggatggagacaatgccgctgagcaaggcgtagcccaccatggctgccagtcctgccagcacagataggatctggttccggcgccggtatggctcctcctcagtctctgggcctgctggtgtctggcgttgcggtggtacctcagctccatcccaggggaagtagagactgagaatgtgggtacaataggcacagaggttgtgcagcccacgcaggtggacctgcagcttcccactgggcagctttgcctgcagcagcagggccaagtagctgaagacgaaggcgtccaaggaggcaggggcatctccaaagaagaacttttgagagcccaggcgctgagagagcagggtcagacactcccgagcctctcggtacagctccttctccagctcttcctcgtcctcaggcctgtgctccccagtcagcagctgtagccgttccatgtactgccgctgcatgcggccaggcaggaagaagttgaggggaaagggcatagcctctgcataccacttccgggtcacttccacgtagttcttggtgtctatccaaaaagtatgtacctcttttcgaaggtgggtgatgatcttgtgtggaactgagatgacctctccatgactggtccgaagggcaggcagagttcctgaagggctctgccaggggttgctgatcttgtgtaccttcagtggagcaccagtaaatctggcataggtcagcacggccaggctgtccaggtccactgacggcagcccccagccccctgaccagcagaacagctccatgggcgccgccatc

SEQ ID NO: 161196 - DNA, 1000 bp, Homo Sapiens
ttttttttttttttttatacattactcgatttttatgcttactttcttttacatttcaaccatataattaatttttccatgagacagggtaggacacataatcttcttggatacattactgtttattgtttcaagtggatggaatatataaatcccactgagtagtttagtgtggccttgtatcttttataaacaggttaaatggagactttacactgtaatctgtgtatttatctgtctaccataaattgtcttcgtgacaaatgcagaatttcttttattacttggctcaaattaactgttgatccttttcactgataatatacaagggtaaaaaagcaggaagcctttaaaattgaaaaaagaaataagatattttccactaaattactgaaaattgaaatttttatgttgactgttgatgactgaaaagccaatgttaagaatcaatatcatccaatataaaatagtacattgaattatttaataaacagaatattaagagcttgtatatgctgactgggaacagtggtggctttttaaattctcagaaagtttaaacattttataattagaagaaaccactggtgatgatgaagatggtccatctctgtagcagccattacagtgaaaatcttgacagaaccttttcactatcagaaagataattttactggtattagtggtaaaggtaaggagagaaaaaggagtgaggagataagtctgtattagttttaaaagtgagaaaaggtaataaaacaacatggaaaagccagaaatttcttcttctatatgtgccttgctacaaataaaccaaaaagaaagcaagatgggtattttaaaagccaatgtggggaaacatccaatgataatgcccattattttactttatacttaaattacaccagtagaaaagttatgcttattaatagtttaatgtatgaaggaaacatccagatttctgaatatgaaggtacatatctcacattaatttaagtct

SEQ ID NO: 161197 - DNA, 1000 bp, Homo Sapiens
ttttttttttttttttttttcttagagaaaatgttttattttcattagttgacaactagttgttcagttgaatggtaagtttcacactgcatcctaaaataagacagatactctgctggcaagtagaaaatagactaatttcattttttatctgttaagctctcttgataaaaaaggcaaaccaggccagttttaaatttaagaaacagaaacattgtcagtgcttcttgtatcaacacacttcatattcagaactactcccaagagataacatattatctccttttcaaagatggggaaactgaaactgggcattatctataatgaccaaaccacatagtaagaggcacaagccagcattagaattcagatcttacttgaaagtgtacagcttaaaattttttaaaaaattccttccattataaatgtagtacctgcttactggagaatgtttggaaaagcagtaagaaggaagaagatgaactcatgatcctgactcccagtggtagccagatcaatgttttggtacatactttccgatactctgctatgtgtattttttaaagtgtgaatacatggtatatcaaaatggatgtatcagtattttaaaaactaaaatctgattttaaaaggaaagcatatagaaaatctgaaaaatactgatataaagaaaattaaagtcatctagaattccattcatccaaaataaacattgttaatatttccatatattcccttagtctttttctatcaattttctttttatatagttaagcttataatgtacaagatttttaaggagagttaacaaaggtttaaatagatgacaaaaagggacttggtgacagatagtatttgccaatcaaattattcaacaggttttgaagggcgtgtgctaaacttctaaggtgaatcctgacgtggattactggattaccttttttgttgttttatttcacccaagtgcgtctatgtcatttacctaagtttttatgtgtgg

SEQ ID NO: 161198 - DNA, 1000 bp, Homo Sapiens
ttttttttttttttttttggatactgtctgtttaatgcttggtacacctacccatctatgtggtttctattattcttcttcacctgagaacataggcatggtgtggcttgagtcatccagcagtaattaggacatcactgagttgggtgcctttgtgagttccagtggtgtccttggcactcagaggttcagctgaagtcccgactggtgaggacaagtggagccacaagggtccagacgtaaagcaggaggcagacccagctggagctgatcttgacccacacagctggccacttgctggtcatgctctgaaactttgcatcagggctgtaccagctggtcagggtcatcatgatgtacaaggaagccaagcagagcatgaggtggaataaggagtagctatactgcactccctctttctcgttgtccacagcccgccgaggctgtccatcttcttcatcactggcaccactggtagttgtatcaccaaggatgacgctgtcactccctgacagggtcagcttgtctacttggctattagtggaagtgcggatgctagaatacaagaggcagagaacaaagacaaacagtccaataaaattatctgaatccagtaaagacccactctttgatggtggagtaggggtagggaccacagcagttgaatttccaggagccagggttggtgcagttatgcgtgtaataaagctcatcaggttgggattgcaggaacgatcaggttcattggacatggctgaccaggtgaggtacatagtgtagagggtgatgagggaggactgcaagaggccggagcgaggctggtgttcctgaatttttgggtggatcgatataatagaagccacaacgcaaaggatcaggttaatactgatgaagaacttgttttctgtgcagccatctggtttggtgtaatatgtatagagcagcccgacacagatgattgacaggatataaaaggcgcttgtgaaagacagtaaagcag

SEQ ID NO: 161199 - DNA, 813 bp, Homo Sapiens
ttttttttttttttttttttttttttttttcaccgctagatagctttattttcccttccatccagttaattccagatgaaacccggctctgcgccactcaatgcccccaggtgaagatggtttgcggctgttcagcagccacgtctcctgcccaggggctgccctgggctcccgctagaccgtgtccacctcgcggagtgtgtagtccaggatggtgtcctgaccctggaacttgaagtacccgtggaatttcttcttctgaagcaggagtggaaaccagtagctgtcgtcgggccacatgtccttgaaggggatctgatccagctggaaccagcatgggcgcatttcgtcgctctccacgggggtcccctggatgctgtctgtgcagaagacatgcacgtccatgagctcaggctcgcccacgaactcaaacacgatctggcccaccttgtgcagggcgtccactgtcagaccgctctcctcctgcagctccctcctagccccatcctcgatggtctctccttcttgcactttgcccccaaagccattccaccggccggccccgaagcctcgctttttcatgcccaggagaactcgctgaggctgcaggaccagcaccagggtatagagcctggaggcgcccatggtccctgggttcttcccactccaactgccttctggctcccccatctgctgagggctaattccactcataaaaccttgcactcactctccaagccgccgtgtgatctgattgctccagtacatcaaggcaagaaaccacgactcctggaatccccgcgcgcgcttttc

SEQ ID NO: 161200 - DNA, 1000 bp, Homo Sapiens
ttttttttttttttttttttaagagtccaagcatttattttattaccaaaaacaatttgttaataaacacgctcaatgcctccaatcctgtccctgaggataatcatgaaagtccttggggttgtagaggaaaccttaagaggaaaatggctacttggttatcaatgccttggctggtgacaaagaaaggacccttgcagggaccagtcacatgccatccttgggcctaaggagcccgaaagatgggaatggatgtgagctaaggatttaatcactgtcaagcagatcttgagggttatggttaagcctgataacagcctctttaacaagaacacacacatccaggatcccctcaaagaatccagagtcctcaggctccccacaaaatgtagtctggcagaaaagggaagtctttagagtctgcagaatgatgcaaacccaggccagagtggaccacactgctctcggcaccactcctaaaggcatccattggcaacggctgcccactaggggcactgccacttgcctggctcaaacttcaggacctggggaagaaatggtctggctctgcggccttcaaaccatctggatctctggctcctcagctattccttgaagcttttccatgatgccccctgaaggtggctcaggggctgggggaggctcccctggggcttcagacagcacatagtagacaatctcttgctggccttgggcattggtctgattcaccacgtggatgacagaactggggttgtcctgagaggctgagagggctgtcccttcgctacccttgccctcctcttcctcttccttacgtcctggctcccctggcactgtttctagaataatgccctgcaggctgctctcgttcagcgacgttcccaggcccgatccctcttgtggttgccgcagcagttgctgtgtcagctctacactctcgtagcgaaccagctgcagccgcatatagccatcttcatgttccttgtaccgaaaacgg

SEQ ID NO: 161201 - DNA, 1000 bp, Homo Sapiens
ttttcaaaaagaaaaaatttcactttaatccagcctcacccccacatgtgtgtttcacacagaccttattttttaaacagagtttattgtatttaatacattataaaatttgaaaaattgtaggaaagcagcagacttgaactggagcaattctaacaaggaataattctggccccttggcaaaactgatcagttttaaaacaaagtaaagttcacatctgtgaggtggacaaaaaagtgtgacttctgtacaaactacatttaaaatttcatgtctaacatctttgcaatgtgctcatgagggtttttctgaagtcctgcctggtccctgcctaaagaaagacgtggaacctccatatacaaacaaacttgattcaaggtgttttgtttgttttgtttttttaaaaaaaaaggaaaaagaaagacaaaggaaaaaagaaatatggatggctgttgttggcaatggaaactgtaaggagactgtgtcctcaccactcatggcttgtttatttgtcagaggcctcgggaggcccaggacacttctcgccactttcacagcaccaactgcggctgtcacccgtgtttttttttttttttgcatttcctaccttttgacatatatatatatatttatatattttttacaccttgaggatatcactattccaattgttcccatatgaatacaggtgtggtctctattggatataaatgtgtcttttattcgattttacgtccaggacttggtttgctgtcccaactgcacataaatgtcccttttttgtttgagttattggttgtgtgtgttttcctttttgcataagaaatatgtccatttagtccagaggctcttgctttatccggatgacggagggtacacggggcgtccgcctcagttcccgccgaaggacgtattcgctgaactgggacgagtctactcctcccccacaggagcccacgatttcaaatcctctttgctgcaacctctcgaggacctgga

SEQ ID NO: 161202 - DNA, 1000 bp, Homo Sapiens
tttttttttttttttttttttttgccattgtttcacacctttaatactgtcttaaaggttctattgctcttcaacgatcttagtgtactttgaaatataaaagtaataattatcattggaacagttattctaaatctaaaaagataactcccatagcaatatttgtttactcagaacatattttcacttccaatatatgtaaaatttctcacaaagaacagaactcacagtttgaacagaaacctcagtgtttaaatctccacattcagtaaaataaacgctacatagtaggttgttctgaatataaatcacgcatttaactaaatgggatataatttctaacttgtgttaaaagtgaagaaataattttttatgtgaagccttgtcccaactcagtcaagtgcaagattatcatatgatacaaatcaaactctactaacacagcacatttgtcagagacttgaaggcagatacataactacagctggggaactggatgtccttcagctagggtgtaatgaaagaaaaaagcgtatcatagatcaggtcccagttttaattacttcattgatgacaatgccttactttatttattgaaaaatgtttcttccactgaaaatacacttctaattttataatgcaagacagtaggggaaaaaataggagcccatgtaaaaaaaaaaaatccactcttagaatctgaagttattgatcagatatgcaatgacttttttctgctgtgatgataatcaaatcttttttcttaagtactgacttgccaatttatctttgataactgattcagaaagataaatgaaccttgtgactttacatatgagaatatgtacatatgtatatatatattctaagaagttatgtcccatgatctgacccatacttctgatttaaaatataactaaattctctcaataaaacagtactaattttaagttttaaactgaaatcacccttttaccacactgttctcattctctttact

SEQ ID NO: 161203 - DNA, 1000 bp, Homo Sapiens
ggctgctctagccactttctagctctgtagtttaggctggagtgctgtggcatgatcttggctcactgcaggttctgcctcccgcgttcaagcgattctcctgcctcagcctcccgaggagctgggactacagacacctgccaccacacctggccaattttttgtatttttagtagagacggggtttcaccatgttgggccaggatggtctccatctcctgacctcgtgatctgcccgcctcggcctcccaaagtgctgggattacaggcgtgagccaccgtgcccagccctgccacatcttttttgttagttgcagtagcaatacaaccttatctagaaaagctggccaaaaaagaaaataccatgataatagggtacctaatttattgctttatttaagaaaaatgtaatatttcattcgaataagtacttttgggctgggatgatatttcatttagctacttggcatgccacccatcttagggaattatatgagggtttatactttaaataacataaaaagcaaaacatgctgaatgtaataatttgagagaagtgtaaataataaaaatctgtcatctaccacctggactagtaatatattgtttgttttcttaactatacactcacccctgcactcatctccattttatcgtggaagtcaggtatattccaagagttggctttatggtactaacttgccattagctgccatgctgggagctggactaaaatttttcctcttgtgtggaatccaatattaagagttcgggtctccccggccctctcccagtttcatcttgtcacccttgagctgatctcatttcatgtgtcttgtatggccctgctgggtggcactggtaagtgtatgaacatagacttgataccaacctctgtctctactactgaattgatcacatgatttttctttctcagttttatttttaaagactcctgatccatcttaccatatgactgcttttgaaatagttccatgat

SEQ ID NO: 161204 - DNA, 1000 bp, Homo Sapiens
tttttttttttttttttttttttttttttatcacttaagatttttatttaaaggcaaaggatacagggcagcaagagaaagactaggtaggtaaacatcaggaatctcagaattcccaaatacaagctccccatggtccttatgcacatgtggactgcactgcaaagtgcctttggattgaatcatcatgatctatgtgaggcatccatcctggttttggaagagctcaaatcagaagttcccagcagggcttttatgttgctctggccatgtaatcaagccagacatacgtaactggttagaccagctgcaaataatcaataaaaggagtgaccagtggagcttcagactttatttatttatttacttatttatcgaaatgaagtctcttgctgtcgcccacgctggagtgcaatggcgctatcttggctcactgaaacctccacctcccaggttcaagcagttctcccgctccagcctactgagtagctgagattacaggcacctgccatcatgcccttttgtacttttatagagatggggtttcaccacgttggccaggctggtcttgaactcctcctgacctcaggtgatccacctgcctcagccttccaaagttttgggattacaggcgtgagccaccgcacctggccgagcttcagactttaaacagcacattataaatcccaatgcctttttttttttttttttttttgagacagagtctcactctgtcaccctggctggagtgcagtggcacaaaacggagtctcactctcttgcccaggctgctcactgcagcctcaaactcctgtgctcaagtgatcctcctgcctcagcctcctgagtagctgggaccacaggcacatgccagcgcacccagctaatttttttttttttttttttggtaaagaccaggtctcactacattgtccaagctgatctagaattcctgggatcaagtgatcttcccaccttggcctcccaaagtgttgagatt

SEQ ID NO: 161205 - DNA, 1000 bp, Homo Sapiens
gcagagactgttacatgtgattctacttctggtattctttaaaatgttttcttcttccctaaggtagggtggggtgtaaaaccatggtggtcccacccacaccatggagataaaaaagaaataaggttaaattcagatgctttaaaaaaaaagagttgaggagggatttaataaagatacatgctcttctaaattctaaaaccacataactctggagaaggtgcatattcatctgttcctcttcaaggcaaagaaaacagtatgacaaatgaaaaaggtgtaaaaggtcagcatgagtaatattttccaaggcatttacatatgtgaacattatttgcaaatattttagggaaatattttctttgcttttaggctgaatctgcaaagacactcagcagtatccttatgagaacagaaacaatatgaaactgaaatggttactatagatgtgatattaggttttcctaattatatgaaaagcctattagtaaatagcttagagtgcttcttgcttcaaaatataataattttagatgttaaagctatccatttctgatgaaaattctggacgacattaacactgaataaatatttattgtgattttttccccggtggcataaggttgtttatttttcctagctctccaaatgacacagttgcggaacctctttcagctggtcttgcctgtgactcatgatatttccatcctatcatgtaatagatctggtatgtagcaggtactgaaccatcttcatttctgtacatttctctgtacactgccgcagctgccagcattgtgtctcgatgcagcagggcttttctattccaagcacagttactctcacccataccttaagaccactgtgaaagccttgaaaatttctcatgcattcatcagctgatatgcagcttgttttgtaaaattaggtcaacattctggacttttgttcttgtaaatcttccatcaattcaaacattccaggatagttaacttgaatt

SEQ ID NO: 161206 - DNA, 1000 bp, Homo Sapiens
ttttttttttttttttttttgcaagttttttgacttttattaaatctttacaaaacagaatacaaaattccggcattgacagttggtgtaaaggaaaacttctgagctccgtcagttcacctggtacattggaattaaagtgcttggatgtttttcccccactttaaaaaaacttttgaggttttttttttttttttgtcttttaaaaacatcgtaacattaacacatggccgttcaccgtcccccagcgatgggagctggcctggggcccagggtcctccaggatcttcactcattcacagtaacggttctgaccagtcctccaggtcgcacgtggatgcgacaggggtggggagggaggaggaagtgactgtcccaccttcagaaaaaaaaaaaaaaacaaacaaacaaacgctgctagccactcagctttagagacccgatggctatgggcgcctgcagcgggcgggggtccatttgcttgttctttgatacaaaaaggcagagaatcccccgttacgaaacatggaatcactgacaggcgagaagtgatgggggaaaggggtgggcggaatgccccaccccccccaggggtctttggaaggggcagtccacagatatgggcagtggggaccagggaaggcagagcacccccacggccaccggactgtgaccatcatacgagattcaggaggggcagcagggccaggcagacggtctccgaggcccccacccccaggccccccgacattcaagtattcttcaagaacagggaagcaaagtccatcgatgtgttgtttttttttaaggaaaaactaaaaaactaaacaggaggaagaatcccgaccgcggatttagaagccagaggggctgccccagctgtggagctcgggggctgcgccgggaagggcgggcggtgaccctagccgcgcgcacttctaaagtggaaccctgtattgcatagaacgtccccacccgcggggagggggcagcaggctcc

SEQ ID NO: 161207 - DNA, 1000 bp, Homo Sapiens
tttttttttttttttttttaatttttctgtatttttattagaaacggggtttcaccatggtggccagactgtcagtctggaactcctgacctcaagtgatccacctccctgggcctcccaaagtgccgggattacaggcatgagccaccacgcccagccaactgccacccctttttatccctctgtatagacatcctagagttgccaatgtctgtgatgttgaaagaaagaatgcttcttattgtctcttcttttcagtgttggtatgatttgggtttcttgtttgtgtgttctttcttaaattcttccagcatagcgtccaacttggtgtcattgaaaacaaagtgcaaggggtggttataaaatttggtgatggttttcaggggggtacagtcatcgggatccacgaaggccaagtctttgacaaacagcaggtccacgatattggagcgctccccttcaaacactggaatgcgggtgtagccgctctccatgatctcagacatggtgttgaagtccaggatggcttcgccggtgatcatgaagcagtcccggagtggggtcatcacgtcctccaccgtcttggtgcggagctccagcgccccttggatgatgttcagctcctccttaacgaggtcgttgtagggatcggtgacccggagcatctccagcagtttttcccggttatagacggtgcctatctcctggcccaggacgcagtccagcagcttgctgaccgggtaggaagcggggaaggtcatcatcatgaaaaacttggtgaggaagatggtgttggcccccacagccaggccatgccgggagcagatggcctggggcacgatctctccgaagatgacgataccgatggtggagactaccacggccacgaggcccgagccggcgatgtcgtcgagcaggatggtgagcgtggtgttgaccagcacgttgcccagcagcagtgagcacagcaggtagttgccctgcctgcgcaccggctcga

SEQ ID NO: 161208 - DNA, 1000 bp, Homo Sapiens
ttttttttttttttttttttttttttttttttaaagcatctgtttccaacccgggcttgctctcagagtttattccttgaggacaatttctaagcaaggatatcactgttgttttgaccttcagtcccatttataagggtccaaattcctttgagaaaagttccagaaatcctcctccctccctacccaatctatgatcctatgtccttgtgatgcccgtttccacacagctgaagaactacggaaggaaaatgtagtaaactagaagaaaaagacaaatgccttcctgttcccacttctctaaaaccccatagctaggaacagaaaaaaaggaaaagacttgaaatgttctagagatataacaaaaacttttttttttttaaagaggatccacctggttcatgaaccctccctcactgctctctgcacatcacggccacacagcacctgcagggaggctgtggggaggtgtggagcaggtgcaacaggcagctactctcctgggggccacacggcggagagaggattcgatgcagcatgacgatcccttcctcccaggcatgacctcttctcagaacacgggaactgacaacactgcgagtggcaactcagcaggtgggcagagaagcagaaaggggccctcagcaccactaggccagctctcagaatcagaagagcagcctccagggagggagcagggctacagggacagcctacgggcagtggagcttctggtttggcacatgggaaaggctggggcgcatgcgctgaaacatgacaccatcagggaagccagaaaggacaacatggacaaggccatcgatctgaacccccagccaaaatgggtgctctcggcttgctcaaaaagtgctgccagcagcgataggttggcaaattaaaagcaaacaaatagaggtcacggccacacaaaggcagtaactgcactcacaaggtggctcagcccaaagaggtctgaatctgaatatgccgcactgtccct

SEQ ID NO: 161209 - DNA, 1000 bp, Homo Sapiens
ttttttttttttttttttcggtgtacatctgatttactgaattttaaagtctgggatgttagtggggaagaggcgaggtgagcattgcgtgacgccgaggactaggcggggcggggactgcacctggctaggcacccccaccctgggcaacttgcccacggaccccagggcagtgagtagtgacaggaggtagcccggggtgagacctctcacagcaagaagatggtgtggttgctggggcctccctggagagtgtcgtccctgcggcccctgggaagtgctccctcacgacggaaggtttcctgtcagtgcggtcccggggcctgatagtggcggtgggcgggtggggtcacgtgtcctcaaggtcctgaatgcccagctctgccccattcctctgattcccagtggctgctagctggacccagctggtgtcctgggcatgaaggcagggccaccgtccccagcaggtgctgccctcctggccagctgagcatcctggccaccatcagcgtccaggtgcccctactcgcccttcctcttcttcagaagcctttgcggacctgacctgggccagcttcccgcgattccccttccgcttcctatcaacgtccaggacccaagctgcccgccccaggccagcccttgccacttggggcccggtcttcacacgtgggagtctgaccggggctcctccctgaacagtcctgggtctgacgctctcaattatcacccacggacccacacgacgcccggctctgggcggggatggggccggggctgctgcggggtcccgccaggcgaggccccagccctggagggcaggcgccaggcggggaagccctgcggccgcagggagagggccggggtcgcgcggagtccgcgtggggaaaggccgggcctgcacccgtctgccgggttgggcgcctccgctccgggttcgggacacaggggccctcaggtaggcgccggccctctcggctgggcggggacgccggcttac

SEQ ID NO: 161210 - DNA, 1000 bp, Homo Sapiens
ttttttttttttttttttttttttttttttttttttttttgacagtgcagagggtgaccaagcctgggaaggccccaggggtccaacaccaaaattaaaggtttattatacacaagaggacgttctgtccctcagagtggctggccaccctccccactctggccaaggtcctgcacagaggtttgtcctcaagggtgacccttcttggccgcccacagctagacctccggcggagaggcacgcagtccatgctgctggcacaagtcacttggccagctcctcagccaccgctttgcgcatcttgtccttgaggtaggcgcctttctgccattcagacttgagttccagccactcatagaatgggacgtccactatcaggaagcctgcagccactatgtgtcgccgggccagaacaaagcgacccagcaagtccttgcttcggctgttgaagttggggaactcccaccgcaagaacgctagcctcttagaccctggaggtggtgactggctcccagttggctgggcaaggtgaggtgccacaaagtcccttacgggcagaaactcgccgtcactgtccagcagcacctcagcatccagcacccagccatactgcgtggccacctcgaggctgcccttgtcggcgctccccagcagccccttcagcgtctcctgcagctccttttgcaggggggtcaccttcctgtcaagggctgagggcccaggggccacagccgaggcaggcagaaggggacccgagtactcggggtactccagcagggcagtggcgttgatgtggagcagcttctggaaggtgttctgatccttctgagacttgccccctagaaattggatgtgaaattcagggtggaggacggcttgcagctctgcttcccgtgcctgctgcagcacacacagggcccacaccaggtccacctgcagggctggctccaggcctggcagctctgaccccagcttctcatgtaccaggctgaagaactga

SEQ ID NO: 161211 - DNA, 1000 bp, Homo Sapiens
tttttttttttcacgttaacattttggtttatttctttctgatcttttttcctaggcatggggcttttacagtcatttatttaccggtcatgaattcattaaaaaccacagcgatatagcaatgagcaaaacagaccctcccccaaaatcaccctgcgttcatggatcttccattctaatgggaggcgggggggtgaaccaacaataattttttaaaaaggcagaaacaagcggatctggacaatagagggaaatgtaacaggacagggcaggagggcggatgagctggaggcgtagtcattccacatagggtgctcagggcagccacgctggaggaggtctatgagtgagtcccgtaagtgcctaaggaatggagggtcttaggcagaggcgacagcaagagcgaaggaatcttctggtgtcaggccgttggtgtggttacacatatcccataaaggaatcagagccagggtcacgcgggaaccatcctctgtgggaatttggttttgcctcgtcataacagaagagactgcccacctgtagtcctcgtaagtgaaagaatccttcaagggtagtttgttggcatgaggatgggtctggatgactttatagaagtaggcgtactgtcgagctgtgtttttatactggctgaagacatcatgtatagcttgtgtggactgaagataccgaacttcatcttcttcaaagtagagaggagtgtcatattcactggggagggtttgaatatagggctgccagaaggagttagggctggctcgctcacacagcaaatgaaaggccagtgcgatgtttcccatggcttgaaggattcggtcttgagaatataagggccccaacactgaatttttagcagattcaacagtcattagcaattttcgtggaacccataaaaacaattcttctgccttgatatctcttgttgctctcaaaccaaagccctcttctttgaagttaaccatttcaaaaccctcgacagaag

SEQ ID NO: 161212 - DNA, 1000 bp, Homo Sapiens
tttccatgtgcatttatttgtttattgactcttttcccaggaggtcagctccaccaggataggtctttgttggttctttcaccgctgtacctgtgtacaggacagagcctggcacacaccaggtgccagtgaatatttgctgaaggaagtcacaaatagggatcagccatcattactttatcatcatgatcaacaggaaagaccactgtcctcacccaatcccctccaaaaggctttggagcagatgtcaacattaattcactgtctcaggtgacagctctcatcctgaggccagggttggggggagctgggaatggggcgagagtggggcctcacgtcccaggctccttgataccccccaccccacccagccaggaaacaccacgaggcagccaaggttaagtagactcttgctgctttgttataaatatattatgtacatccaaaacatgacattaaaatattactccgtgttacagaaaagatattaaggctttctattatttacattaaacaagcaagcacctttaaaaaaaaacaaaacaaaaaagccctactcttccttctctgacatactctggccagaggggataccgtgtcctcttccaaatgaccaagatgctctgcaggggctgtgccctgtgaagacatcttggtattggaaacatcagctctggcagggtgggggcagcagagaagtaggggtctagacttgagcaggaggttccagcctcttctggccggctaccctcagacccctgctgagcttcaccatccttgggggacaggctaggctgaaggtggtggctggggctgtccacctgcccagcctcccggggtcagtatgcagggctgtggcagaacaatgctccacgacgcttaggtgtgcctgggggctccccagaccactggggccagacaaggagggaaagaggcaactcactggccccaacgccagccacactgaagggctgcccagcggggcagggacggcaggcgt

SEQ ID NO: 161213 - DNA, 1000 bp, Homo Sapiens
ttttttttttttttttttttttttttttttttttttttcctgcacagctagagatcctttattaaaagcacactgttggtttctgctcagttctttattgattggtgtgccgttttctctggaagcctcttaagagaagaacacagtggcgcaggctgggtggagccgtccccccatggagcacaggcagacagaagtccccgccccagctgtgtggcctcaagccagccttccgctccttgaagctggtctccacacagtgctggttccgtcaccccctcccaaggaagtaggtctgagcagcttgtcctggctgtgtccatgtcagagcaacggcccaagtctgggtctgggggggaaggtgtcatggagccccctaggattcccagtcgtcctcgtcctcctctgcctgtggctgctgcggtggcggcagaggagggatggagtctgacacgcgggcaaaggctcctccgggcccctcaccagccccaggtcctttcccagagatgcccttgcgcctcatgaccagcttgttgaagagatccgacatcaagtgcccaccttggctcgtggctctcacttgctcctgctccttctgctgcttcttctccagctttcgctccttcatgctgcgcagcttggccttgccgatgcccccagcttggcggatggactctagcagagtggcccggccaccggaggggtcaaccacttccctgggagctccctggactgaaggagacgcgctgctgctgctgtcgtcctgcctggcgccttggcctacaggggccgcggttgagggtgggagtgggggtgcactggccagcacctcaggagctgggggtggtggtgggggcggtgggggtggtgttagtaccccatcttgtaggtcttgagaggctcggctacctcagtgtggaaggtgggcagttctggaatggtgccaggggcagagggggcaatgccggggcccaggtcagcaatgtacatgaggtcgttg

SEQ ID NO: 161214 - DNA, 1000 bp, Homo Sapiens
tttttttttttttttttttttttttttttttttttttttgctgggtagctactatgtgcaatttattcacgatacaacatatgactgcctactatgctccaggcattacacaaagttctgaggatatacaggctaattaagtgcaacaagaatacttagaattcgtacaaagcagtagactgtgctatgagagccggtaatgagggtcctaggttagaggggaaaagaagacttcccagaggacgtgatatccaagacaaggcctgatgataaacaggactggccaggtaaggaggggaagagagagccaggcagagaaaacagcatgtgtgaagacgactcacaggcaaaactactgttatgggtgcctcacatacagatcctcagtgatcatcaatccagaccaactctattctttcctttgtggttgttattccttccaatttatttagattttattgtttagtgaaaatgggcctctagtaaagtgtccagtcacaggtgaaggccaatatcagagttttaaaatgggaacagagcctaattatttgaaaaggagactcctaagatgaggagcaggtggtactaagcctgccaatggcctcagtcccttggcaacatcaagtcaaagcaaatgcctgagtacaggccttttgccagcagcaagtattttctgagagccacccaccggcccagagcagaagcaggaagagaatgaacatgtctgagtgttcccctggaaggctgggccttacaaggacaggcttctgtcagcatggtgacagtcttctgtgtagatgggggagggagagaagtcccaatgtgccacccatgggatccagcagaaactgggctctggagtattgctggccccagtggactttcatccaaggagttctttggtcttcactgccagatgcctgtccagttctgccactgtgtcatcggccatttggctgatctgtttctctattagcctaatggtgtcctctgagactgt

SEQ ID NO: 161215 - DNA, 1000 bp, Homo Sapiens; identical to SEQ ID NO: 157266

SEQ ID NO: 161216 - DNA, 1000 bp, Homo Sapiens
ttttttttttttttttttctgctttttaataattttattttttttctaattttgttaatttcccatagcaccttggcgatgttgaaaacaaatacaaatacaaggatgtactcattttaacattttatgcatgagcatgtgtcacaccaattttgggggtaacagttttgacaacaggaacaaatctaagcaatcgacaaaacagaagccggataactggctctgacccccacccccaacatttaagagatgcaaaggacacctgaattaggttaaaaaaatcaagttgatatggatatttcaacagtgttctgtgctgcaaaactgaaaataaaaccatttaatacacagcccattaatatctgagttacgcttttaggaactgtcaactcgaagattcataaaaagttgtcagcttttaaaaataaactttaagttatctaataatcaggtgaatttcaaaggaggatttactcacaacttgaaaataaattctctttcaacttcttaaaatatcctcattcagctaatgaaaagggaaacatatatgtatcttttcggaagctcagactagcatatgcccaaaagcctaaagttaaattaatggccaccaaaattgtaaggaaatataaaaaattaggaaaaaatccatcatatattatagttaataatttataaaagcccctcagaaggaatacactgttctcttttgagttttatcttttctgtaaaaacaaaattggtacttttaaaatatggttaatatatatattgccagcctaaataccagagacttaaccccagtgttgttcaactgtgtcaaagtaaaaccagtggacatttaagccaagagactaattattaaggccataactaagaaaactagagaagtgttcattaacttttaaatactattttacgttccagcaacattctttttgttcttctttaccctagtgaagatgctaacattccatcattaagcctttccaaagcaaac

SEQ ID NO: 161217 - DNA, 1000 bp, Homo Sapiens
ttttttttttttttttttgctaagaaagtttctaggtggcaggtgctgtccggggagggggcgtgcgcagcagacacagcagccaaactgtcctttctgcttccgtctgtctgtgccagccctgccgcctgccagctcttgctccctcagagccagaaggttcttggctccaggcttcctggcctggatgctggcagcccctggggagaggacccaggccccctctagtaatggccaccaccctccccccagggcagctggagcctcatctttggcagggtcccctctcccttttccaggagactctgtgcctgtagccctggtcccagtgaacctggcccccaccccagtggctggaacaggaaggccaggaggcagatgggccagggccaggagacagatggcccaatcccctgcccaccacagcagcttttctgagaggcgggcaggggcagggtttgctccccctggtgctgggatgtggtagagacattgcagccagggctggaggcagggaggcgggagtagagatgtcgctgctgagcccccatcaccatgggaggcaggggaggtctgcactctgggcactccgcatgctggggctccccaagtgttaggccaggctggagggccgcgatgtggcggggaagccccagaccctacaggaaagcccttgcaagtccccaccggggacccagccccaccgcaaacctctacggctacggtgccggccgcaaggcatgctgggaggcctgcttggcccggtgccgccgcagcctcacaaagacctgggcttctcggtcacccttccggccctccagcagctgcaggattgggtccccgttgggtgcggggtacgtgaggggcaggcgggtctgaggcacctcaccaggctcctcagagccactcagcccgggcacctcacgcagcggcaggaaggcctcgccttccaggtcgtcggcccccagcgtgtcgtagtccagcacggtgagcaggaggc

SEQ ID NO: 161218 - DNA, 1000 bp, Homo Sapiens
ttttttttttttttttttttttttttaaaagcttcaagatgcttttatgtcaagggtgtggggttgccctgcttggcctgcagtgctttggggccccatgtggtggaggggtgggcacccatggtacccacccaccctgctgcctgggcagaagtgcaacatggcacacgatgcctgggggatcactccccccagggactcatggtcagtgtccactcacaaggcctgcttccctcatgacatctggccagtgacacccacaggggaggttgggggcagacacccttctcttccggtacccttgaacatggtgtcagggtgtggctagctcgacggacaccgaacagctccacagggagggtagtgcccaaggctttttgcctcccctaccatgtcccgcacttcctgaatgcagctcaaaccaggagcagctcccccaggattctggcctgcttcacccctggagcaccaggccaggcggtgtctgtccttgagagccaggcccaggtctcacggtggcgtatggacagctcctccccataggcctggtcacaatagggaagcgggggtggctcctcccctagcctgcaggaagcccttggtagcccacttatccaccttctcctgggtgtgtggctcagcagccaagtccttgtgcactgggttgggtcccagcatgagcctggtggcctggcgggccctggcaccatggagagcagcctgctgccagtgatggcctggatctccaagacggcctccagcactgtcatgcccttgaccagctagtgctggtacaggacctgggtaacaggcatgtccttgggcgtcactggctcaggggcagaggacgaggttgaggaggaagctggatacccctgtccatggtgggctggggctggaagggtggctcagtggcctcgaagtgccgggaggactcccagctggcaccaggccatcagcagccgggtgggcagtgccgtgctgctgttgccctcagggc

SEQ ID NO: 161219 - DNA, 1000 bp, Homo Sapiens
gtagttgatgactttattgcataaaaaacacaggctgtttctccctcctcctaccccctcaaagtgagttcacagcagttaaagaaaaaataaattcctacatttttcctctagggggactgcctagaaagacaggcagccaagcagcctagatctataaaagaggggagcagaagaaaacctatccaaagcctctacccgcatacctcagagcttggggcttccattggggggagcatctgtgtccaccagcaacacccatttgggagttccccttaggatggccactggaaaaggctgtcttggtggcacagggaaggggtggctggtttcgatgggtggaggagaaaggcatcttacacccacggtgcccttcctctttccccctctccacctggccaggcaacctgcaggcactgccaaatctcctcctgcccccaaccctctcagcaaggaaggggatctctggttgggttagcaggaggtagggaaaagagaaagaaagaaagaacattacttcttaaactaccccaggccaatgagttcctcgggaaggtcatcctgtcccttttaaggagggcccctttgtatacaaacacatattcccacccagatcccagcccccacttcccatatagctcccagaccttggctgggctccagcatctacaaaggaggaagagatgctgggcccagatcccaggatcttggacatggtgaataagatggggtctccctggctagagaccccaggctcagtagagaaacacacatacatgcacacaggtacacacaacatgcacacacataacctaatattaaataaaataccctttgcttataacttaaaaatcaatacacagctaatctctgcagagggctccgggtgaagaaagggagcgaggggaagggggaggggtgtcagagggactgtaaggcccctctcttgagtgtgggaaagccctccggctgcaagggctgtggcctgtcagacccttcc

SEQ ID NO: 161220 - DNA, 862 bp, Homo Sapiens
ttttcttcaactttgatattttattgaaaaaagtacacaaaaaccactgaggtacacaagcccaggtaagcataccaagcaagccccctcacaccttttgtctgaaaaaagcttgacttctttgcagcaatgtctcgcccattccagcagcagtatctcagttaacttggttccttttcctccaggctcaaaacaaaatcaaactcttcatggaccacttagggttgtcctctttgctagatgggtcataatggggattgtttttctcaaactgtgtgtggtctgggtaagcctctttcacgatcttcatgagtcctgcgatgcctggctctttgcagttgctatggtagaagaaggcttcttctcccagcttcatggctctaaggaagttccgagcctggtagttacgaacaccatcccagcatgttgtctgtttgggctgtgctttgagatcctcaatgctgaacttcacatctacacctttctctaggcggctctctggctctgacttcatcagccagtggctgcttagattcttcaaacagtttttagtggctgaagtcttctgagggttggagtcctccactttagctaatgcctcacctgagttctcagttttggtgcgttttcctgatagtcccttgtctgaaccagaagtcccagccagcctcttccggggtctcgacatggtcacgctgcaggggactttagtgcggacgattcttgttatccttgctaattaggatcaactgaatggataatctagatgatgaagtaatttgctggctacagacccaacactctgcagactcgactgcggtccgcctccgctgcgccgcaggctgtgcagcgcgacccccgc

SEQ ID NO: 161221 - DNA, 1000 bp, Homo Sapiens
tttttttttttttttttttttttttttttttttttttttttttttttttccattgaaggtattatttatttgcagctcatcttaagtgacaaaattccatacagaagactataacagaaatcatatttaatatattaaaattaatacttcaaatatctttcacattaagatgattatctattgtgtaaatctttcctaggtatgtgtgtctgtttcttgatgtgtaaaccaaaactctgaaatattctcttgatctaactttgacttttaaaaactgacattgtattgaatttacataattctcaatcagaaaaaaaattactgtcagactgcaatgcaagtctgccccaatgaaggcaggaggagggatggctggaagtgtctcagggcactctgaaagtttagcaagcttatcaaggagtcctcaaactaaagctggccaaaaacttcagcataaaaactatcctgtctgtgtattatatatatttattaccaaatttaataaacaaaaaccacttttgaaccaggtaattttatctagtgtgaaaagaaattaatcacatggtcatatactggctagtgctctctaaaagtagacattaaaatatttcataattggagggaatctttggagattagtggcatctaatcttggggcctcagacacccaaaatctatatattgaccagtggaagttgatgatttgttatcaaatttcaaagcacctaatggaaaccccacttcatctctgtgaagattttcagttcctttacagttatttgaaattatttcaattctgtggagccacttcagaaactccaatgggcctttgcaatattaaaatgtggagaatgcattaatcattatttaatcaatgagtttaaaaaatagacaaaagcttctgaaacatgggactgaagtaggcggagcattataaaagcctaaggtaattggtagtgaagagttggaaaaacttacttagtctaatattgtaatttac

SEQ ID NO: 161222 - DNA, 881 bp, Homo Sapiens
ttttttttttttttttttaagatgaagacagtaatataatattttggtacaaaaacagctgcaggaagaggtggaggggggcctgtcattatgtttcccccccaccccccaacgaaaggaaaactaagactcccaacataaacagggccttgaggggggggattacaggcacttgggcatggagtcttcggctgcaggaagcactccgcttattcttcaggaatgggaaaggcgtgacccaacgagagcatctgtctcagagctccactcagggtcacccctctccagaggccggtatggggtggcttcagacttccactgcacgacctggagcaccaagaccacacaccacaataccaaattcacccaagaagaggtttcagcattgtgtaggttggagtaaaactgcagagcagttccagggggtgtccatggaattttctgggcttcagaacagctaattgtagtgttcaaggagatgatggagttgcagagagacctggtgccaaatcgaaggatacaggcagacaccaagaccaggaagacggctatagctgagatggccagtgcaatgcgcagccctatagcacctctgtgggagtcctcgatgcagctgctgtagatccagaagagcaaaagcaggaggcagtagagggccaagaggccagaggccccagctacaaagtagcacagggatggtgctgagggacgggataaggccagggaggagccattcagggtggccacaccatacaggggacatctaccactgaaggagccctgggtccgagtcatcgccgcggccgccacggccccgcacaggaaggcggcagcaaagagcgcaagctcgacgcgctgcagccaggacagcgccatggcgc

SEQ ID NO: 161223 - DNA, 1000 bp, Homo Sapiens
cactgtctagttgattatgctgagctggctaatccagcttgaattgagactttttaaagaagtaaaattgggttacattcatcaaagaagttgaggaataaagtagaatttatgtaaatatgccctttataaccacttctcaaaaaattacaggaggacacagtattataattactttggttttggcaaaatagtgtgatgttttttcaattgagaacaattttaaactcattaatgcctaccaacagctggcttctgatgactgaaaatactcttattcagtgagggtcttgtcatattatgatttattaatattaacatagcaagaagacagatggatttttttattaccactgtttactcctttctttctctcttttttttttttttttttttgctgttagctcaatcctagggcaaatttaaacgtatcagttggtaggaaaaagccacaagtggcctttaattttccaagcagctctggtagtatgtacagagcattataaatgatggtcctttctccctcaaaacactgctgtgttttgtcatttagctcctcctagatattttttaaataccagaaatgggtatgtagcattcccaaagagcgggctgtagcttttcatggactgattcagcaagcaccaaaagttacgaggttgataacatgtgaagggcatccatatttatcttttctatgagttgtttccttgcatgaatttcaattacatggagatcttaaacagtccatgttgccctattttcataatattccttggaatacttttcaagttgtcaattttagtctcagagactctctataagcagaatatagtttacacaaaataataaagacacacgcacaccaaataaacataacatgaagcttgccagtccagcagcaagcacaattgcgagcaccatttggcttctcatagaactcctggcttgggtgttcacagggttagtcgaactgtgaactccacgcaacagttaggca

SEQ ID NO: 161224 - DNA, 1000 bp, Homo Sapiens
tttttttttttttttttttaaggtccagctgtattatttatttacagcacagttcaaagtcattaaatccggtacaaaagaaatggctctcacttcctggattggcaccagacatcctaccagctgcaattacatcattttttatctatcttctgcttttactttgtgtagggtagggatggggacttacaaatgggccaaagacacttcaacctcaaaaccaaagagaaatctctgcttgcagagatacaaagaaagtaactctccctcttatgaaaagcaaccaggaactctactccagttatgagggccactgatggtgtgggagagctatcaagaagattcttcctagacgtggtgcaaagacagtgagaacccaggaaatcacattcatgggacacttgctcttaccgtcatcaccctctattctatctcaactttggccccatcaaatctaatgataaacaaaagaaggtaattacatgtagaaaatcaaagtgaatgggaatgtggtggtgtgaacataaaagaagaaattgaaaacaatcaaaagtttctcagtgctgctttcccgcactgtcatagaaatctctgatccaattcttcatatgtctaacttccaaggagcgggctaacagcacagacataggatccaaggcattcttggtgcggagatctaagtggtgggccccctctgagatggtgactgcaaccagagtgtctgtgatatccttagttactccacctcctgaccaggggtctagttcaccattgctgaaaacaatgtttgtgtgtgaactaatgtttttgcctccatacatagtagtgatccaggagggccttggtctcacaccccactgttgaaaacagtcatcagaaagttcctttaagttccatgagtgaggttcaaacatgtcatcgacaccattagtacaaaagggcatgactacttctgtgcaggcctgatagctccaacccagtgttcccagactgctagttg

SEQ ID NO: 161225 - DNA, 1000 bp, Homo Sapiens
ttttttttttttttttttatgtactgacttcctttaagcgttatctaataaaaagtgtgttatctaataaaagttccacacagtatttaaccgtcttaattcatctagggtagcaggggatataacagaactgctgggttccacaggaggttgaggggccaggatccccaacactagatatcttccttagcggggagaaagctggaaattacaagatgactcaacggagaaatgggcttcagtgggtaactttcagaaaattataaacccatatcagtgcacatagcgagggaaaggggagtttacttgaggtttgggttactgtgagcagactacttggggtgactagtattggcatcagaaccagaaatccaggcgctcagggcagccctgcaggtggggtgggtctccaggctgctccatactcagcgcctgtgttcctctccattcttcgggatccatcagacatactccattgagtacccccatcccacccccttttcagcttcacaggtttcacagaaatttctcaccacctgtttaaaaataaaaataattcagcctcttgacatagcttcttctaggtaaacggtcttcttttttttttttgtttccttctgctcataaaagaagggtatttccttgtctggtttttagacagaacactagcagtctgcagagtgtcaaagatgttctcctgggggattacactggcgctacagggtggcaggatcgtggagtcagcattagttggtgtccatgctgcaagcctcatcatccccaaagccctgctgagagctgcttggtcgtgtccctccatcagaggaaccagaactgctaagtgaaggtgtcttataaaattcatcatctcgacgttggtaaaatagcacataagctgctttagtcactatctgatcctcagaggccagggacacgttgctatcatcaaagtaataccatttaccattcagtttgttcttcgcatatgcagtgtagtggc

SEQ ID NO: 161226 - DNA, 1000 bp, Homo Sapiens
ttttttttttagaaaagcacacagatttattgcatatcaatctcatgtataaattcattggagcattggaaagattacatttggtatacagtcctattctacagcattaacctccaaatcggcttctcctaggctttctcttaaggaaatgtctctacacaagtacatttgtgttcatcacaagcatcagaatgcaatttgcaaaattgttcttttcatgatttcctacacttcacgtcttatttcattcttctcccacagcgatttccgtattaattgggaactgcgcctctttcgcgtcagcagttcaggactcctagtctcagacgtagatcctaatcacatattcaataagtgcatctacagaattttccttttaataaaaatttcaccaacagacacgataatgaccgctaagcaggagtcatgcacagtttacttataaacagaacagaagcaatttacaatcaagggggacatggggcgagcgccagcctccttctcaatggtctttttaaacattatatgaaaaccagacatttacatttgatttctttttcaatactatacagttctaaaagaaaaaacaaaacaaaacaaaactaaaccaaatctgtaatgtaacaatggcagaaggtggcgggcggcacaggtctgtgattctgcgaggattctttatatcgaccttaagggacaaagtccatatacacacacgctttaaattacgactctgacaccagggctcagcatccctcgtgccgaaagcgcagtggcaatgcacgtgacgctgaaggcaattgttagaatgacttttgttcacaagtgaatcacacgtttggaaactcaagctgccttttatttatttatttatttatttttttccaaaagtggtaatacggatcagtgacagaaaagaacaaaacaaacacaaaaatggaatggaaggagcagaggaactcttctaggaagaatgcaaggatggttttgtcacagtatcact

SEQ ID NO: 161227 - DNA, 1000 bp, Homo Sapiens
tttttttttttttttttttttttttttttttttttttttttttttttttttttttttgtgtgactcactttattgcgatatccactttattatggtggtctggaactgatcctgtaatatctccatggtatgcctgtgctgtacagggggtaaagtgtgaggggtcaagaattttcatgccagaaattccatagcagcctactagaactctggaagtatcgcctttggctgcagtgccagattctggtgaggatttcctggaccccgatttatatctgaaaaaacactaaaaataacagaagcagggcaggaagtggctatgataacaaagctgggcttggtactttctctggcttttgtggccaatattactggactcccgtggtatcaagtttcataaaagaaactcatacaaagcagagatatcttaattattttcagactggcatttcaaaaagtgtcaatttaagtaagtattataagttatttgttctttgttttatcttttcagatgtttcttgaaaacattgtggtgtgatctttaacagagttttcacttaccaattaatacaaaaaataagaaaaagctttaaatacatattttataaaattttatatgccaaataaggtccttcatataagaaaaggaaaataatatcaattttcagtactattatttagcactagagcccctccagttagaaaaacaattcttttaaatgtctttatgatttgaggtttcaataataactcatgaataggtgaaagtttgctatttatttagtcttagaaaaacactgaaagaaaaaggcaggaaatgtagtacgcagtgtggaagaatggagctggccacatgtagttttagcagctgcagaggaaactggctgagtctaaggttacatatttctgctcagtaagggtatccatggtgataactctcatgatgacggtagtcatcctggtaaccatcctggtatccttggtggtaactatggtaacc

SEQ ID NO: 161228 - DNA, 1000 bp, Homo Sapiens; identical to SEQ ID NO: 161227

SEQ ID NO: 161229 - DNA, 1000 bp, Homo Sapiens
ttttttttttaagcttcagacgggtaatacatatttattgaaaattttcttcaccgacaatggtgaaatcaagacctcaaattacaaaacatggtggcaggtgatacttacaaaaataaagcgaaggtctatgttttacagatttgtgcatgtttccttcaaatctcagtctgtactgtcattaaaaagatcatggaatctatgttgttcctcatgatggaatagtaaaaaaactgcattccactgacaaaaaaaatagctttgcttccaaatagcacaagtctttaaagtgacttttcccaacaataaatatagaaaatagcctttaacaagcgtcttttagcttggtcagggttgtatcatttgtttggaaagtacatccttcccctgcagtcagaagaccccagacagcctttccagttctcccgagtctttggtgcgcacagctgccggcgggaagtctcactggcggcagagccactaagtccctcctgacgggatccacaggaatcttctcgatgtaccaggagcctctgcccatcacaggagggcaggcccatgtagaacagactctaacaaacctgcagctggaaactggatcccttttaaaccagccgccaccacagctcggctcacccaccagcgccgtccgtgaaggctctctctggccctcacggtcagccaggctgccggtcacaccgaaggggtctttggcgggtgaacctgctgcatgagctgcgggcgcttcaccctgggcttcctccgcttcggcctgctcttggccttgttgatttgtaccacaaagaaggccaggaccaccatggccctgagcaatgccttcccaggaagccgctttcttggtcacagaaatggagatggccaggtagcccgaccaaggccataagaccgaggagtaggagaaggcaacttcaatgttgtctccgttctgtggcaaatagggctgccagtcaggcttatctacaattcttcctgtgactcc

SEQ ID NO: 161230 - DNA, 1000 bp, Homo Sapiens
agtttttttttttttttttttttttgtgcaagatttaataaaaaacaaacaaaaataggaatggttgctttcaacattttccaggttgtgaaaggtttgccacgactctcaggggtgtggttctaagctgcatcagtggaacaaatacaaaatgctgtcctcctcctgggctggaaggcagtgcactttctcctcttaacagccagactagcgggtgaggagtcagtgctgtgacccaggccaagctggagtgtccgcatagctttttctctgaccagtggggattccatctaccttgaggcgtgctggctgggccccgtttccacaccagcacatggtgagacagggtagcttatcaacaggctgctgggccttaatactgacagtgagtgtggcgggtcacagccaggaaaggactaacacagatgccctcccagcccccactgctggcctaattttagaataccacggaaaaaagctttgatgaagacaacaggaagtcaacacagcagagagtggtgtggacaacccagaagccagcctcacgcattccatgcccacagttaacgatgacaacaacagcaataataataataataataaaacaaaggtacaggtgaaaagcagcgcttggggtgtgctgctgcaagctggggaaggcgcgtgctcaacttggatgggacacacctagtctttcttcaagtccctggattcaaagagcttcaaccgttcttgcaccgtcaggccttccttcagactctcctgcatgggccgggaagcgggtgcatttcaggtatcccacgagacctgctcaattacggacttggacctgatgtttctgagttgccgggtgacacaggatctgtctttcttcaagaagtcagggttgcttttagatttcattatatcatatccggacaccgtggcactgtcaggggacttctcccccagtgcttccgttgcagccttgagctgctccttcaacctgctgatgtcacag

SEQ ID NO: 161231 - DNA, 1000 bp, Homo Sapiens
ttttttttttttttttgtgtgagcaacaaggctgtttatttcacctgggtgcaggcgggctgagtccgaaaagagtcagcgaagggagatagggatggggccattttataagatgtgggtaggtaatggaaaattacagtcaaagggggttgttctctggtggccaggggtgggggttgcaaggtgttcagtgggggagcttttgagccaggatgagccaggagaaggaatttcacaaggtaatgtcatcagttaaggcagggaccagccattttcacttcttttgtggtggaatatcatcagttaaggtaggaaccagccgtctggatgtgcacatgcaggtcacaggggatatgatggcttagcttgggctcagaggcctgacacacagcattattacaaacacttaggacacagaggtatccattcatggatttctttccctttaccaaggtatgagttcctcaaggatgtgctgctatgtatattatccatccttgaatgcgtagctggggacctggcatgtgaccgatatccactgaacatccgtgaagtgaaccgaagtcgatgtttagtagccaggtaggagcagcgagggcgtcacctggcagttctcattctaaagaagatggtgtagcctgggagggtcatgaatcccacttttgcaaccaaccttccctcagaagagagagtctgggacaccctgttctaacccttcggtggacttccgcatggcatgtagaccattccagatgacttggtctatgctctctgtccttgagatggctcttttactgttttgtatgcacactacatctccccagttagtctgtaagctttacttgggcaggaaagacgaccgttttgtgtctttctgtgtctgcctcagtacagagctcctgggagaccttcgacaatttagtacatgtagcttgaaagaacccgaggctttgggtttcaaaggcagctgtcagatttctggtccgactttaggaatata

SEQ ID NO: 161232 - DNA, 1000 bp, Homo Sapiens
tttttttttttttttttttttttttttttttttttttttttttttttttttttttttttttttttttttttttttttttttttttttttttttttttttttgttctgaaaatgctttaatgccaccaagaaatctgaaaggtgcaggaagctgccgccatccccctgggtgcctgggcccaggctgtccctgaagtggccatcagcaggcaggaggcttgcatagccaagcagcccaagcaattgctgacatccttttgtcctctgccctaaatgccccaggttcctcctcagctggggaaagaaagaggaggaagtggaaaaagagtaggaggagggtggttctctccagggcacccttcctgctttgggatggtgactcacccagcaggccctgggagaggcaatttatcagccccaacgaagacaggccaggcctcgggctccagaaggggcagaggaggttcttctgatgcagtggccaggaggagtcaccagcagaagccaaggggcggtggaccatccctctgctgcctctgtcactttgggcctttctttagtacaacattgtcatactcagttcctggctgccagccagaagcagagaaatcctgcccggctggctggacatgctggaggccagcagggtccctgtcagctgtcgcctgcctcctccatgcctcaccccggggctcctgcgggctgtcatagagggacagggcagccactccctcgggctcatcgtatatgtggtcaggtcgagggggcagggtctcctcaatgctgtcgtacagagggtcggccaggagctgaggagggactgccaagatgcccctgaagttcttccccaaggaacgggccaccgcatcgaagggcacggcatactccccctcctggccccgaggccgtggagcaggcaccggtgtggtgggtgaaggcggcggcagtgagtcatgcggccgagagtaggggctatcaggccggggcagcgacgcggggat

SEQ ID NO: 161233 - DNA, 1000 bp, Homo Sapiens
aaggttggaattgcttttattgggggcggataccgcaaggccccgcccacggtcaggttagtgttctgcccttgcagaggcgccagcagcctgacacctccacctgccacccgcccggggttagtggaacatgcaaagctcagagggtggaggcaggggtggtcgctgctgagaccagggctgggtgcaacaggagggtcagcacagagcctggctggtgtccctgggcccaaagggggctggggctccatgggagagagacgggcaggcggcaccccagtgtggggctccacaagctggaggggcccctggacccaccaggaggacaggtctgcagttcccagccatgccggctggaacgtccgcctccccactgggtctgggtcctcggggcctggggttagaggccgacatggaaggcacttactaggggaacagaggctggaggctgacgccggaggccaggggtctcaggagtgagtgtggggggtgagctggaaagcacagatcagacagcactgtgggggctgggcccgagggcctcgtcttcccatggggaaggggcttctctgggtagactgggagagaggctgactggggccccccgtccccagcaaggcccaccgtgcaggccagtgctagaaacaccagggccctctacagacagggttgggcccagctgccctgtgcagctaggactggcaggcgggctaccctgggaagacaggagggtgggctggggcccagcttgggaccctccaaggcacctggctgtgtgagtggcaggtagaagggagtgaggagacccgagggggtgaggcggccagcagggctgggccagccctgtcccccaagatacaggctgtctggacagcagatatatattaatatattagtctggtctttttggttaaactttaggcaccacttgggaggaagacacctttaagcgttgaaaacggcccccgcgcctcggtgggagccgggctgggccgcatgc

SEQ ID NO: 161234 - DNA, 1000 bp, Homo Sapiens
ttttttttttttttttttttttttttttttttttttttttttgcttataaacatcctttattgtacatagacagtggatactgagaatgatcaagtaaatggaattttgaacaggtaaagaggaaacaaagaattaaggtatccctgtggaatagtgcaagaaaggagtgccccacccatagtgttatctacaataggtactccggggaaaggaccccaaggagtcagaccacaaatgtatgaccagcacaattctatgatcaaactctacctctagcaaggcgtctcaacaatcaagttctatttaaatcattcgctcgtgtcttctttcagtcatgatgaaataatgagaatatcataaggaacagaaggtaatgcattggtcaccacccttggagaggctggtgggatgtatctggattagtcctcacggggggtgctattttcctgcatagtcttcattatccagtcaacatagttctttacccgtgtgtagagcccataggtcccacactggggcccccaggacaccaggccagctgcgtagaatttggtcttgtcattgggatcctgtacagcaaaggccccaccactgtcccctttacagctatccatgcccttctctcctccagcacagatcatgttaggagtgaaaacataggcctctgcatctgctgtgggtttctccactttcacttctttgcattttcttaaaggagctacaggtaaccttgccgccttgaggcgaacagcacgatctctcttctctgttcggccccagcctgagatcagtcccaggtccccatccatgaggttgtagtcggaagaggtgcctggtaggcagatgggagagacggtgggtcccattttcactgggtctttcagccgcaccagtgcaatgtcattatcaaaattggttcgtccttctgggacttccagcagcttccatcccggatgaataaacacatgctcaggagtgagcatcttggattttgccagc

SEQ ID NO: 161235 - DNA, 1000 bp, Homo Sapiens
tttttttttttttttttttttttttttttttagcagatcccaaaggggaaacacaagtcattttattcagatgaggcactttcaatgtatgtgttttggggtgtgtgtatgtgtgtgcgcatggggaacagtgaggtggtgcaggataataaatactgtgagggtgaaggaacactcccccaagctggcaggagtatgtggcagcaatgtacagagcctcgggagtagagtccagggacagggaggtgggttcaaggctggcttggaggccaagggtgtcccccttagctcaagaagccaaagaaattggtggagcgggggggtgggcccatgagcatgggcatctggttcttgtgggtgatcttgattgtacagggcgtctgcatccagggttctccgtcaatttgcatgggaagggtttttgtggtgtggaaggtgatctcagagcacttggccagccgacgtccagcattcttgagcttggtatagatttggcccatctcaattgcaccctccagcccaaccacttccagtctcttgtcacttaggtctggtacacaggttttcaggatatcagggtcggtgatgactttagctgtagcacctaaggcctggttgatcccatagatatccccatggggtctcctggtatcaccccagaggttggagccaccatgcatgctagggatgtttagcactgcgatgccttctagggacaggttgctcagatccagcggtttcccacagatctcaactgtcaaagactcctccagctttttgcatgttgagaagatggattcagatgtggcaaattcgaagtaccatagcttgttcttcattctgctgttgaacttctccggatatttctctcgcatgatgtggaatcgatgagcaatagaggcatccacgccaatagagaagtagttattgatgatttgaaaggggactgggtcacttttttcttcagtttgttgaggtatcacctccacagaccatcgat

SEQ ID NO: 161236 - DNA, 1000 bp, Homo Sapiens
tttttttttttttttttttttttttttttttttttttttttcacgtttcatttttattgtgctgggggtcaggcagcagcccccactgaggccccacccagcctccgggctgcctggcctgtgccatgggtcccaggctccagcagggagctcgtaccttccctcagctgagggcccacctggccttgggatgccgttggggtagccagggtgggggtagccaggggtggattcacagagaagatcccagcccatcccatgccagggtctggggagcctcccgaggaaggggaggaggaagaggaggaaggccctgcctggccttccgctcagtcaccccgaggtggcttctggacccccagcatgttgggcaggggcatgggggctgcagggcggcgtgaggggctcagtccagcctggggcgctgggcagtcacgagtctttcttgcaggagcaggaccccagctgctcctccaggaaggaaatctgctcgctcagggagtcgatgcggccgagctgctggaaggagtgcaccaggaggctgccggggtccgggagcccatgctccagtgcctgcgaggccaggctgtgcagtggggccagcaccagctgcagcttctcctccagcaggtccaccctggactgcagcctctgcacttcttccttcattgcactgtccactcctgtcgggttgggggccaccctggggggccctcccttgggcacacagagtgtaccgtctgcagacaggctgtgcccctcccaacactggcaccagtaactgccggcggtgttgacgcagcgctggggacagccgcccctcctagcactgcattcatccacatctgactggcaagtgtcaccccgccatcctgcagggcagcggcagcggccaggctggacacagctccctccgttccggcatggcggctggcatattgctgctccacaggccccaggaagcccgctggtcctcttccagccggggcagcacgcgtag

SEQ ID NO: 161237 - DNA, 1000 bp, Homo Sapiens
ttttttttttttttttttgaaaggttacctgattcttttatttaagaaaagtgaaatacatggacctgaagtgagacagcagagggagggagtaagagcggccagggcaaggcagcttggctggccagcccccaaccctctgactgaaaagccagcagcaggctgcatctctgagggccatacctgctttgtacccaccttggggcctcagagctagctactctagaggaccacagggtgcagagagggtgtcctgagggtccttcctaagagggattcctgaggagggagctgagaccctaagggcagcagcaatcttctggttaaactgctccccttcactgtcccacctaggggtggggaagagccaggagcaatggggaatgctgtgagggctgtgggggtggggggacccagcagacctgggggccgggttgaatgtcagctgcttgaagagaggtccatggtgctggcactgaggccccgggagacctggaggggtgctgcactaggttggttcagatagttcaaggaggctgctcgcttcatgttgctgctggagggccgaggctcagtcccctggagcttcctcaccaagagttcactgcttctgcggagcacatcccggatcttgccaagagagccactcctctgcagggtcccactgccatccccggaccactccacagccacagaagcatcttcacctccctcgaatttcacactgtctccagggccctcctgggaggtccttctaccatcactctccccaagcagctctgccaccttcgtctggctgatagggtcagtgccctgtctccgggaccgcagggcacattcctccagggtctcagcagcctccagctttccctggcgcctatacagagctcccaggtttctcagagtagtgttcactgtggggctgctcactttgcaggccttgtaccagcctccatactcagcatagggtgtcccaccctcatggtgccggcttttgctc

SEQ ID NO: 161238 - DNA, 1000 bp, Homo Sapiens; identical to SEQ ID NO: 161235

SEQ ID NO: 161239 - DNA, 1000 bp, Homo Sapiens
ttttttttttttttttttaagttaattgttactttattgtagaggaaaaatatcctgaaatatttattaaataacaataattcctgacaaaatcattcttcgggatgtgttagccaaacaatctggtcaaatggagtaagctgtccctcaccccagtaataagctccattcatattgccataaaccacaggaaaatccaaaagattttctaaatggcttccaaatttctgcacagatgcccttattgagcccagaggtaaatataaacaaattgaaattagagagaaattagaaggatagctgagaggaaaaaaatgttaacaattggtgaatccagaaggaagggtatatgggggttcattataccattctttcttaatttctgagctacttaatttctgagtaacttaatttctgagttacagttgcttttgggtgaccatgttctctttctgacttgcctaaaaaatatgttcagttatttcttttcaaacctgaaatacaaaatcagctctttctcaggtgatgcccccctttctactatctacaaaaacttccaaagctttctagaaagcttaaattaaggggctacagtacactgatatggttttgttgttcttggaaggtgttggactcaaacgctcatcgaaggtctgtgatggtcactgctctgtccacaacagtcacgtggctgcagctacagaacagaggtggatccttgctgtgtggatgaaatcctttctggcgacaggaagaaatctcctctagtccatggtcagttagtttaaagaatccagtttcctggaacttgggggagcaaacaatggctactgactctggcaacatcatctggtaagagcagtgagtgtgtaggtcgacactggagagaaacgcggtctgtgtggggtgagtatgaatccagcccagtgtgatgaggccctgctgatcctgtatgaggaaaagttcttcttcgttctctgtgttgcagtaatcagaccca

SEQ ID NO: 161240 - DNA, 1000 bp, Homo Sapiens
ttttttttttttttttgttttctatgaaatagtttatttcattgttcactatggaggggctacaaatacacttctgatattaacacaaaggtctaaactttgcaacactggtaaaaatggttatgaggaattgagaagctagggaacagggcacatgacatttacatttgctcatctcccactatacatttcaaaacatcaaaggcacttaccaaagtgattaaataagggagtgtggaatttaaaataatgacatatacccaagacacaaaataaaggacttgaattttcttatagtttgatttctaacattttactgactaaaatctctgctaattatgtaatctactttgtggctttaaaatattggatactttgattttaagactactttaaatgaaaagaacctaatggaataccataaagccagagtttttccacacccaattacagtagaagagcacccctatatccaggcaaaagcaaaaggccccactcttcagtcactcatattgcttctccagagagcactgtggagtcacctctcactgatatactaacatgtggcatctttgtggcttcataggcacattcattcaacacacatttatctagcatctgccaaggttcacagcactgtgctgggtgctggggagacagaaacatggtgtggtgcttactttaacaagcttacatttatcccctgtaattgggttggtcatgctttcttttcaattcctactgatttgttccaagaagcttcttggaataaaacagaagccagaataaatgcatttgtattcccatccctaattctacttggtttccagaagaaaaaaaaaatcagaataagactatctcaaagtattaaagaggatctaaaccctacatcaatctaaagcatttagacaaatgcatttttagacaaaagcatttagacaaatttcatttgtctacaacatggaaaaaacaagttaagaagtagagcacctttcagccc

SEQ ID NO: 161241 - DNA, 1000 bp, Homo Sapiens
ttttttttttttttttttcccagaaaaccacactgctcttttattcaatggaacatccccgctttagcgcagtgttgaatctaacaccgaaaaaagcccagagaaatttctgcagataaaccagtgaagagaacgcgcagtatacattattgtcaacagaatcacttcatggagagggaagcgggaggaaaaaggaaggagaatgaacaaggggctcaaacccctacacactgcaaaacattcagacatttgggattaaaacaaaacataaaaggaagccttccaggaaggagaggaccaaatggaatctgaggcagctcaggtgatcaaggagcacaggaagaactccaggctggcaggcgagcccgagggagctcaggctgcccacccactgctggcaggatcgccaggacggatgggaatcccgaaacctggagatgaacctaccctcggcaactttacaagactcccttgacaagggtggcagagattaaaaaaccccacgctttaaacaaacatctttgggggtggctatggcaccttgaaaaacccacaaccagcttgacatgaatggccaaagcccttgcccaaaaccatttgctcccctctccttggtaagggaaggagaactggagagaagggaaaggaatctaaattgcagcagaagaccggggagagcatctccttggacggagtctgaagaaaggaaaagataaagaagtaacaaaggaaaaagaaaaaaattaataaaaatttcacgatatggagccagcgtgttccgattccgtccacaaaaataactcaggctgctttgccgaaccatcctgtccaccaggggcgttgctgaggctgtctgcctggaagggtcaccaatgggcgcggaaagtcctcactctcatggctcgggccatcgccgccgcggggagggatctttgctgccatggcaagggggtactggaagccatactgctgctgggcggagggggtggcggaggctgct

SEQ ID NO: 161242 - DNA, 1000 bp, Homo Sapiens
ttttttttttttttttttgcccagctagttttttttatttttagtaaaaatgaggtgtccacttgcccaggctggtctccaacttctggcctcaagcagtcctcccgccttggcctcccaaaatgttgggattacaggcggaagccactgtgtctggtctttggttcttttttcaccttaaaactttggggtctcaggttgtgtttatttggggctctctccttcccccaactccttgggttctttcccagagctcttactttctgagggcccaggcctgggcataaggccagatcttctcttgatgcggcgatgagctgttccagagatccaaatgtggtcaggagggtctgactgtccgttttgttgactgacttcacggtggtcagacattcagtcacccgggagacgaagtcctgctctagcttctccatcaggaggtccgctggtttctgctcataggccttgtaggtctccaggtaccgcccagcttcctcggggctccaggcgaggatcaatgtgcagtcggccaggatacacatcttagccagctccttgagggcctgctggggatctttcacatccacctggacaagcaggacccgcaaggcgaagttcttccccaggctctgcagccgcccatggatgtagtctgggtgcaggttgtggtagcggaggctgaggaacagggcacaggtgctctggcccagcacatagtcgggaattacgtcgccaaattcccagggcacattgcgcacgaacttcagtacgggattgcccctctgccgagggctcacaatgatgctgttggattttgccccgggtttcagggcctggttgggcgtctctcctgccaggggctctgaccctgtggggcacgtggccccagccccttccagaggctgtgagatggcatattcggcgtaggtctgaggggccgcctgggccgaggtgtccacagtgggaaggctctgtgtagatcggaataagggcttggcca

SEQ ID NO: 161243 - DNA, 1000 bp, Homo Sapiens
tttttttttttttttttttttgtccaccttcgcttttattgagtagttagtgttctcaagctggctcacacccatgcggtcagctggggcctagggtggctctttgcaaagctgaggggcaagctaaggaagccaggcaggtcaggggccctttcggccttctcaagcctccacctgagttctcgtcaatgccagtctccctggtatgattggggacattatcagagaaacatctaatagcgcacatctgggcacccacactctgcttcagttgcatccatcctcccaccccaaattcaactcctgacccaatacaaaagacttttttaaccaggatttcttcttgcaggaaagctgacttggaaacacggggaggtggcagggaggggcaaaaaggactctggcaagcagatccacttgtctgggtccctgcagtgaagaacccaagatccaggtacctcagcctggaagaaaccgtgcactgcaggtcttcccttctatcaaaactaaaagcaaggaacagaagtcaattgaaaccccaggtcatcctacccaccttctggcagtctctggataatgatctaaggaaataagcttacatttataattagaggataatttggagaatttatactatttacacggaccaccctgcaaagatcagggaaggtaagagactgctgggcagagaatggaaacaggctggggggttcctaatctcttttcaccattgcctttgttgttcccacccttcagctcctggcagggacagcagaggaatcagatactcttggggaacacaaggtcccagcagtggctagggtgtgactgctacttttgcataatcaggcagcagggagctatgaggagcagaacagtccctgcctgctgtcctcactcagaggcttggggtgcactgagccttggagtgcccgggatggtggacagcttgagcacaggggcaagggcagggctctactgtagctcaggaataaactgg

SEQ ID NO: 161244 - DNA, 1000 bp, Homo Sapiens
ttttttttttttttttttgtttgggtgagtttatttacatctaaggccttataaaggcgtaaaaagtctcattttatggcacatttaacaaaatgtattgattaaagctggaattgtcccagaaaactcaggatccctagtcacactgggctctctgttcagcagtcctgtagggtgggtcagtcagaacccaaagcttcagcttgcctcagaagcatccaagctcagtccatctgaaccgcatctagttcatccaagaagcgccggcacttccccatcagtactttgatggcttcactcaccagcacatctggtggcaacacccccgttgactcaacagagaagatataatgatctcgaacccgggcaagcctcacaaccttctttagcttctcattccggaagatttctctgctgaaggtatccagccgggggttggcaactctggccacctttttaccttggacttcctgcacctcaataacaccaggtgagaagcacctgctcaactcctcagctgcctccccttccacgggctcaagcagggtgatgtctggcaggagcctgtaactggctgttgccactggtgaaaacttggcatgatctttgccaatgcccttgacacagtgcatgagcaggtcaatttcttggccaggccgcagctgagcgatgaggatatcatcatgcactggtcggatagtgccctctggaaagagatcagcctggttccccagggggatccatgtcatatgcctggtatacactttgtggttcacgtacagttcgttggggtcagaggaatctttagcagcatgggggttccgagtgcatctgacctggagacgaaactgtagagtatctatctctgtgccttcttcatctccttggttccgatactcaaaaagacggggatcagcatgaatgggaatgagccccagacggtgagcaagaatctcatcctgaacaatggatgtattattgtacaccaggaccttctcca

SEQ ID NO: 161245 - DNA, 1000 bp, Homo Sapiens
tttttttttttttttttttttttttttttcacatgtagaaaagaggctttattaagaaggctttgaagtcaaaaaataaaactcttgatacaatttttttaacccttaaatcagctcagcaaatatataatcagtaatttagctgtgtaagattaaaggtccattactttatttaaaataaaatatattttagttcttaaaatttattccataaagtacatatttccctataaattccctacatatacacaagaggtaaaaagtaaaagtaaaaaaaaaaaaaaaattaaaaaaattttaaaaatgacaacagaaaccgcagtaaaaaggggattaataattaacagaaagttagaaatttgattggaacgcccctcgcccccgcccccctgccccctccggccgcgcacggttgatgtacaaaagcataaatggttagccccaaaaagggagtaaaaatgtcaccctcctcctctggaacgtctgtgcggcctgagaccggccggcgagaaaagtcaaatcagaaaacggcttcggacgaaaggaaaaaacgctgagcgctggaaaagtcgtgttttttgttttgcttttttaaagatcaccctggaggggaggggtgtctaaaaataagaaaactaaaaaaagtgcaagcggaccttttctctccggtttattgtaacctgaccactcaatactgtcgttgaagggctgaggcgccgccgggctgcggggtctccgtctccacgcgaatggcctgggtggccggcgtgcggcaggcgggacactcgggctcgctcttgccgcagatgcggacggcgcagtccatgcagaagaggttgtggccgcaggggaccagcgcagccatcacctcgccctcggcgcacaccacgcactctcgcgccagggccggggccgaggacgccgaagggggcttgcggctgttctcggaggcgccggagtccaggggggcgcaggcggcggccgcggggctgctgggcag

SEQ ID NO: 161246 - DNA, 1000 bp, Homo Sapiens
tttttttttttttttttttttttttttttttttttttttttttttttttttgatattgtagacctttattttctttaaatctcctaataaaaacattaaactttcaagaagattccaaactgacattgcatagaccaactcctttccaaaaatatctctgatatactctccaactctctcaatatatagaatttgaagtccaggagctgtgggcacctggtgggaattcactgagctcaaggggacaagagggctgaggacagggctcccacatggggacaaggccaggctttctggcctctggttccagccagcatcaatttggttgtggccaaattctcagtccaatcaccctggcccagggcctggcgtgggaggatgtggcaggctctgtctccttctggggttcctggtctggaggagtctccccaacagcgccaaagctggctgttttccgcccaaagccccagaactttgaatgagaggcaaatctagcctgaatgcacctccctcctaggctgggtgaggtcacgcagacacagaagggcaggacagaactccccatcttctgggggccaattcgtctggacactgtgcggtcagcttcctttttaaagtgccagtatcggtggggcaggaagggactctcagggctgagcagagccttctccagcgcgagcaaacactctgtcccgcctcggcaggcaccttctaacattcattttctaagggttaggtgagtaaaacaacaacaacaaatgctggaaatgctctgttcccaatgccagggagttccaagaccaagaagcccaactctcaccagcgggggcagatggggagctagggaaggaaccctcccagcctggggagggcacctgcacccctcccagagagagaagcccccatcccggccccccagctgggccccagcgctgctggaaccagccggcaggtggggcagaaaagcagcacctcccctcaccagggcgaggaggcaata

SEQ ID NO: 161247 - DNA, 1000 bp, Homo Sapiens
ttttttttttttttttggtgtattaaaccaaggacttttttttaaacttagagaaaacaagaagacgtgacaacaccagaaacaagaacagctctctggccagcctgtgctgaccagtacacagtgaatcacacacagaaaagtatgtcattccggtcagtgtctagctccaccgcctagaaaacagactgcaaataaataaagcgcatggagaccccgtcacgcagcaagggccccatctgggagagaagaggtggggaggggaggtggggaagcagcaggcggggctaccacttcaggcagcaggcgtgaaaaagcagggacaggagcagatgctgagggcttggccctgaccctccccagtcagcccctctaggccaatacggccacaccagaagccactgggggtgggcggacatggacttccgtgaccctcttatggggtggggctccctgcagtggggggtctttgagggcagagacccctgcggctgacgcaactttatcccagtagggaaacagcttccagggtcccaggccaagccccttgcatggggagggctcagtcaccccccacactcccatgcatgcactcagcaaagagctttcctccagccttcctggctggcccaggaagaggctggagcttgggatccagtcacccagagggtgacaccagggtttgaaagggccacatctgtgcatcagacacaaggaggctcctcactcctcttctccagccctgtgtcactcttgtcccatagaggctgcccccaaagatctgttgcggggaccagcaggctgacagacccccagaggtggtccagggtggatagggttggggtggatgagaggggccagcagggtcaggggttcccaagaaacttgggacaagggggcatgtcatcaggccctggatgtgggagactgcaagggtcatgaggcagccactgtccagccgcttctggcatgaggcaggcgtacagcttcattcaggacc

SEQ ID NO: 161248 - DNA, 1000 bp, Homo Sapiens
ttttttttactggcgcagccaggaggaaaagggcctttatttccatacatcgggtaaacaggggagagcacagcccagtgagtacaaaccaattgcaggagagaaggggggcggcagatgggagcagcaccaggcactgcacttgggctcccaagtctggtggagttctcagggataacctttttagggtgggggctgggacctccagaccacatggtgttgtgtctgggataagtgtgtgggggcagggaggttggaagaatgacacgggctcaggacacagagtgaggactcatgtctaatgagcaccggccaaaacttccatcttcagtttttctgatcacaagtcctcaaccccaagccttccctctcaagttgagtttatggtccagaccacctggacagagcaggagggaggcagtgcttggatcagccctgaactgctgtagttggaatgggtttaccttaaataggtcattgcacataacacgctgagacaaagagggtggggtgggggctggaggtgcggatggtccacacacacacttgtctgcgtaggcttgctcaacccagcccagcagcaccggagagcccctccgcacctcattcttaagaacctggacccggctctcctcaccagcgtctccagctgcacagagaaaggactgctctctgaagggtgaagatggagatgacattcccgagtcgttcttgggagccccagctaccactacagccccctcccactctcagggatgcagctgtgatggagaggttgggtatttaaattaaaaagtagaaagacagcaggcaccaagaagagagagcccccaccccacacgagagggaaggcactgcttctcctcccccaatcctccccatggacccagcaacctagagtgtcccagtaggcaacctgtccaccgtccctgagcagggagctgagagggaggtcaacgtgctggctccatgcagtgccaggccacctgccactgcccac

SEQ ID NO: 161249 - DNA, 1000 bp, Homo Sapiens
ttttttttttttttttttagaaggaaaagagattttgcgttatattttttaaatgaagcaatacaatcattttttatgtatatatctagttgaggagaaaaaattacagattttttcccccttactccaagataatctaaacagattttactctggatggcttaattataacataatccatgaagttatagccagggggttaaataagaagttgatgacaaacttggtttctctaacaagtatgcaagaaaactcaagtgccacaatgaacacccataaactgctgtcaggaggcaaagtccctatgaggtaataataaacccacgaggttaaggcaaaaccctacggttgtttctgcaaacaaatgtccaggaaactcaagtttgtgatgaaagaacagtcttgaattcaacttcagcagaacctttccctccctgggctccaaagcactatgtcacctacctctccactcaaatgccccattaagtaccatcctgttggagcttcctaacgcccctgctccctggtttcatttggaaccaactgagagacacaagtccctcttcgttgatcagggtcagttgaaagatgtagctgtcggcctggtagccaggtgggcttgctaatcctgcacctctaccttaagcttacccagcgtgaggccaggttagaaagtcacaggccttggcagcaggcagagagcctttactgtcatagtgaagagcttgccaaggacaggactgattcttcctccagcctcacctatcggggcagtcattgttccgctgtcaggaggagaggggccagaagggtcacactgaagaaatgtgacatgagggtggaggttcctgtccagcattcttcactctctatttaaccgaggctgactcattgcagttggcactaattttccattgccacagccctctccagccaggagggcctggagtacctgaggtgctgtttgccgggttcccttggtcctcagactgctcccttc

SEQ ID NO: 161250 - DNA, 1000 bp, Homo Sapiens
ggggcagggagggcctgcaggtggtgtgaagaagagcccagctgtcatctaaggcaaactgcccccactgaggacaagcgtaaggccctacctcccccaacctgtgcgcatctcaatcacagcagacactgtgacggccacaggggacccagatggtgcctaccaccttgcctccaggctccactcaccagacctcaggctgagggtctggcagtggaggtaggggcagggacccttggtgctttcagaccccacggcaggtaaaatcaggactgcctgagaacccgtcaccctctgcctctcaggtcaccccccagctccaggaacctgcctcctgctgtccattgccaggtcttccttgcaccctgacacctgtgctgaggcgctctggcagctggaggaggctgattgcactccacaaacaggactgtctggaccaagggaaactggcaggagggaggtgggaaaggaagagggcaaacgtttggcttttataaagtcaaggacgtttatttcctgaggtcatgacacaggaagtggaatcctagccacggctgcggagctctcgtgatgaaggccagagtgctgactgacatgccgggtggaccaggagctggagtctgttatcttagcacgaatgctcatgaccttggtttagtgttaaacagtggagcaggtcctgagcgggcacggccaggcctggaggagcggccgcacacacagccaggcgctaggctccctgcgggacctcgggaagggggaagagcgtcaacaatttacggagggtccagccgctgggtcagattgagacaaaccattgtgtggttgggtttgggtcagcaggctggagagggttctgttctttttgatcattatcgtttggggccccaagggagggtcttgggagccacctgagccccaaagctgggaaattcctcagagctgctcatgtcaggagccttctcactgctgctggcggtccagggtgcgtcccgcacca

SEQ ID NO: 161251 - DNA, 1000 bp, Homo Sapiens
ttttttttcaattgtcacaaagcaataatcatttattttttaaagtcgtttacaggtatttataggcaaatggatttccactttaagacagataaagaatgtgagattaaaatagcatgcagacattccttttattgtttccttttgctttaactgtgtctgtggtatttttaagtgctgtatttaactactatactattacagtcaaatactgattatccatgtgtactgctgacaccatttacagtcattgcatctatttgtatcaggaactcttgctaccaagttaatactctgctcagctagagtgagaccacagccctgctctgtctctgataaaagtggttagactacccatacatttctactgtctatactcatgctgatcccctttttaaggacaaacgatcaagacctaaggtatatggaaaactggtgaaaaatacattaattctagttgtgtaagaggaaacaaatccatctaaaaaattaatggcagtagaaataaaaatcataagcctttacagtaaaatattagagtgcagtatgcttggtttctaatgatttctatccaaaagaagttttatttaaaacttagcaaatatatcacaatcacaaagactaagttgtatctacatagccaaaatgaaatggagtcaaggcaatatccagataactcaagattaaaaaaaaaaacaaaaaacatttttcttggaaaggcaagaaaaggacataagtagttttctgctactcaaaccaaatccacttttatcatcattccctatattccaaagtttcagtattttagactgaatggtttggagtctaaactatgtgaatgttgatctcaggtgtgccattcattctgtgagtatggacacagactatagaagaaaagcttaattttttaccttaactatacagactggttatcaataacgacctctaacaaatgaaaaacttgctttttagagactcatactataagttaggactgaag

SEQ ID NO: 161252 - DNA, 1000 bp, Homo Sapiens
tttttttttgaggtgagggttagaatagaaagggagcaaaaatacttcacaagatcagtgttccaaacaacacctggggaaatgctggggtgaagtgttccaatatatatcactgctttattcaagaatatttaatcttctatcttttggcattgaaaaaaaagtctaatactaaaacaaccaactgggcaacgttaagtattatgatgtttattagttatgcttcactgcctttccttccataatcatattaatgtgcaagaagcttaacatgacctacaaatctgatttagggaaacactaaagatattgagtccaaagctcaaaatgatgacacatcattcactacagttatcctgtagtacatctcaatatcctccacagaaaatagtaaataccttacaaaagaacaggcggggaaaaaaaagcaataaagaaaccgtgcaagaaactcagtgaataagaagatcaaaattctacaattcaccattagataatatcctggttatctttaaaatataatcaattttgacttttaaaagtgtattaatttgttgctttgggccactcatgtctatttacaagaaagagagcacatttgtcataacataattgaacacaaaagacccacataagtttgagttttgcacctcaaagttattggtaaaaggaaaaaagttaatagagccatagttatagaaaaactactgattttattattatcaatgccaaacaaatctttaaatcaactataatttatttaagcataaagttactttcacatttgtccacaaccacagtaaatacagttcttggcataaagacacagacttcagaatttaaagcctccccacctgaaagattacatatataaaactcccactattgtttatataatagtggattaatcaaattgaaatagttataccgtctaaaataaaattgaaataatttactcataagattcatatttaaatcatctttatttacaaaatactat

SEQ ID NO: 161253 - DNA, 1000 bp, Homo Sapiens
ttcattcattcaacaaatatttattgagtgcctactatgtgccaggcaccatcatcaagcgttgggaatagatacagcagagaagacagacaaggtacctgctctcatggagcttacattctagtgtacactctagcttacatttcagtagtaagtaacatcatactatcaaaattaataaaagcaccagaatgaaaacagaccttattacctaaactgttaaaaagaaactacataacattcaaaactgtataatgacttttaacagataaaataactttttacatgctgttaaaacagatttttagctatcagttaactcaactttcatcgaatatgctacaaggtgggaaagaacataacccacattcacatgcaaacatcctttgatacttctagtcaagtcagtaattcccaagtgatccattaatttttagaaaaatgtacctttttcctggccagtttctactagtattcaaatcaaagtacgttgtaattcctccttaacacacattttatacatgttatggccaatagaggaaacctgtttgatgtttaacctccctcaaatcagagaaccatttagaatttcagactacatgaaatgctagctctaattgttaaataggttaacttcctgccaaaatgggaagtagttttccaacagtaaaagaaaaacaaaaaactctctaaacctgtaattttttttaagtatagctcaataagttaggaatttgggagttttgtttaaaagtcagaaataacttgatatttatatcactaatagaggtccaaaaggcattgcaaattccattagttctatcacttctaaatggttctctaaatgttaactatggcttatccggccattaaagggtgtctggccctaaaatataataggcatgtttcaaaaaaatgaaagaggaataataaatttatataaatgttcaatctcattccaaaaatgtcttacaaaaatgtttcagtaagtacttcctaa

SEQ ID NO: 161254 - DNA, 1000 bp, Homo Sapiens
tttttttttctccgcccactgagatttaatttttagatcacagcatcctcatatagaagttccattcaatatttttacttcttcttggcagttatcccaaacattaatatttaattatgaaaagagaaaagcattcaaaacataatacaaatatacaatacaagaaaagttgaaaacaaaaaacactgtattgcaatgtctccacatacgatgtttgtgatgcaaccaaacacacactacacagtcctggctgctcctaacactccccttactttacacagacctaggttcatctttttttttgtttttgttttttttttttttgatttttgccttttgatgcctacagtaactgagaatcaacaaagtaactagtctgacatgaaaaatgtggtgcctatgatttaagtcctgatttgagcacatcttaattggtgcactattgcttttgataatccagatataacaacagacaagcagtaataaatgaagagactatgtatcacacaagcaaggtttctgaattacaaataacttcaacaatgacatcaaaacctatgaattaaatcttaactcacgcggttataaagttaaattctcatgtgtcttagtgagaatgctatcatcaaatacattctaaattctttcattttttagtgtacaaaggttatgggagaaaggataaggtgctttttaaataagctaccactgactcacacacatccatacacgcatcagtgcaaactaggaaaaacactaattttaaaatgaaataatgattatctagactaaaaggagactttgagatagaataattttccatgactaatttgtttacaaatatagataactcaatgtacatatagtcaacgaaatattcaaagaataactttatatactcttgttctttaaattctatcctctctttcagaattcttccatttaagtttgggtattttcctagtttcaacagatgaacagaagacttcattgaacattt

SEQ ID NO: 161255 - DNA, 1000 bp, Homo Sapiens
cttagttataggctttgtttattaaaatcttttaaacattctaaacttcttgtgtaatttatcatatttaattttctattttagcacttcaaatcattgatatgacaagattataaccaattaagacaaaacattctcatatatttaagcatctcttgtaaatctaatacattaaacttatagtaaatctagtctaatacttttcatgagctaagttaaatattcttatacctttcaacttcaaatcacaaacgtaaaatcaatttcacatttcaaattggaatcataagctttttaaagattcaaatcacttaaggagcatacacaagattagtcctaaacttaacatgaaagtatcaatattatggatttgaattattgcattatttccataatgaattctacacattcccagagttggaaaatcatttacccaataagggaacagaggtgctatttactattgtcaaggactcatgcccacaatatggtggacaactcagatgagcagaggttgcttaggatctctggtcataagacagtactccagcgctgggagacagtgccctgagtgctgtggttactatgggaacaggaggctcccagttttcacccttcagagggttttgattttagaacctttattccagttacctcccaagtattatttttatttttaattattagagtagaaggaagttggcgactccacctaggttagctaacaacttcctttatgatctcattggcttttgcgtttacttggcactctgcaggcattgctaacatatttccatcctgctctaaagacatttaaatgctgttgaattcaatcctgaacatttggctctgagccatgactctcaggtcatgataataacataaaccaatcccctgcctcatgactttttaggaatttcccaaatgggattatagcctctcacatttcattagaactactgtatttagcttggcaggatcttagctttgggggctgttc

SEQ ID NO: 161256 - DNA, 1000 bp, Homo Sapiens
tttttttttttttttttttttttttttttctcattacttaaataatctttatttctcatgcactaggaaagatggttcgtatgaaacactgcagttcacagcaaaggcctcagtccagaacacaacataggggccagctgggatcacaatctggtcaaagctctgggagccacactgggaacaccactcccggggttgagtggcagatccaggactttgcagcaactgtggccccagacataacacaaggcagctgccctctcccacagaggcacaggaagctgacacccaaggagcacgtgggctggggacaggacggagaaggctgctgggcagtgacttggcggagatgtggtccagcacctctgccgcctgcgtctacccactcaggccaggaagcccaggcctgtgactgagctctaggcccagctctacccagtgcagagctgctggagttccacagaccctcagcagccccgtgcccacagcagaggtgtagaggtcccccgcctgcccctcggctacatgaacaagacaggggcctaaacttcggccctggccaaggcttagatttgcccaggaaggaccggaaaggctagaggggccagccccccacaaccatcccaagcccctgtggacactggagaagcccataggacagtcaggcttctgaggatcccaggacagggccaccagcaggggaggccctcaatacctgggccatcaggctcaatacctgagcccaaacaacaatgagcagattcccaggctttgctttcactgggtggcccagggacagtgacatggtaggagacatgcaagacagagacagagaagaatggagacatgcagagaccacacagcatgggcggggtctgaggacaaaacgtggtaaaagtgctgcgatgtggtgggcacttcatggaccaggctcattgaggccctgggctcatggtgatacccgcctcctctggaatggtctccagcatctcactctgga

SEQ ID NO: 161257 - DNA, 1000 bp, Homo Sapiens
caagtaattaaagcaaactcaaatcaataacattcttatttatttatttaattcccttgaaagtctcatatacaccactaagtagtcacattcacaaacttaatttttataaattcagcagcagtcttaggaatcctaggagaagaagaactccataaaaatgcaactgtaatagtcagtgagagaggtgaatttctgctccattcaatagtccaggtcttcatcaaggtatcttaaaggctgaactcactgggttataaattcccattttccttttcagtgtggctcagaatggcctcctgaggaattcattaggtccagatcatctgcattcaggcaagaattcatctcccggtattgaatttggtggactaagttctctcctcttgaggaaactgcaagccgctgtctctgtcttcgctttttagtcaagaagaataatgcgacgaaaatggccaacagaacaaccccaaggatcccgactgcaataaaggatgactgacgggatgagcgacctgttgtggctttttgtggggttttctgcactgaaatatctgtgcaattcactgcagcgtcttccttgtgcccacactcactatggccccagcgtctggcaggacaatcccacaaggaagactcattccctttgcacttcacttcattgagccatatcggtccagtcccctgaccaaactctgcttctttgaatgctttcaaagctggaccacagccaagttgttgacacaccacctgagcatcgtccaagtcccaagagtcatcacacactgtcccccaggaacctccatgccagatctccacacgtccagaacaggaagtgggtccttcctgaagtcttatcttgttgtcacatgtgatccaggtctcctccgaggggctggccagtctcttctcccatggagatgatgggcactgccacagcgtgtcaggtccttttggacactgaacattgtccacccacatgggaatggacatggccttg

SEQ ID NO: 161258 - DNA, 1000 bp, Homo Sapiens
ttttttttttttttttttttagttttttacaattttattccgtttcatcattctcaaaatatatcccccaaaagtaatctacaaaagagtgcaggctgctccccttaaaggaatggacaagtaatatacactacaaaacaatgtttaagatcatgtataaatgttactctgaatctcatttgttgtcatcaatttctttagtatctcagtgctttggggaatattcttaaccaaacccttcaagcttctggtagaaagtataggcttaaaagcttccactgtgattaggtctaatttcatcacatcagtataacacaagtacagaattgctgggattttccatacttgacagtagcttagaactgctgcaggaaggtcgtgtactatattcggttgttctagcaatggacaacacgccgagtctttgaaattctgtgtttttagggctctcaggaaaggagaaggaaggctgccggtggattctgaggttttataatcggtaacatgtcgacatgtgagaatagttatctgcatgttcttccttggacaagagccaaaaaccgagggattggattttagatgataaaacacacaaaaagcctctgtggaggacagatgtgtagtgtctgttgttctacaccattcattccagagtttagcacaaccaacttcctcccagactcctgaattcataacaaatgatgacagaaatgctactgcattatttcctatagcaattataaacttggagcacggatatttttctagcaaagaaacttccaaagatgtttttgtttgtcttcgaaggagccgcacttccctcttccgcgccagctgcagacgcacctccctgtcctcgggcgtctccctccgcccctcctcctcctcctcttcgtcctcagtcccagctcggcacggcgccttcaccacctctccgaagaacgtggccgccatagccgccccgtgaccggctggacacaactgcagcgccgcgggaccg

SEQ ID NO: 161259 - DNA, 1000 bp, Homo Sapiens
ttttttttttttttttggcagcagcattatttttttattctttctttctcactctaatcccatgacagattagtagcattattcacaatagccaaaaggtggaaacaatccaaatgtccatgggcagatgaatagataaacaaaatgtagtatatacataccatggaatattatttaccttaaaaagaaaagaaattctgacattgttgcaacatagattaaccttgaaaacattgtgctaagtgaaataagtcagatacaaaaaacaaatattgtataattacacttacatgaggtacttagaatagtcaaattcttagagacaaaattagaatagtggttaccaggggctggggaagggagtactggggagttagtgtttaatggatacagagtttctgtttggataacaaaatttctgtagatgaatagtggtggtggttacacagcaatgtgaatgtgtttaataccagtgaattgtacacttaaaaatggttaaaatagtaatttttatgttatatatatcttactacaataaaataagtgtttgctggaagaataactgggctcatgttcagggatttctcatcctaggtacctagcctaggctacttgtcctcagctttcagtttcttcatagcctcacaaaaataaccacagaatccactaattggtttcttattatatgccaggcactgtgctaagcattttgcatgcattatattacttaatatgcataacaacaacttgtagtagatattggcatccaacagcagatattggcatctccattttacagatgagaaaactgaggtacagagaggataactaacaaggtcaccagctgaagaccaagttctttatcactttcagtacttcacaagcttctctcaaatctgtttgtcccatgctctgaagatctagacaaaagatggcctcaaattagccaagacatatatatatatacatatatatacacatatatatatacacacacaca

SEQ ID NO: 161260 - DNA, 1000 bp, Homo Sapiens
gcaggtaatcttattttcctaagggtagtttcatgatgacagtgtcaaaaaattactgtggataaagaaaaaattgtctcaatgaaatagaatttttcactgaacacagaaaccatctcaatagttgctgctccctggtttccaggccacgcaacagacatcaaaccaggaagccaaactttcatggacctgtgttaagaaaaacacacatacatgggcatactactttttccagaaaaacggaattaggcagagaaggaagtgtgggtgtacaactgatccacaagctattgggaaatcaatagctaaaaaatgtcaacaccctggcttccttttatcaggaactccaggaggctgaaggaatgtgagtgcatgagataagcaagacagatcttaacggtcccctcacatccctttctgggcaatctccagaatgcctagttttgtggagacaccatgtactatctggctgcagagactttcttaggtcccgtgttagaccccatggggtctcagcatgtggtcatgtggtaatgcattcctttcaaaggctttgggttgaactcaagttggaaatacctggaaaagaccaagcttctcctttgggtgtctgcggatcctattaaaaatattcgtgatgttttaagttctccaatacaattttctccacgaaaacaagcatcagatacactacctctaagtatttattggaggggttccaacagcctcgtggacaggccttctcagcagctactgagtgccccctaggggtggggaggggccagtgcacatggaggcaaaccacagagcccttttgtggcctattattatgaagaactaaaatgtggccagtgaaccagtcagtgctcatcactacggggtactttgacaatggcacaatttcattttaccaaaagaaaccttcactggctctggggactgcaatatcttcattttaaaatattttgctgcgttttcttcaagggcggcttgtgacaac

SEQ ID NO: 161261 - DNA, 1000 bp, Homo Sapiens
ttttttcaatcgaagtgtgatacagtctagtgtttattttatgttatggcaggtacacttgaatttcaaaaatttaaaacatatataaaaagtggttagggactaacatttgtatcaacagttgataaatgtctaagattgtttattatacagcagggtacaatggtagtgctaatgccaacagggcaccatggaagttagtctaaaaattatcgctaggctttatacaagcaacaacatatgctgctgctcttagaattttgggaaatgatctgcttctaatactaagcagttctttaacatttttaaatgttatacagtgttacagtatttagtttggcaaatgtttcaaaataaagtagaaatgtattcataacatcacagaaatgcacatccaatgttgttttcaataagaaccataggtacagatcagaactcttccctatatgaaataatttacacacagatgaatactataatatcactatctaaaataatcactaaatacagttctttttcagaaataaacaagcaaagatttttttcattatcaaatatcaaaaacatgttgataatgtatgtttttcaaataaatgatactttaaaattataggaataatctcagtgaattcagtgaatgtgcaacctaaatcaaccaagtatactgtagtacaaccatattaagaaaccaatgatcagaaaatacaaccgtatgaaagaaatttataatccacaaaactttttcaggtcttaaggtaaaatagttccacagtctacaggtaaaaccaaggcaacaaaaatgcgtgcttatcttgattaagtaggtaattttatgcagaagatgtaacactttgtttgtagacagcatggtatgcatttctcagcaagacataaggaaaacaagattccaaaagatccattgtaaggaatggagattcttgtacaatcatatctagcagtaaataaacagattctctatttcttgttgtagttttatctg

SEQ ID NO: 161262 - DNA, 1000 bp, Homo Sapiens
ttttttttttttttttttttttttttttttttttttttttttttttttttttttttttttttttccaaggttcacggggtttattagggagtcgggagggagaaaacccaggagtccccaggccatccacattgctccccggcatgtgacgatccagcctggctttctctggtcctttctggacagaggctggccaagcaggcagcagcctcaaggggagtgggtaggagctgggggccttctggcagccctactcagaggatgatctggttggtgaagcttcggctcagctccttgtgtggcagaacaatcgagttcaggatgagcacctcggcagggatccggactcggcagcccaggatggtgatagcaggcagcagcttcccgtccttgaagaggctctcactgtccatgcgggctcggggatcgttggggttagggtcactgggggtaccctccacgcgggcccagcgtcccacggtgctcccccagcccacgatgctatgcagaacacacgtgtgctcctgcaaagtggctccatggaggacgatgctctcccggagccgcacaccctcacccacggtcacccccttcccgatggagacgttggggcccagcacagccgagggggccaccttggcggtcgggtggatgtacacattccctcggatccatgggccccctggggtgtgcttggccagccgttctgggtgagtgtcctggtatcggctcaggtagaggcgggaggcgtagagggctgaacctgcggacttgatctgactccagataccatcagtgagatgcacgtatatctggccctgccctgccagggctgaaaacacatcctgctctaggcggatggtacctgcccctggccacaagcctggtgagtcctccaattgcccatcctgctgattacgctggaagacatcccgaagaggcttcaaggcttcaggagaaaagaggtagatgccgcagttgatgatgtcactgataaatg

SEQ ID NO: 161263 - DNA, 566 bp, Homo Sapiens
gctggggccacgtgggcatcctctttattggtgcttccaaggtgctggtgcagagcccttggctgaagggcctggactgtgggggagggtggcagccccagagacagcaggggagaggaagcgttctggcataaaaaagagttcctgggtaaggctcctgtttccgagcattcgggcagcaaggggagtggcgcacacttctcagccgaagacactcttggtgggtccggctttgggcttctcaaagacagtctcggtacctgtgcgggtgcggctgaacaccgacggggcggccgagccagcttgctcacactctcgcatgacctggtaggtcttggacttgatttcctggttcttggtcaggtttcctcgggcccccttcaggtcctcctccttcacaggggggcgcttcttcttgataggggcttcctgagcaccagcctgggacatggtgggtattgtgtaagcgctgggtctctgaaggcgcctctctggcacggcagcagctgctggaaaagatctgagtggagcccagccttctgaaacttatatagcctgcttgcttg

SEQ ID NO: 161264 - DNA, 1000 bp, Homo Sapiens
ttttttttttttttttttacatctaagaatctttaaaaattctatttgagacccagcacacaagaatacgatagatgtcctcaaatgggggcttggctcacaggtggaaggacactaaattggtcccatctgatttcttgaggcaagggttgaacctggcttgcacaaatcacacctgtccaaagcaaccacgagttctactattttgcagcccttgctgctgggcgacgacgacgacctctctgcctcttctttccaccactacatcgcctcctggggcagcttctccctactccaccctgtgtacctttcccagaatacagaacctcaggccaaagagagatgccagccccattaatcacctctactgtaccccaatcatattacggaaagtcagacccaggagacaggactcaacagccacgctcatagggcagattccgtttgctgcctccagcccctcattcccgccttaattgtagggctctgcattatagccgcataattcatgcctccctaattatggctgtcaacagccccattgtaaagctgtaaaatgtacagcacctgctctccaggaaccctgtgccagggattggtagaggggagtgccaggtgtggatgggggctttgccaaagggttcactgattggcttctcaatcgccgtgtctggcatttatgcttgattctgggagcatggacaatagccaagaagtctcttgccgccaggtatcccgggacagaaaggggaagaggcgggtggggtataggaaagttaggggtttcctgtgtgctcttgctacaacttgcaagatttcacctctcccctagagggagctgctagggaaacagcttgcagaaagtaaaatgggaagtctggcatggtggctcatgcctgtaatcccagcactttgggagggtgaggccggcggatcacctgaggtcaggagttcgagaccagccaggacagggtgagatgctgtctccaaaaaaaaaaaa

SEQ ID NO: 161265 - DNA, 1000 bp, Homo Sapiens
tttttttttttttttttttttttttttttttttttttttttttttttttttttttttttttttttttttttttttttttttttttttttttgcgtgtcgatctgggggacagtttaataaactgccacacaacacagctgagctccacacagccacatgaggatggggacagccattccttgggtttctgaataacgtatcaagtgagcagtgaatttcaatcaagcttgtacatcaggaccgtcttgccaaaacaacagttgcttttggctgctggaagctgtagcttttcaaaacgttcacacatttcaatgtatcgtcgatgtttttaaatagacttacagggagggtggcacacagcaaaggcccgcaggccctcgtagcaccgcagtccaggtaggatgctgggcggcggggggtggtggagggggttctatttacagtgtctgggctttgactccactaactgttggttttgttttctttcttaaaccttttccttcaagtctggaagcctgtggagggcctgtcaccttaaaggcaaggattccttgtttgcaccaggcagacaaatgtcaaaccacgaccccaggggctgcactaggcgtcgggcccagaagcccccggccatccagccccgactctttcatgcctctgcccctgatgaggggacccagggtaccctcaaggggacacagaagggaggctgcatcctagtccagtgtcaaagtgaggggggcgctgcaggagcctggacaggaccacctagcccagccagggacaggagggtgagaccacctggaacaaaggcacagaggctggagagaaggcggcatgttcccagactgcatgggctcggggtagggggatgcgaggtcagaactggcatagtggccaggatctcgggctctactccatgggcaggggggaagcccctggggctgcatggggccatgggggaggcgggcgcaggagacaccggctgctgtgccaaaggccc

SEQ ID NO: 161266 - DNA, 1000 bp, Homo Sapiens
tttgacttcaaatgagattttgtttgcaatttttaattaagcaatctgggcaaacttttttttttttttttctcttcaacattaggaggaaagaaaaagaccacacttgggggcctggtgggaaaacagaaaatgctttttctcatttcaaccagatttcaaagcagcagagtgcagagagacagtagccaggccctccctcagtattcctcaggattgcttgagtgtaagtctcgcagatacgaatcaattatgtttggaggtacgccttgcaagaggagtctgcagaaggagagcccaccttagatgatattatacattcaaaaatccttattgtgcaatgactttcacctccagtttgcattcaatctccactgtcccaaggtcattgactgctttgcagcagtaagtgcctccatcataggggctgggcttgcgaatttccagggtacagactccctggttgctgaacatcctgtatcttggatcatccacaatagcaactttgtttttcatccaggttattttaggcttaggatttcctctcacactgcagtttagggtggcattgtaaccagctatggcataggtgttaaccaaaggctgagtaaacatgggtgcctctgagaaatcaaagtcttcatacactggatttttgtagattttaccatccctggcgatcactgcactctctttagtcatggtggcatcctcactgaggccacacatgttttcagaaaagacccggaagtaatattcattccctatgaccaattcagtaatggtggcactggttcgatgataatgctcaatgacagtaaaccattccatgctcttcttgtcagccttctgaatggtatagcctgtgatagcagcatttccatcatcctttggtggagtccatgtgagagcgacattttctccccagacatcctcaatcttcacaatttggggtggacctggacggtcaatgatctggatgtcaattgatgcggtctcc

SEQ ID NO: 161267 - DNA, 1000 bp, Homo Sapiens
tttttttttttttttgccaagatccaaagaaaaaattttatttacaatagagaattttatttgaaacatgcatttcttgtttttttaaaaacaaatcagcaaatgcagatcaagtttacactccttaaggcaagagtccctatgcacgctgtacatgttcatattaaatccaaaagctgctcaccctgggaacttgtgtacaaagggcaaggccaaggtcagcaatgtgtcttttattagagaatcagacaatctccctgatacaggaactctgaggtcaacttgctatgaattatactaggaaaatgcaaaccaatagcaagaaattctgatagtctccttagtactgcatacaatcaaatcaattttatttagaaaggaaatacagtagtgcatacgaaaaagtgaaaacagaacctgtccatggaactggaggaacagcagtgtgccgacggtcatattgcacgcaacagttaagtccaaaacattcggttcagagttagcttttccccattttggcaatcagttcgtcacaaatcttggtgagttcttctatttctttattcttctgctccagcgtcctttccagggcgtccactcgcagctgctccttccgcaggctggcctggtgggcggcttgctcctgctgggccttgcctcgaacctgagcaatctcagcattggccctgtccagtttctcctccgcgtgcaccttcagggcctggtacctctgctcctccttcttcacccgggacaggtactcctgcgcacatctcttcaacacctcttcattcttgcggaagccttctaggacctccttcatcttctcatatcttctgaagaggtcggccagagacttctccacggagttcaggtcggccagggcttgctccttctccagaaccagctgctgcaccgtctggtgggagactgacttctctctctgttcgtcctctatcatctgagcgatggtcttctcatactcggccactattttcct

SEQ ID NO: 161268 - DNA, 1000 bp, Homo Sapiens; identical to SEQ ID NO: 161267

SEQ ID NO: 161269 - DNA, 1000 bp, Homo Sapiens
ttttttttttttttttttttttttttttaagctttaaaaaagtgtgatttattgtacagacctttatacaaagcacactcaaggaaaaatggtacagaggcaggtcttatgaaggtggtgaacccaaccagctctgaagagctcacaggcacatagttcaccaccattaacctgacccagacaccaacttactcactggtctcagttcaatttttttttgagagacagagagaaaatatgattggttctccttgagtgaagtacatctgtttggcctaattagttgaggccaaggtgatgaggacatttgagcaaacatggccacttaggtgcaggtcttaggtatggctgatggaaggaagcagtttctctcaaaagatgtatgggcagatgcaatgactgacaactctattttaatgtaatataaaaaatagcatttgacaccaaaatagttctaagaaaatgcaattattatgaaacaaacatgagtggatacaagtaatgcaaaatgacggaactctgacctctgtgctgtcacagtgatttaattgccttgcatggtattatctaagactgacataaatctttcaaattattcttccttaaatatagacattcatataaattctttctatgtttattgtgctatcaagtaattatatatttcatccaatttgatctgttaggattccacggctttgccttcaaagtcatttaggaactcaagactctgtggcttttcaaaggtggtttgaggaatctgatttggaaactctgctgcatctgacatagctagatttttttcttcatcagggaccagatctttatgtcctgaaatcaaaattaaataaaacatgctggatttagaatataaccaacaacctgactaggtcatgagatgttctgagtcaatgtttttcaaacttcagtgactatgacccacaataaaagacacattttacattatagtccaatgtgcacatttgtgtacatattaatg

SEQ ID NO: 161270 - DNA, 1000 bp, Homo Sapiens
tttttttttttttttttttttttttttttttttttggttttccacaggagtctttattacagtgtaaatccaagctcaggcctcccctgggccccatgcaaagccccggcgttggggctagtagcatccaggagacaccaacgcctcacggcgcctccagcggcgggtccggaagtgcagggtggtgccctgtctaggcaactacaagtcccagcaggccccgcggccaaggtgcctcgtctttcctggactcctggagcagagcctcttgggaaatgtagtcctggtcgctcaggtaattagcgcagagtccctagtgggagtgatcctgacacccaccgggaaaaggctcgggccgaggaggggggtgggtgggaacggacaagagatggagggggccagagggctgcgggggctgggggcaggcgtcctgcgggcagagacaccgttctcattcggctttggctttggatccggagactgcggctgctgcagaggccagggctccggtccctgggattttagctcggatcttagctttgatgtggctcaactgattggtcaccaaccccacatattggtcgatctgagcctggtgctgccggtacagcagggggatggtgaatagaccaatcactcccagaatgagaagagtcaaaccattgaagatggcacccacgaaggtcaagatgtagaagaggagggccagcttgagggaatccacgaggtcttctaccaggaagaagtgccgcagctgcgtggccgccgagaccacgcgggaggtgatctggtgggacaaacgttccgtctgctcccgagtcagggtgaggtccacatccaggtaggcctggaaagggttggctccatccccccggtgcacggcctgcagcactttgcggtaaaccctgagagagatggtgccgcagagcagcaacagagccaagtgcgcggccacggacacgatgctaaagtgcaggaggcagaggagggagaccatcag

SEQ ID NO: 161271 - DNA, 1000 bp, Homo Sapiens
tttttttttttttttttaacagatgataaatggagtttttctttattatatcatatttctaaatcaaggaagctgaaattatatacttaaatatactctggtcaaaatatacatgaaccacaaatattaacttctacctaccaacaatttacagttatgttgtatgtggaatttcattcttgtcagaactcacaatggaaataaaatttctattatgggtgagaagatgagggaaagaattaaggggaaaaaatttggacagcacacacttttctttcattccaaaggtgccagtcagaacacagatccatggagttccacatctagccccaggctaccaagcattaattcaatgtaaatggtgtcactacaacatcaaaaagagcagtgctaggcagaggattttgtataaaatcatctaaaactctgaaaaactacaaaagcatctcaagaaaaaaattaggtaaaagcaatggagtttatttcagtgaaattattttaaattagatatgatatattaagctcccatatgccccaacctggtagaaaagttcctctcagtgagaaatcatttattttaatggcaaaatttttacatatcagtaaaatctgttatacttaaaactatgtatacagtacatttctggcaaaaaaccttatacatctttcagttgtcaagacaaagtaaaaatatggttgcataaagtcacaaaaaatataaactgctgaaaagataataaaaaaagattaaaaatcatttgcattgcctcccttacctcttcaatattagtaacaatttgcaaacaacaaaaaaattgtgaaaattctgttgcaaccttgacacacttaaccaaaggttgtcatttcaaatatcctagcttaaaaaagaatttactgcaattgtctgtgcatttatcatactatttatagaagtgcaatatttaaatattttcaaaataaaacacagtaactaaaatgaatcacaataacttataagaga

SEQ ID NO: 161272 - DNA, 1000 bp, Homo Sapiens; identical to SEQ ID NO: 159348

SEQ ID NO: 161273 - DNA, 980 bp, Homo Sapiens
ttttttttttttttttttgctttttaaattgctttattagctttaaatttttccatgcaaatgggtgaaactactgctgacagaaacttacactgagtgcaaaggcaatcttcaaatagaagctggcaacacaagacccacttgacacatggaaataacatagggttcacagcaaacggatcagtaaaggcatattaggaaaatgcaaggaaaaagaaaacagcgggaatcacagtattaatctcatgataaatggcaggagtcaaggcataaggcaaaattcatcatgatggtcatggtgattagagagctcccccataaggatacgcagacaattcctcaactgcagctccctaagttttcttctgatttctctcatctcctccatgaatatttccatatcatctccatctccacccatcccatcattgatctgcctattgggtatggcccatcgaaaattaggggcaagtcggcgagcctgtccccgtcgatttcctgcaggctggtggccttcacctcctcccaaagggcggtcttcctctccattctgcataggctgctccatctcttcgttttcctggtgaatatttgccatgatgagattttttttttctggttgtttttctgggcctatccttgcagtctccttctcctccggattctcgccgcgaggtgcgccgcggagacacttagcctcgcagacctgctccgcttttccccgggccgaatgccagcccgccgagctcagggcagcggggagctggtagccagacgcgagtgacgactgcaccgaaggctgcgtcgctctgcagctctgggtcacgtgagggccgcgcgtcaccaccgagctcgccccccaacttgggcggccagtgcagcaggatctcccccttccccccacccgccaccgccatatgcacgcgcaaaaaacagcctccctactcccgtctgcatgaggtgccccagagcgcacagcc

SEQ ID NO: 161274 - DNA, 654 bp, Homo Sapiens
ttaaccacaggggaagttgtccacacatacccacagaccatgtacatgccatacttcaggcatgtacatgccatcccagtgtctgggatggggctgcccacctttggggccaaacaggtagccgtagcaggggacgtggcagtaggggactccatcatgctcagcatgactcccagcagtcagggtcttgtggcaacgctggcacctcagacgcggtcggtgccaatttctgcttaatgacatcactttctcagcaaaatagacgggctccccacagccagggcacagcgaggtctccccagtgaatgtcttcatatggggagggcttttcttgccttgggggaggccagtccttggcctgggagggctgaagctgctggggctgagaggagtggtgcagccagggctgggagtggggggattgtacaagtaggagcctacaccaccaatgttcacccccctgggtccaaagagagccccatagcatggcttgtggcagtatggcctcccattgtgctctgcatgcccgccaggggacaggatgctgtggcagcgctcacatttcaggcagaagcggtgccagttcttgcccagggagctcaccttctcagcgaagaaaacaggttgctggcaacgcggacaggtccagctcat

SEQ ID NO: 161275 - DNA, 1000 bp, Homo Sapiens
ggtcacattcaaatatttattaagcaaaccatctttagattagtttacatgatatttgtgcattggaaaccaactattcatttgtgacataattaaaagttccttattaatgaattcttccacttggactatgttttatttaccggtgtgttcatggatgccagcatgatttttacatcagtatatggtaccataacattaatatttgggttccatttagtggaaattacagtagattataaacacatttcttagagtgtataaaaacaactgtactcttaccaaacagttgatattaagaataacaaaacatggtagttcgtaagctgagaatgtggcatgtacaattggtaaaatgtgagtcaggagatttaaatttaaagaggttcatcaagaactgctcattgtttataagggagaaggggtgagccaaggagcatagtccctgtgcatagcatattattcctgtacatgatttcttccagattgtggaacatcagtgggtctcaacattagaacacctggaagctttaaaaagtactgatgcctcagccacacaccccagatcaaccgaatcagaatctctagaggcgagtctgcatggtttgtataatagaggcttggcacgcaataccacttaaagtagcaaagcaacatcttagagttcttctctgaaataaatacaagtaaacttagacatgtagcaggggacagagttctgggcagaagccatacaggcttctgtctgccctaagctatggagtcaaaatgtaaatgattcagctaactgagttcatgtctaattagatgattaaatggataatgatccaagataaaatcccctgcagttctgtatttttttgtgcgttgttaaaattttatactgtgcttggaaaaatacacagtgataaagatacctggttaatttttcaaaaatcaggataaactcaatcttctgaacctagcaaagcatatttgtagactattctttgtgactagc

SEQ ID NO: 161276 - DNA, 1000 bp, Homo Sapiens; identical to SEQ ID NO: 157783

SEQ ID NO: 161277 - DNA, 1000 bp, Homo Sapiens
tttttttttttttttttttttatttagaaatgtaaacatttatttaaaagtaggtagcaagttaaaaatgaatacttgcctgaaatcataaaacataatcaagttctttttaaaacagttaatttttttcctataatttactttcatcgaaagtatattatctttgtttaacatgctagatagaagcaatttagcaacataaaatatattagctatagtatgttcaaaagaatgagaaatataaattcagagatgagaccatcattttttgcagttaaaaaaaaaatgctgattctggtgcaacatacactgattatccaggttttacattttagggctgaaaccctgaggaacctgctggtgactgtttagcactgagcagagttcagtgtgcatgcgcttccagagttaaaagctaaagcagactgagaaacaaaaaaccaacatctttgcatttctgagtttttacttgtaatcataggttttcccaaattattagaatgtctataccttagctgttttactagaagaatgatttatgctagtatagtcacttgtttagaagtcggaaaaagatcattttttctttttagaaattactaagctctgttggtactacagctgatccttcttcagttccggaggcttcttctggtgtctgtagctcttgacagtggtacttcactttaagaggtttgccagggtaccagaccaagtgaatgcgacagggaattatttcctgtgttgataattcatgaagtagaacagtataatcaaaatcaattgtatcatcattagttttccactgcctcacactagtgagctgtgccaagtagtagtgtgacacctgtgttgtcatttcccacatcacgtaagagcttccaaggaaagccaaatcccagatgagtctcagagagggatcaatatgtccatgattatcaggtatgctgactatttccaaggggtttttcagttgcttcatttgcttgtaaagcaggta

SEQ ID NO: 161278 - DNA, 1000 bp, Homo Sapiens
gcttagaaaccaaggctttctttgtgtccaagtcaaaccgcccgtctgtctctccctccccaaaggggccaaaggtccctgcctagagcacaacgtggggctgcaacggcttctgctgccacaatcatccatcctcggccaactcgatcttgggagagggcttcctgcccgccccatcctgtgctttggcgtaggccatcactgaagactttctatttctccattagttcattcatcttggtagctagactcatgacggagctgctgccaccccagcagatctgctcgccttgctgcttcttcacggtctccacggccttcgcagaggtgtcagcaactgccatgaccacttgcagcagcatccctgatcgaggggtctcacaggaccagccagtcagaggttggaaggctcggagcctctcgcttagaaaaccaaaatgaacatcacggaatccttgagccaagggcagagttgcgcacgtgggaactgtagtcatcgtaactaaagccggctttttaggttggcctctggggatttggctgtaggaagtcagattctggtgcgtggcctggatgatggggccgcacgggtggaggtcagggcctgggcgctggcagcactcgcccagctcgtcgtcgtagacttggagaaaagccaagattagctggtggaagtcggaagtgaccagacgcagcttctggtctagggtgctgatgtcggctgcgcccgcagcagccccttgctcatgctgtgcaaagtactccgttctaagcgcgtgcaacttggcagcactctcctgcagctgcctggcaagctccgccagcttctcctcctcctcggacttggcagaggcactggcccactgccagtcatcactctgcttgttgaggaggggctgcatgtccaggggccacgggtcgcactctggattcaggagcatctgcaggtgggggctagagaagagctcccccagcaaggcctcgttcttctccctggtgt

SEQ ID NO: 161279 - DNA, 1000 bp, Homo Sapiens
tttttttttttttttttttttttttttttaagggttgacttagtttattgattacctgggacctaactcatcctcacatcgccaggtgaattccccaaaactctcatagtgctggttatagtggtagaggacccggtgtaaggtgggggaacccagatccaggagggtgttgtaggcggtctgctgctccttcccactagtgtagccattgaagagattgtagatcttgtctgctatttcttgagccttgacatcatccaccacggggcatggggtcttcacgatcacgtcgcttggcctggagcgccgtcctgtgttgtccactccccacagcgtgaacatgtaaatggtgtcaggttccaggcatcgtatgatcagagagatggtggtgagctgcttgtccggcacctgagatggcattgcacaaggagactttgctccagagatgatgtcgtccacaaagctcagcactgtttctgtctccactttggagtggtccatcctgtcagtgactttctcttgacggaggaggtaatctacaatctgcaccccgattggtggctctgagtgttcccactccaggaccacaagagtgctgctgggctcgtgaaccgtggagagtctcagcacaggctgtgggagaggcgcacaggtggggagtccatcagctccaaaagcagtggagtcacatcgacaccagtcctcgatgacatctccagtccctgagcaccagagagagctcatggtagcctcctgcaagagcctctgggtctggttgttggtcactagttcatagatgggggctgctttggtcacctccagcagaaccggctcagcaggggtgtcagggctggatgtcacatgacacagggggcaggacgaggggcatcgtcccttgctgtggcactccatgcggactccagccgccatgtgcttggtgccggagtctgacaagctggtgatgtattctgggaatgtcagcaccttggggtctctttcc

SEQ ID NO: 161280 - DNA, 1000 bp, Homo Sapiens
tttttttttttttttttttttttttttggcctttcaaagctttattcatagttcggaggccccgtgtgccccacttcccagacacccaggtctcggcgcccacacaggccccactgagtggtcctgtgtgtccacccgggaagcaccaggttgcccaccctccgaggctgggcagatggctggccagggcctcgaagaaggttccagaggtggccctcatgtgggtccagctggccgaggtcacgaggagggacgcaggccccagccctgtgagggtctgggtggctcagtcgtgtggggctgcactcaggagcccccactgcagcgcaaggagggcccgcgcctgtggctgccgcggctcgcccgcctgttcgaagcgcgcccgctccttgcatagcgcctccaggacgtcggcggggaccgccttgcccgtgaacttgcgcaccggctcctctctgcagggaggggtgcagtgaggcgcagggcccgctgcccacgcgggagcatggcgccgaggggtgggcgggcaggcaggcacttaatgagcagcctcccccaagccagagatgctcactcagcccaacacgcagtccccagatgccttcctaagggtccacgtaacggtggaggccccgggacaacagccatactcacgccacccgcaggaaggggttgtagaggcgctcctcgcccagagtcgacggcacagtgggcacgtcatcctcatccctcttctggagtgaccacaggccccggtcaccattaggccttgtctgagagccccccccaccccgaagcctgttccctccccccccaccctcttgccgcggcgggaaaggggccgtgccttagcccaggacagcttggctctcacgtggtcgttgcagggctccactttctgggcaaactccaggttgctaagcgtgtgctcgtggccgcagaacaccttcgtctcggggggcagggtacccagctcggccaggctctggtacatctgctg

SEQ ID NO: 161281 - DNA, 1000 bp, Homo Sapiens
tttttttttttttttttttttggagtgcggaatgtttattgagcaaagggtcgggggcgtgggcggaaggggggtagatacagaaatgaaccagaccgtgcccgtgctctttatcatctcttccccgcagacaaccaccggttcaccgctccagagagcagaaaaccaaggtttagagaggtcatgtcacttgcacaggctcacacagcacagctggactggaacccagttccgactggttcccaggcccagggaggggcaacgactttggtctacatcacacagctagaaagggggtaaggaaggaatgatgctcctccctttggaaggtggggaaactgaggcccagggtaaggcagtaacctcagcagagccagggggtgtgtgtgggagtgagtgacgctgtgtgggtcagacttggtggccctgagacgggcagggcagcacaggccgggtctcgagcttagtggaggcgcacgtgctgcgccagctccgcggcgtcctggaagcggcgtgggcagagcgggcaggtgtgcggcggcccggcgcgggcgcggtgcgtggcgcgatgccgcgacaggtggctggagcgcttgaaggccttgccgcaggcgccgcacgtgaagggcttgaggtccgagtgcgacacgcggtggctctgcagccgcagagggctggcaaagacacgggcgcactccgggcagctgtagcccttgcgagggccgggctctcctgggggcgcctcgcgctggggcgggccccggggctcctcctccagctgcaccgtgtatgtgtaggggaccccattggcgtcgatgaggaggtggcggcccagccgcgggggtcggggccccgccgccgaggaaggagtggaggaggggccttccgccttggggaaagggggagccttggggggcggtgggtccatggcctccggagaggaggaccgagggtggggtggccgcggcggcagcagcagcatctggagcggcagcccgtg

SEQ ID NO: 161282 - DNA, 1000 bp, Homo Sapiens
ttttttttttttttttttgagcagagcgcacaaacatttatttacaaaagtcccagttacatatgatacaggctttttacacacagtagttgaaacggaattattttatctatttttactaccagaaggtaaagaaaaagtttaatgaactaatcgtttcttgtttttatacaaagtgacagatcatgcacatttttttcagtttttaaatattttgctaagtgcaaatactagattcctctctccagttttaaggcaagtaagagggggctgtggctggggagcctcacgccctgcggcaagccctgcagggcagagagagggagccagctgcctcagggttgcctgttgtctgacctgctctctgggcactggcacggccccttgctggctggtctgaagacccccagtgcttctctccccaatgctgtcactggtccaggcaggagcccgaggttcaggccctgcctctggacagaggggcctggagaaccagggtgggtgctcacggcagccctgtggtcccccgtgcctggctcggggaggatcctcaggaatcagggaccctccaaggaaagaggccgccgctccttccccaccagcccagtgtggccagaacagctggaactcctctcaaatgacccacccctggggtttggccttaggagaaacatcactctgggctccccctcccctgccagggttgaggccagcacctgtctagggctgtttctgcagctgctgcctgctccctttgtcctgcctggggctcttgctggagccacgtgcctagggtacagggcagagggagctgaggctcccagggcctgaggtcacctcttcagctgtgatgtctacagccgccctctgctcccagagatcctccctggggaagcacagggagcatatttaaggtaccgaagacaatcctgttgctgccgcatggagcctgcctttccaaggcactgtcgttcaggctagtagcaaagttcaggcagtc

SEQ ID NO: 161283 - DNA, 451 bp, Homo Sapiens
tttttttttttttttaaattctatggtaacaaaatcagttcaggggctttttttctgaacaaatgatcatgatccctcagtctttcccgtggcatgctcctaaaacaaccctctatgtctaatcagtcacctaagatattgagtggcaagtctttcacagttgctgcttataattcctaaatggtccatattgagtattttcatttctgggtaagggaaaaagcattttggtccattaattcacccactcgctcctggaggacattaaccaattctgctattacaaagacgtgagtgtcatcaatgtcttgaatgatgaacttcttccccagggcattggactcatccaagtacagcagaaactgcttcatggcaggatcacattctataagcactcctttcaagacgttgaccatgttttctcagaaggttcagatgacctgaagaatgc

SEQ ID NO: 161284 - DNA, 376 bp, Homo Sapiens
tcatatatggtcaatttttgagaaaggtaccaagaccattaaatggggaaaagacaaatcttttcaacacatgctgcttggaacagtgtatatccacttgttttcttctcacaagaaactgatgggcatgaagattgcagtgactgaactgtctccctgcgtttcttctcacataagcaggtctatgcttcagtttcttcatctgtaaaatggaggttgtaaaaatatcatctaccccatagggttatggtgatgattaaattagttcttctatagaaagtgcctgcagcagtggttagcatgtggtaggcactttgtatgtgttatctgttatgtctgtttgctcttactaacatctatatttctgagtcctaga

SEQ ID NO: 161285 - DNA, 1000 bp, Homo Sapiens
tttttttttttttttttttttttttttttttttttttttttttttttggaagagccaatgtttttatttaataaagtcctgattaacagcatattataacataaaatgttggctttctaaaacgggcttgaacttttacacaatcttttgaacactggcaatacaggaacttaagttattcagggagtctttttgaaaaacctgattgacctttacctacgaccaaaagatggatgaaaattaataggtggattcataaaacaactggtagaaaaagagtggcctggtgtccccacggttgttaataccagctacgctgcatcaaggtcccactgtgggagctttctgtgtgttaccatctagcctcgcaatgcctcgaaaggtgggcaccattaccgccctttacagatggaaggctgatttttaatgcatggaaaatagcaaaattatcatgccaacatgaggaatatatactataattcataaatgcctaattatcaaaataatgacatagtcatggttagatgcaacctagaaatcttatataagatgcaactacatattgtatgatcattcctcttatatatgacattcaatcctcatcaaattcagctatgtataaatggcattatgaaataaacacttaatatcacaatagggtcatagtctgctactgtacaaccatggcatgcaagtaactatgcattagctgtaaacagtaaagtgtcataaccttccagaaatccaaagaatgtgaaaagtacatatatagtactaaacatcaattgtatttaaaggaccttcatatttaacaaagctatatcatatacagcagctttggagatttctgtcactgttatacatatcttgtcaccctgaagtgaggaaactgcaattccaaactatatctgttaatgctactgagctttagtgaactgtggtcagtattaggatgtaaatgattctgtgttctaatgtgaagtatgttttatttttcctt

SEQ ID NO: 161286 - DNA, 1000 bp, Homo Sapiens
gtcaattacggcaccttgtgtttattggaaatattccacctacagaacattaagatgccagcaaccggcccggcgcggtggctcacacctataatcccagcactttgggaggccgaggtgggtggatcacgaggtcaggagatcgagaccatcctggctaacacggtcaaaccccatctctactaaaaatacaaagaattagccaggcgtggtagtgggtgcctgtagtcccagctactagggaggctgaggctggcctggaggttgcagtgagccaaggtcacgccacttcactccagcctgggcaacaagagtgaaactccgtctaaaacaaacaaaaaaaaagacttcacccaactaactgtgcttgtgtagaaagaggttgcatccctgttccagtcatggccatgaggaacagctatgagaagggccctaaggcacagcatggtttgcagtaagaagggcagagccagggagagagaagtaaacatcatcttctgggctttggtttcaaaaatcacaaggtgtgggcctgagcctgctgcctgcccaggtctgggcgcctccactcagccactgtcctcccagtgcctctaaatctggaaggctgcatctgaacctgcccttccagacaacacccctcccctgggaaaccaatggggatgagtagtggccctccactggggactgtgggtttcgaggtgggggcagaggatgagttggcagcagtggcatatcatagctctcttcatgtcagcagggagagggaggtgccactgcctcccctgagatgagaaagcaggcgagaatcaccaggggaagaaccctggggcagctggcttgtcccagccatgcctgagtgcaccaaatatggaggctgcgtcctcactcggagagccaggcagcctgagcaccaagatccgtcagaagcagcaggcagctggggtgaggggtggtgcctctgactcatgaaatcccggattagtcagcaaccatcaca

SEQ ID NO: 161287 - DNA, 1000 bp, Homo Sapiens
ggaaataaacaagctttattttcagtttcaacaggtaaggcgatacctgcttcatcgtgtgcttttatgtaaatgccaaatagcaaaataacagctagaaaataaacagtttgtcagtttggagatcaagtactttatctatcttgagtgttatctatcttggaatttagccaggcctaaaagtagcggaagtgtcaggaaatgctatagagagccaatctccagctgcaggttggtgggcctggcactgaccagatgcgggtagctcaaagcaccgagcgatgcaggcgccgtttctgcattgcctgcagcctcttctgcctctcggcaaagttgttcttcggggtctgcttcagtgcgggcaggatggcacgctccgccacaggtgggctcagaagcaggcatttcttggagaggctcttggtggagaccttggggaaatgcgtggcttcttggtccctgggaaagctagcttcctccgggactgcctggggcctctggctcccttccaggagggacttgaggtgctgcagctcttgggtctgcaggaggttggtattccacagctcgcggatgagcacttcgcactgcctaagtgtggtgggctttcgcaggggaaggggcaggatcattggggggtgtgccgccgcccccatctgcctgccctggtgctggctgttccccatacaggcagctcctgcgttagaggcctctgctttctcctttctggcctgcccttgtaccccaggaaccttgtccagcttgctgttgtgaagtaggggctcctcttccaggtccgccttctgggggacgtcagcttttgaatcttgcttgttgaaggagccgggctggggcctggccttgcctgaattagagatggacttgacagactggaagcttgacgtggagaggctgtctgcaggagagcgcacagtgtcggcgctaccgcccgcaagacgcccatgcttgcctcctggcctgtgtgtccgtgaggagccct

SEQ ID NO: 161288 - DNA, 1000 bp, Homo Sapiens
gaggcagagtctcgctctgtcccccaggctggagtgcagcggcccgatcttggctggctgcatgctccacctcccaggttcatgccattttcctgcttcagcctcacaagtagctgggacgacacacgcccgccaccacacccagctaattttttgcatttttagtagagaatggtctgtgttagccaggatggtctcgatctcctgaccttgtgatccgcctgccttggcctcccaaagtgctgggattacaggcgtgagccaccgcacctggcctattcagggaaggtttcaagcagaaagatgaactgagttggctttggagagattcacaggactcccacaggcagagtgaaataagggcattgtagatggacaaaggcacagatgagcagcaatggggacagtgtgactgggggacgctgaggggctgctgtggctggaatggagggctgccaccataatggaaatggccaatgaggcaaataaggttggattaggagcatagcatcaagggtgccagcttattaaatccctcttccagtatgctagcactggcctgctgggaaaagtaatacatcacataatcaaacaaaaggcaaaaagaggcgagctccaggaataggcactgtaaacaggactcgccccagggtagccagatgcaggctttagatttgttgatgcaggttgagcatctctaatccgagggggaatgtgaatttgaaaacgtggccaaaatttttttttaaaaatggctaccctgtagttctttaactggacctatttagacaacaccttacacactggagaaggatgatactatgtgaatctagtaagtctacaagacaatacttctctcttttggctgtcttcttcctctccagggtgatgacaactccgtgagggtggagattatatgtctctcatcatttaagcaacaaggaaataaattagtggcagagtaaggggtgactcagtgagtacatccaattgttgacat

SEQ ID NO: 161289 - DNA, 1000 bp, Homo Sapiens
taataggctacttcaactaaattttaatgttagcataaagaaaaagttccttgatatctttatcaagtacacatcgaaacaacctaaaatcatttatcaggtactagaaaatgtttccaatgtatgatacagactagaaagcatgcagtcctcaatgtaaactaaacacaataaatttcagagaaaaacaattttaaaatggcttaaaaatatatctaatgaaatgtggggtcaaagaagaacattttgaacacataccgtagttgcaaaacaatgatgttacctcgtaagattataccaaagctttcatgagaagcagttttttatattactttaattttattttagagatggagtctcgctcttgcccagccagagtgcagttgcaggatctcagctcactgcaacctccgcctcccgaattcaagccattcttctgcctcaccctcctgaatagctgggattacaggcactcgccaccacaccaggctaatttctatattttggtcaaaacgaggattcgccatgttagccaggctgttctcaaatacttgatctcaggtgatctgcccaccttggcctcccaaagtgctgggattacaggcatgagccagagcacctggtctatttttttttttttaaattaagaaacacgttggtcatggtggctcatggctgtaatcccagcaccttgggaggccaatacggctggatcgcttgagccctggaattcaagaccagctcgggcaacatggtgaaagcccatctctactaggaacacaaaaatttgcccggtgcggtggcacctggctatggtcctagcaactttggaggctgaggtgggaggatcccttgaacccaggagattgaagcttcagtgagggctgatcctgtcaccgctctcatgcctggccaacagaatgagacccatctttaatagaaatgaagaaaaaggaaacacatgcgtcctgggtctggggacagggagagtctaaggcca

SEQ ID NO: 161290 - DNA, 1000 bp, Homo Sapiens
tttttttttttttttttttttttttttaaaagaaatctatttttaatggctttggctttatagcacgaagcaggcaccctctcgttaaaggcacacagtcctctcttctgccccacctcctgggtccttaaaatcgagtcctgagttccagaggggtcactgcaaggcagcagggaagggagagggtcacagtttcactctgtgagtatcagacacccagggccaaggcccagactggcctctgaagctacaggttagagtctgggtacaggaggcagccgagatggtccctgagaacagacagtcccggtcccccggagcaagctccatcctctgcagagctgtgaggtcagtgccccacatcctggggcaacgtgaagtccctgaagctgtagaaggagatgtcaccatgatccaccagggcaaagatcagagggacatccccactctggtaagacaaccgcttgaggctgcagaggtctgggacaggctcatcaaatccactaatgcacatccgggcatagggtttgccagggttattctttcggaatgtggccacagcgtcggcctggtaaacatcaaagatgatttccaagcccccagacttctccaacagccggacacctccatcaggaaggtgtgttgtctgcagcacagagatatgctgaaggaccacggctggggagctggcctggccaggactcagcagcggggtgacgggctggccccacaggtgaggggcccggcgctggctcctctgcacctgccgccgctgcagcagctccttgtactcccgccagctggagcagcgctgcacctcgggatcggcgttgacatcttcctggaactgcgcggcctccgcgtggtgctcccgttcccgcctggagaggttctccttgcgctggttcagcttctggcaccaggactcagcgtctgtctcccgcccagccacgttggccgggagcagctctggggctggggcgcgcagaagggtgtggcg

SEQ ID NO: 161291 - DNA, 1000 bp, Homo Sapiens
gctgcgacagtctctttatttccatctcagtctcccctgcctgctcattcctggggctccaggccccaagctcagcagcagagagtttataaataaataaattacaaaagtgggcagggagtggcctggccagccctcccggggctatggctcagtgctcagtgagtgacagctgcaggatccgctgtaagtcctcctcctcctgctgcccgcgccgctcccgctcctcctgctcccgtgaagacaactccagggccaggcgcagctgctcttcaaagctgggtggaccgggggctgggggtgtcctgggaggggatcctgggcccctgggctctgtggacagctgcaggctttcctggagggcccgctccagctgaagctgttcctcataaaccgtggcctggggaggagggcgggcaccgggccgggtgttggtcagggcttcccagacggtcacctgctccgcctcagtgcccgcttcaagcaggctctgctggatggcgaactgcaggaggtcatcgtcctcgtcccggaggggctcgttgcgctccatgcccagcacgctgtacccgttgggcacttcaaacacggtggggtccacctcgcacgggaaagggttccctgatgcggcgacagcagagctgggggccggcacccacacggagctcaggggctcatcacagccacacaggttgctgaaggtgatgcgggcattgagcacgtggaaaaggggaatctcaattttgacggggaagccaggtggaaggcgcagagtgatgaagtcgcgcagcttggcaaagtgagcgttgctgatggccattaggtcgatgatgggggtcacctggtcacccagggagagcgggtgctcttcactcagccacagtgttgccttgaacctctgtactttgctggacatctcgatggggcggccaatgttccgtgactccaggctgaagttggggtcgaagtactcctcaggggagatggctgtggggttggt

SEQ ID NO: 161292 - DNA, 1000 bp, Homo Sapiens
ccaacaatttatcccatgtaatgaaattgctaagcctatatatttatagacacatacatacacatatatatatacacacacttacaaatatgtattatatatacagctctatgtataaacactcacatagagggagtgtatagcttttaattgggccgtcttctcaaaataattaagccagttttaatgaaatactgtttaaggctgctggcaagcaaagaagccatctttagcagagcattaataaactgagtcattcgcacaagggaatggctagctgtatcagtcacattcatggtgctaataaaagagctcagttctctgtggcaggccaaggattggagggccgggagggagcacagagcccagtcatctcgggctcactgtcacagacagtccttacggctgcagtggagttcacagtccgagctggaagaagggtctgcttgccctcaaaggatcccagcaggaatctctgtccatagaagagtgaggtgaccaatcccaggggctggtgaggtctctagagctccttaccatctgtgggtgacactggaccaggattgggaacagggtgcaagtgtggccagagtttctccttttggtgtcccagttcctcgtctacagtgacaatgagaatctttacaaactggactgactttcaccaaaagcgatgagatggacttgctgccacatataggtccatgccgatgagatggtgtagcagtatctggtgctggaaaggaaggggcctgtgtaagagtcccatcgtaccaacaaggaaactgacctgccccagtgttacaccgtttatccccagcggcacagccacatcctgaatccttcttcaagagtcctgggagaagaaaataagccccgttaccctctcctcctttctgtcttggagagaagaggcctataaaacactaatagtgcaggggaagtttttttctaattccaaacaaggtgggaaaagcaggaaccttttgatttctgtaag

SEQ ID NO: 161293 - DNA, 1000 bp, Homo Sapiens
aggattttactttagttttaattgacgttttgctcaaaagcaaagaactgaacatttcaatggttcaatgttacaagattacaaacaaaatccttacacagttacagtatcctacttcggttacttcacattaaatgcaggttgttaaaatcagtgctgtgcttgaacacaagataagcatttcaatttaataacaaaattaaatctagcaccttgaaataaatattgacgacagctttataagtatgaaagtatcatttcaataggaggaaaaaatccagttcaccaacagtggaaactaatagcagcattttcaaagctgagatgaaatttgtgtaaacacacactggcccgcacagtggacatgcacttctgttggctgggccctccccacccagggatgaacagagtgcccactgagccttttacattccaaatctggaaagctgcctcaagtttcagaccgtgggctagaaagactcaaatgcagggcaagggagatcaatgtgtttaagcaggatggggtcctttttgtaacaggccaacctagtaacatttccagtccaacttcagagcattccaggccaaaggtgcatatagtaacaggtctacctgatgtgaccctgacttcagggggagcacctgagtgcagggcaggatgcaggtgaggaacgagggcccaagatccccacagctgacaccactttgcaaccagcgcattctaggctaactcaggtgagattaaaaaaaaaaatctgtgattcttaacccactgtaaccaaatggttcttaaatagggaatgtctgcatggtaagtctccttcttaataacattttcaagcattaatgatgagttctttacagtgtggttcttacaggcactcacaaggttaccatgttttctttctcatgaacactccatctttacactgacctttggagctttcaggtcttacttttaacaagtacagtcagaaacactgagaagcggactcagggg

SEQ ID NO: 161294 - DNA, 1000 bp, Homo Sapiens
ctgtcagtaaagggtgttttattgggggaacctacagacagaagcatggtcttgggtggctggaggacaggcaggtctctgcccctgtcaccccagacccagggcttctgtgccgtagggaagaggtgtaagtgctctttgcaagacaactaaaggcagcccttcagaacaggcaagagtggtagatgcgtcatggcccataatttgtgtgatcacatcaaggctgacatgttcatatactagggacaggaaatcacataggaattgggaggcgctcaggggactggcgccggtctgaattcagcatggtggatcagcacccaagaggagtcactactgactggccccacatcttcctgtgcccaggaggagtttgtggggcagggcctctgattatttttgaaaatctagtttaatttggtcattacattggtgtcaaaaatggaataagttaaatttcattgtacttcttaataaaaaaatttgaatggcataagtgccaatctcaaagcataacaacatttaatattccagacaatgctggtgtgagctccgctgagaaaactttcacggcatctggggattcctgtgagctccactgtgaaaactttcaccgcatcccgggattcctggacatgcctgggtttagttgtcaggggatctcatatttgttactttcacacccatcctgagacaccatgagttcttgaattctgcacctttgagacttttgtctcctctgtcacttgaagtctttttcttgttaaagtttcttccttcaggtgttcagatgcaggtcaggagcgagactggataagccgtggtctccaggtcttttctcctcgacaatgagcgatcattggctccgtttcacacctaacgatgggtaatcatgcaaagtggttgcttgtcccaaagcgagcctaatcgggattaattttgcttctcaatgtcccatttttatttctcagtaagaatacaggaaagtatggtaagaatt

SEQ ID NO: 161295 - DNA, 1000 bp, Homo Sapiens
aagtgaatatggataaataatccagtcagtttattttgttaagcacatatgccaggcaccattctgggcactggggatacgttggtgaatggttcatacagaatcttggcccttggggagcttacattctatcagaagagacagatagatacacaggcaattctaaaataaaataccaactgctatgaatccaattaaagtagcataaaagaataaagcaatggaggtagaacaatagttgcattattttatatcagctcatcatatatctcggaaggtatctctgaggaagtggcagttgggcaaaaacctgaatgaagtaaaggagcaaggggttaggggaaaacattccaggtggagggaacaacaggtacaaaggccctgaggcaggaatgtgcttgatatatgactgctgggcggcctttgtggtgccagtgtaataaaatagaagggagaagggggaagggggaagaaatgaatttggaaaagcagctaggggtcaaatcacataggcccacagacctcagtgagcagtttggtttcaataatagcaatggttaacctttacagagcatgcagtggtgctcagtactgtcaggtaatcagtatgcatttactagtattttaaaagtgcctgcttgggggagttgatatgattatctccattcaacagatgaagaaactgagactcagagaggtgcagtggtttaaaagaagatggctgtagagtgagtgatggggccagaatgttagggtgtccatatgttccagtttgccctaaatggtccatttaagacggctgctccaaagtaatttttagcccatttatgcctagtgttccattattggaatgctaagcatgtgggaattatttatatcctaccgctccaggtcattgccaagatctgattgcaaaacttcaaaaaattgcaacctcaggcataaatgggttaacagaacccctttttactctcaaatatatcttctacctccaaaattc

SEQ ID NO: 161296 - DNA, 1000 bp, Homo Sapiens
gagaaggagtctcactctgtcgccaggctggagtgcagtgacacgatctcggctgactgcaacctccgcctcccgggttcatgcaattctcctgcctcaacctcccgagtagctgggactacagtctcctgccaccatgcctggctaatttttgtatttttagtagagacaggtttcaccatgttggccaggatggtctcgatctcttgacctcgtgatccgcccacctcggcctcccagagtgctggaattacaggtgtgagccaccgcacccagccgattctgctttctgtctgtctatctccactgtcctcctccttagaccctatcagccctgccctgagctcaccctcagcccaatgaccagcttctagtcttgctcagctgcaacctctcttcccctcagcatccacggttcttggtaaaacacaaacctcacccagtatctcctctgttcagatccttcccacacctctcctggcctgcctgataaagttcaaattccatggcttgacttataaggccctccttggtctgtccgctgctgacctcctggcctctcctctcctgtttctcccctcctgcttcatcttgagccaaacgaaccagctcctgggtctctgagccttgcctgactttgtgctgtacctgctttgtgtctgaatccccagggcctagcactgtgcctggcaaccatccggggctccgtaaaccttggctggtgtgtgatgccgagaagcgaatgctctgtaagccactgctgcatccgtggcagttcatgccatgattttttccaggggtcatagtcaaaatgattgtctgatccagagcagtgtccatgtggcccccagatgtgcccagcattaaccatttaggtgatgggcatgaggaggttctgggcatgccatggggagggggaggggcagcacaggtgctgggaggcagtggatggaaccaagtgctacagatgcacgtccacgttttaacaactagtacagct

SEQ ID NO: 161297 - DNA, 1000 bp, Homo Sapiens
acgaattcaggagtcctttattagccggcagccgagagacagctagcgctcaaaattctcttggccccgaagaaggagctagattttcttttatactttggtttagacaggggagagggggaatctagttgaaacaatcttacagaagtaaagtaggcaaaaagttaaaaggataaacggttacaggaaagtaaacagttccaggtgcagaggctttaagtctatcctaaggtgatggacgccgggctttgggcgttatcaaccggacacaaacgcaggggctctgggtgctattaaccgggcgaattcctgggaactgcggatatagcttgccacagtatcttatcagttaattgcattcttgatgtgctgggagtcagcttgcacaagttaagtccttgaggaagggggtgggtgaggggctgcgagtgaaggagtcacgatggagtccgtctggctctcttagctaaggaagagtcacttcaggttaaaacaaggtagggtatcacactagaagcctcacatcattaagcttcagtcaggcaggcattcctttaaaaagtgtttactgagtaccttctctatgtcagtcactatttggggcataaaggactcacttctccgcaaaaacaaactctgatcccccggtctcctcgagtcacggagcttgcaagctagtgggaaaaattgggaactggtgcaaagaatgactgcaaaataaattgtggtcatcttgaagacatatgcgtgcatgtgtgcgtgaagctttttaaatagagaagttttaagtgggggaaatttgctgacattacacgatttcttctcttagtgcaaatgtatacagcctgtctttttgaaggggtcacggtagataattatgctctgttaacctcatttgttgtcagggaaaattaaaactaagggtagtgtcagtaggaatcttggttcctgccagttttgttgtttgttagcatatcttcctttacaggtagtatggttt

SEQ ID NO: 161298 - DNA, 1000 bp, Homo Sapiens
gattttgaattggctctagtttttaatattcaggtagattaagtgaaaatttcctcaacgtttatggtgcacttaaataggtgtgattcttcttattcctatacacatactcatttgcactgtgactttgctgctccttccatcaaagggtatagagcctatttctccaccccatgaatctgggtttggccatgtgactgctttggaaaatgggacattaataaatgtgatgagcagtggcttggaaaggggttgaacgtaggggcttacactcttgctattcttgttactgccctgtaaataagcctgggctagcctgatggatgatgagagacacatggtgtaatcatccccataaccctggccaacagcctgccaactgccagatgtgtaaggtgatcttagatcatctaacctccagccgacccatcagctgaccatggacgtgagccaattaggaagacaacagccaagtcaggccaaccagaaatgctgagccaaccaatcatgagctaattatattgttgcttaaacaacaaacttttaggatttcatgttatgcagcaaaagctaactgacacgacactattcaatcatttttcattattagattaacaaacctctactgaatgccttctgtattagtctgttttcatgctgccgataaagacatacccgagactgggaagaaaaataggtttaatggaattacagttccacgtggctggggaaacctcacaatcatgacagaaggcaagcaggacaagtcatatcttacatggatggcaacaggaaaagagagagaacttgtgagaggaaactcccatttttaaaagcaccagatctcatgagacatattcactatcatgagaatagcatgggaaagacccaccctcatgattcgtttacctcccactgggtccctcccacaacatgtgggaattgtgggagttacaattaaagatgagatttgagtgaggacaaagccaatccatatcat

SEQ ID NO: 161299 - DNA, 1000 bp, Homo Sapiens
aaaggatgtatatttaatgagacagtgacagcagcattgttacaactgggcatccctcaggccagcctggtcccatgctgtgggaccacccatgtgtggtcttccacaaggtgctggcggcaccgggctcttcctgctgtgccacagacccacagaaagaaccatacgtgattccgtttaccggctgtgtcacccagaaggggcaggtgggggagatgctgggtggcaggtaaaaataaaaggggcccaaccctttgtccagcaaataccagcacagtttttctatggacacagtgatttgtaacttgaataatgtgaagttgattacacagatttcggaatggctaatatccatatgacagaaatgtgatgcattcatgagacgtgtgcagactttggggtgttgggaaacagcatttggcctttaacctcctcctcagccccaaagaggaaggggaaacaggacaggaacccacactgttgatccaacctcacatcacattctctgaaggactccgacatgttccctgctcaccgttccacctgaggtaggtcaggacccctgcccccattttccagatggggaaaccgaggcagagcagacaataagaaccttgcctaaagccaccacagtggggagtggacaccatccccttcctgatgccggaggacaaagaggagaccctgccgtctctcccactcctggaatgagccagtgagccaggtggcctttctgctgactgaggtgtctcctcttgggtttcctggtcaaaggggaccaataaccaagcagtggcattctctgccctctgcccaccgtgtgccaaccatgtgcaccaacagccaagcacagtccagggtgtgggggaaaaggacagacaggagcacccccactgcccaaggcagaaggctgggaagccacgtcctgacacgtcctctcctgaggcccctcgtggaccgcaggatctgtaaagtgcaaacaccaaagccaagtgtcccc

SEQ ID NO: 161300 - DNA, 1000 bp, Homo Sapiens
ttttttttttttttttttcagctgtactgtttgctctttattttctacataataaaacttaatcactggggcacagggatgcacgcttgtaatcccagctactggggaagcttaggcaggacgactgtttgagctcaggagtttcagactgtagtgcattatgactgcacctgtgaatagccactgcattccagcccttagcgagaccttgcctcaagactttggggaggctatttcttaagcatatataaccaatccatttcagtgtcactatggtgcttgtcaagaccaatgctatcaaaaacacagtaattattcctcctattttggcagattctgctgattctgattcctggccaggtggaaggagggtgcattttaagggagactttattactgcttgctcatcactgtgctctaaataaacagatacacagtagttcgtgtttggaattaacttgtcaatgatataggtgaaatttccactcatgtttccttttatttcgggtttatgcttcttaacaattccctctgactgttcttcaatgacgagagataaatcaaactgtaattcttcctcaacaatagatggaaatttcaccatcacattaatgtggttggtaaaaccaacaatctcaaactctggtggttcaaaagacatgtctatggccagccagaaattgtgtgagcaactgaacaacgttgtgttcccgctgaatccttctaggacggtgacataggcctcgtgtgtgcttctccactcatctgtgaggtcacaaaatgatcttgtggtatttgcacagttcttaaccaccttcaaatcttctggtttactcatgattgtatacagcaatgtatagtgagttggtacaatggagtggttttttaattcccatgataagatggaccggaaatttcgcaatgatatcttgaaagtgcaagattcatctgtgtaatcaggcgaatcatatgaaataccaaacacgaggctgatatacac

SEQ ID NO: 161301 - DNA, 1000 bp, Homo Sapiens
tttttttttttttttttttgagacagaatttcactcttgttgcccaggctggagtgcaatggcaagatcttggctcactgcaacctccaactcccaggatcaagcgattctcctgcctcagcctcccgagtagatggaattacaggcacgcgccactacgcccagctaatttttgtatttttagtagagatggggtttcaccatgttggccaggctggtcttgaactcctgacctcaagtgatctgcccgcctcggcctcccaaagtactgggattataggcaggagccaccgcacccagccaatgacatgaaaattgatcaaattgggaaggtagagacaacagttgaataaaaaacaggttaatctcatctaggttttaaaaagagagagaattctggaagggtatgaactaagaatttattttatttatttattttttgagatggagtttcactgttgcccaggctggagtgcagtggtgtgatctcggctcattgcaacctccacctcccaggttcaagcgattctcttgcctcaacctttcgagtagctgggactacaggcacgcaccaccacgcccggctaatttttgtattttagtagagatgaggttttgctatgttggccaggccagttctcaaactcctaacctcaagtgatctgcccgcctcagcctcccaaagtgctagggttacaggcatgagccaccgcgcccagccctgaactaagaatttataatggtgacgtctggatggtgaaaatattatttttttttgacatttaaggtttttttgtttttgttttttttttaaatagagtcggagttttaccacatttcccaggctggtcttaaactcctgagctcaagtgatccgcccaccttggcctcccaaagtgtaggattatagggatgagccaccacacccggccagacatttaaggttttaaaaaaatctttgctcatttgtggtttttaaaaaatgtactacaatgagcac

SEQ ID NO: 161302 - DNA, 1000 bp, Homo Sapiens
ttttttttttttttttttgaccagccatacacatgcctttatttagatcagcttttttcaaaatgcagccaaacttatgagttggacagcccaaagtaaccagccctattccactgagttagtttaccccacagcagtagaacccagtgctggtttggttcctggcccatggtgggacagcgtgaaggtgatggagggctctagcacaaggaggtgctgagtgccaccggcaggtgcttctgcagacagcctagagcaaggtaagcaggagcactcgcttcagaaccgaggcggctcggaccagaggcaggcactttcctccacatggcaaagggacaagggtttgttcttcctacctcattgctttactaaagggtcaggctaggcatgaccgatcaaggatgggtagggggtaaaatggaggaggaacatgactgatgaggtgcctggaagcctgtaggggtgtagctgctgggtcctttgaggtaaatggctttggaaatagagggtgaaactgaaatcctgagtgatcctgcatggctttggatgaggccagcctggttcaggcatacatggtgagctgcagccactccagaacgttgagcttgatgataccatctccatccttgtcaaatgcatgaaaagctctgaacatgccctccagcctaacgaagcagcagatgaaactgtcaaagtcgatgttcatgtgtttgtctgcgtaccgcatggtaatgatgtcatagagctggttgttgaggtggaatcctgcgtcgttgactgcatttcgcatctcgtagctgttgatggtgccggactggtctgtgtcatagtgtttgaaaattttctgccaggccttaatcttgttccagaggtggtggaactcctgcaggttgagctttccagagccatctgtatccatgagcgcaatcatgctacggcaggactccagtgtgaacccgtgtgtcttcaggtccttgtgtttgttcacgactgtgttaag

SEQ ID NO: 161303 - DNA, 1000 bp, Homo Sapiens
ttttttttttttttttttaatatcttagtcatttttatttcccttgcaggcaatctctttgaacagaggtttattcaatgaaggaaaggtggagggaagaagggaagaattacaatggttagaaaagagcaactaaagattatttctattatacttctgaacggtaaactagcaattttaataaatattggggtccacttaaatctattaaagcagaaagtgtaaagctatctccattagtgaagagatgaagtgacaaaaaccaatcagtttttgtagcaactgatttagaaaatcttgtactgaaatcaacaattagacttgcacatcatagattttcaaatgtttgctgaattgaaaaagaatattcacaggaattatttcccccgaaggtgtcttatatcaaatagatgaacttcaagttgtggaatgtaaatcttttattaaaacagttgtctttccacagtagtaaagctttggcacatacagtataaaaaataatcacccaccataattataccaaattcctcttatcaactgcatactaagtgttttcaatacaattttttccgtataaaaatactgggaaaaattgataaataacaggtaagagaaagatatttctaggcaattactaggatcatttggaaaaagtgagtactgtggatatttaaaatatcacagtaacaagatcatgcttgttcctacagtattgcgggccagacacttaagtgaaagcagaagtgtttgggtgactttcctacttaaaattttggtcatatcatttcaaaacatttgcatcttggttggctgcatatgctttcctattgatcccaaaccaaatcttagaatcacttcatttaaaatactgagcggtattgaatacttcgaagcagaacaggcaatgtgcagccctcatttatgagaaaaccctcaggaaactcccagggtgatgcttggagaagctgtgagttgagctgaagctggagaacttcctcca

SEQ ID NO: 161304 - DNA, 1000 bp, Homo Sapiens
ttttttttttttttttttggattcacactggtgtctttttattggattttccgtgggcaacctgggtgcttcgagctccgctctggggcagtgggagctgcccatcctctcccagcgccttataacaactgggtcctctgctcctgggctcaggctgctgccttgagataaacccagttttcccactgccttcttcttcacttgtgccaggctgcccagccaggggcatggcccgggtgtcctgggtagcaggcactagttcagagccccctggcagcagtacctgcctgttgtaggcccctgtcgactccacagtgtacacaacaccatgggctggcctacagcttggtgttgaggtggaagaagtggggcgctgcataggttgtgactggtggtgcgtgccaggcagatgaggccgggcaaagtctgtggcggagggcactgtcgaaggacgttggggggaagtgcatcaggccagcggccatgggcgaggggcctgcggtggccaggaagtgggccgggaaggccgggatgaccagggggctgaaggggagtgcagcctggcccttcaaggggcccggggtgccagtgaagttcagcgggcagtgcagcatggtgcccctgtaggcctctgggggcacaggccccagggctgggcccagaaggcaggagaccaggccggaccctgcaggtttggccccacacttcttggcatccgcctccttaagaaagggagacacggcccgcagtctcttcccactgtgggcagcaccctcttcctccaggctgcgcttgctgcccaggcctgggctactggggaaggtgggcgggagcgtggggctctcggctgggaccttggccatgggggacacccagcaggctttgggcttggggtagaggatgccctttctggagccacctttatggaacgcagaagggcggttagcgtctccgccccacaccagctggggctctttcactgacagcccctctttgccag

SEQ ID NO: 161305 - DNA, 1000 bp, Homo Sapiens
ttttttttttttttttttttttctgtacatgaattaaatatattatctgtctctgcactgagtcacacgacgttcacagtaccgtggggaggagtggagggtgggggcctgaggtgggcagggcagggggcctgggtagaaaggcgaggctggcctccccttggcctgtgccattcaggatcagcccagtgttgaggagacctgggggatacagaggggagccttcttcaggggccccggccacccaggcttccagcccccggaggcaagcctctcagcatcagagcctgctcctgttccacgttcctctccctcagatggtggcatctacacctctccctgtcgtggccgccctctggggtggcaggggctgggggaagctggtattgggatcaggtggacagagccacaagggctgggaaggaaggatggggaggctgtgcgagccttcgggagctgaggtcagcctggcaccagtgtcagggtgactctgcatatctgggtgccgtccccaggaccctgaccaggcctggctaatcagagccctgggatgataaggtaagcaggagccacctcgggaaggggtggacaggcaggagccggtcacagctccaagggcagtgagtacggtaccacctgccaatttaaggcaactccattcagactgatgagctgggcgggggctggctgaggtggcaggcgtgcaactggcggtcccaggccacctctggacacagctgggcatccaagcatgccagcaaagcgtatgccggcactgctcagccatggttcaagccagagggtgtcggggaatgagggtagggtagggctgatggaaagagtggggactactattccttctgttgctgtgggacacctgccaggtggggtaggctttggcacacatgtgggtacctaggattccagggtcccagagaacatgccatgtctcttcttgctctcagaggggaaaaagatgaaacgtgtgtgggctccaagg

SEQ ID NO: 161306 - DNA, 1000 bp, Homo Sapiens
tttttttttttttttttttttttttttttctcaacttgctcagtgctttattgaaccaaggccctaacagatgactcagcagggccttcaagcacagccctgcccccatcttgagattcagaatccagagggtgctcagtccttggtttagctgcttctgtgacatttcctcttgaatagctccaaaccctaagtgtaaatatttttgtccacacaaataggcacacatatattcctgctgcaggctgtcatgctcaacaaaacgctcccacctggtttgggtatgcaaggcactgcgcatccacggccatccacggccatccacccatccatccaaccttccatccatccgcaacaagacagcagcaagttctgagcagtcaggccccagggttcacagcagtaggggctgggcttccagcaggctcatgattcaggccttaacccttgccctgggagcccccaaggataataacatccctttctggggcaacaaaactgggaccgagtgggtaactgatatttgacaggggaacctaaacagtctacggaagtgtcctgagatgggcgtaaagtcaaacagaccaagcacacaggtaacactgaaataggaaagagtaagagcttctgttcaggctggaggtgctcgtatggtgggacaggaaaggggaaaagagaaaggggcaacatggcagacataccacggttcctacagagattaggggcagccctggcccgggaagtacacagggcagagagctgactctcaggccaggaaggagtttagctctgacccatcctcagggaccacggctctcccccagcctcagctgacacacacacaaaggagcgtttcaggacacaggaagatgaagggttaaccctaacaaggaaacaagaagctcctggaggacacaaaatactgcctttaagctggtattaacccaacttaactaactcaacagactgggctcttccaggggtggggggcaccaggata

SEQ ID NO: 161307 - DNA, 1000 bp, Homo Sapiens
ttttttttttttttttttgcaaggatccggcaaatcccaaaggcctttttaaaaactaagagctctcgggcaggggcaggggcaggggcaggggagggggctagcagcccccggccacgaagtcgaagtccaggaaggctgcctgctccgcggctgtgaggggccgcgcgtcgcggggcgggctcagtgtgggggcctccccggtgaactcctcgtcgaagttgctgacgtcggtgcggccggacagcgtgggcacaaagggcggtggcaggcgccgggccaacagggcttcccagcccagagtcctgaagaagggctgtttcttcacatcttctgcatctctctcgctagatcccagcctccgctctgggttcctccgaagcagccttctcatgatgccgatggcttcggccgacaggaagcgggggtagcgaacctcgtcgttgacgatgctgtcgaagacctcctcctcatcatcccctgggaatggggactcgccaaccagcatctcgtagagcagcacacccagtccccaccagtccacagctcgcgtgtacgacgtgtccgtcagcacctcaggggccaggaactccggggtcccacagaatgtgctggtccggtccccatagcccatcccctccttgcagaggccaaagtctgcgatcttgacgtagccctcggtgtccaggagcaaattgtccaacttcaggtccctgtagacgatcttgtgttcgtgaagaaactgtaggcccagcaccacgcaggcggaataaaagatggcacggggctcagagaacacgtcgctgtggatgtgcagcatcaggtccccaccggccgagtactccatcacgaagcacacgtgctccggtgtctggaaacagccgaagaggttcaccaggaaggggtgtcccgcactggtcactgccgccaatatccgcttctcacacatcaggctctccacctcgtctcgggccacaatgtcccctttcttcagagcctt

SEQ ID NO: 161308 - DNA, 1000 bp, Homo Sapiens
ttttttttttttttttttaaatgaaatctatgaattttttttattaaggatttgataagctgatataatgaaaacatgtaaatgaaaaacatttacactgactgtacgactagtgtgctaagccattacaatagtttactgacataactggcaagagtaacttggaaaataacttaatccagcagaacaaaaacatcctcagaaaaacatcctcagtagtactgaatatatctctctcatatatctatctatctatctatatatatatatatatatatatagctttgcacaatcagggagcaaggcacataatgaaatgagcatacatttatgcagaagaaaataatagcaacaaagctgcgagaaaaattgtaacttcatcttcactgagctgtgcataatcctttgaataataatgtcctctacctggtacattataatgaagttccttgtcttcttcatgctttaaaaaagtatacttctacattgtatctacctatggcaaagctcccacagcctacaagttggtgtgagccttgactcttgttttttaaagaactgagggagggagcaatcccagttaaatataatgtgcaattcccctttaacagtaaacaatgtttttaaaacacttagcacaagctaattttatcttaaatgtacatctctgtaagagttcactagtggctgatagtaaaatgaagcaaaattgtttgaaacattccagttaatgcttattttctagaaggggttattttacaagtagcaaaaaaaaaaaaaaaagtaggaggtggggaaataatatgaaaaacggcagtttttggtattaggttacaataaatttaacgaatggacagtttgcaaaatataagggtttctccccctttagtgctgcagacaagttttactgcctaagacgttgaggctgcaacaatcatgagcttggtattagtagccatccatgataaacataattaattctcaacttaaccatctataa

SEQ ID NO: 161309 - DNA, 1000 bp, Homo Sapiens
gagatggagtcttgctctgtcgcccagggtggagtgcagtggcacgattttggctcactgcaacctccacctcctgggtccaagcgattgtccggcctcagcctcatgagtagctgggactacaggcgcccgccaccacgcctggctaattttctgcatttttagtagagacggagtttcacgatgttagccaggatggtcttgatctcctgacctcatgatccacccgcctcagcctcccaaagtgctgggattacaggcgtgagcgaccatgcccagtcccaaatatttttaaaattgcaaatgacaaagtcaatggggttcaaaactaaattcttaaactaagtaaggagataacagacaacatttaaatttgtctttggaaaacaactatgaaatattaccattttctcctatcagatcaagtcagtatttcattctgaaagcaatgtattaacatgtgattttatgaaataatcaaggtataggcaagctctcttgcggagcatacacattaactcaggatcatcctcattgctgttttttttcccccagcacttgtgaggccttgtaggggacagtggattaaatagccttcagggtcaaaacagttccttgacatttggattttaaactcctggtaattaaaattgattgcataatttactcctattacaggtgtgacacactgtgagattcaggattataattctttggacttaaaatggttggaaacaagctgggggatctggactttttcttccctccatgccttccctcttcaatctgaagactcagaaattatcccaaaccatagaaaagtggagtatttgagaatgaataaacttataatccaatgagtagatttctaattattatctataaagagatgaagagcagtggatagtggaacaagaattaacacagggagaaaggaatctcacctttagaatatctctaggataatatttttcagacaactgactccctccaatcctct

SEQ ID NO: 161310 - DNA, 1000 bp, Homo Sapiens
ttttttttttttttctttcttcaaatcctcaacttgagacaggtttattagttaattagtgatttcacagtatcctttcgcaggccgatccccactccaaccgttccctcagcaaccccaggggtgtcagacggggcaccctcccactgtcttctccagccagccttaaaaaccccagagacgccagcctgggaacgatctcagtatggaatctgaagtcgccttgtcagcacagacacctctggggtccccagaagacctgtggcaaagttctctaaaccgaacctggagaggggaaggttttcaagcaggaaccacataaattcacctaaaactcacgcctacacccctctgtgataaaagatttctgtttcttctgttggagactgaattttctcttcaagactacagtactgtatctgtccaatctgtggaaatatactaaaagaaaatggcaccatcagtcccattgccaggacagtacaagacagtttcaaaatccacaatgaccctgggtttttcctgaaatactgggtccttttaaaaaagtaggtgaagacttcaggaatcagagctgaggtcccaaacagcactattctggatgctagcgtttctctaacagcctttgtcccagcaattctggaatgacccaggacattgccttccttgtccatgaccgcaatccccttaatggattcaagacttcgggacatgtagacattcattccactggcttgcacgaggaagatcacaggtaagagtcttttaatccaagggccagtcaggccatacttcatctggacaaactgagggattactcctaagaaagttgaagaagcaacggctcccgccattagtaatgatctttctagtggcttacaagtgtaacttctgtttccattgatgctgttgaacgctgccatgtaggcacagaggaaaacctgaggtaaaatcacggacttgatccctttcagtggcgtcattgacaaaaataccgtgg

SEQ ID NO: 161311 - DNA, 1000 bp, Homo Sapiens
tttttttttttttttttttttagaaacaaatatatatttttgatagaaactgtaagtaaatattcagtactaccagaaatatactatcttcaactctcggcttttttccaaaagatacagaatcattttttggaaaagatacaagatgtacagacaaatcacattcataccttacaatttaaattcataatgaacaatgaatattttcatattttccagaagtttgaaatttcaaagttgttagcaaaattattcatttccataatttttacgagtaaaaatagaaagagctgatcatgtaccttaatattgtcactttatatattactcaaaagtacaaataaccctaaaagtagaatcccaggcttatcatattataaaaatactgagacatttatcaaacataactaatataaatgaaactacatttttaaaaatgtttcacaaacaccagtccatctttctctttggttcagaaaataaaagaggtaggttcaaataaagaaaatgcctattacatcattagattttcattaaaatgctggaaatttataacagaaattattagaagtgaaatgagtttaagaactaaattaaaaactgataataacttcaactagtaaatatttttctaagttctaatcacacaaataagaaaagatagttgactataaaaatggctttagtaaaataaaaaaatgctctcattattataaattaagtctcctatatcctaacatgttcctaaaacttggggcaagagagaatatgaatgtatatgtttacaaattgggcctttcatttaaatataggtatctaatgtataagagtaatacatactactattaatatgtatctctcacctttgtgctgcccatattgaaaacagcaagttcaaagatattcaacagtgagggagaaataagcacatcatttgctcatgatcaatccacttcatgcaattaaaaaagaaatttcaggttactaagaatggtcccaa

SEQ ID NO: 161312 - DNA, 1000 bp, Homo Sapiens
aagcaaaggttgcaatttttattctgtacaatataaaaccatattacaggccagtcacagtggcttgcacctgtaatcccagcactttgggaggcccaggtgggcagatcacctgaggtaaggagttcaagaccagtttgaccaacatggtgaaaccccatctctactaaaaatagaaaaattaaccgggcatggtgacgggcgcctataatcccagctactcagggggctcaggcatgagaattgcttgaacccaggaggcggaggttgcagtgagctgagattgccccattgcactccagcctgggcgacagagagagattacctctcaaaataaataagtaaatgaataaatagataaataaatccatatacatagatttgatgtataggttctacattttttacttttggaaaaaatatgtagggaaaaagtttacaaatctctcattctctgctataaaaagttataaatgaaaccaacaattatttgtgcagttatcagttctgaatacaatatgaattatacctagaaattagaatttatctagatgcctctgcctgcttgtgaagaacacaaaattatatcacagaacactctggcttctataatttggggcaattttgaaaagcagacttcttcctaatgtaaggaaagaataatttttccataagtcacccagcataaaaaaagttcatggtctgatttatcttttttaaaaggcgaagtgattcactattatatttgcatggattattttgatccttactagtccctaattgtgaaatcaatttagcatgtgttatatctgtttgggttttcccagcaagagactgatataaaatgtagcaaattggctgaagtacatgggctaaagtaaaatgaattgaataattaaatataaaatgtttaccaactttattcttcctaattttacaactgtcttgtatattgagattaactgtttcttgagtctatgaacacaactgaatctgatat

SEQ ID NO: 161313 - DNA, 1000 bp, Homo Sapiens
ttagagactggtgctttcactgagggatgacttgctgttactgctgctttcttctgacacagagctctcactttcattttcccctctatagcatagctctctcaattttttctgttttattaaaatggcagtagtaataagaagcacaggtagagaaatgtagaaaatgagttgaaaccgttgtttttgaaaagtggcctatcttccctcctccatgtaacttctctcagttggtggtactaagcgtccatcatcaatacttccaaatgctccttgctttggttggcagtaaggaggattatatcccttttcacaatggcaatggttaaaattgttgcaaactccatgacgatcacaatgattagaagcatcacacaattttaaattcatcaggaatctaacatgtttacaatgcatttcgaaacaatacatatcaggaccacacatggaaccatcttgtacaaatgtttcatctctgtcttcagctgaataatatgatgtgattgaaataggtgaatttactggaggtggcgtcctcctgggtaggtatgtagacacacatgtttggtctcgtacatgtgcataaatcacagataaatttggacgtgatattaagtctctgtgttcccatgtacagactaattttccacatagaatatgttgaaaaagacagtgtgcagtgccacagtttccaaaattgtctcctctggtattaatttcatcataacagaaaaccggagcacctcttgaacctcttccaattaaatcatcacattgtttgtcaaaagtccgacactttccttgaaaacagaaggctccacctgaatcacaatattctccatcacgtacataagtgtcaggcaaacagtatggaaggtccccattgcaatattcagtgaaatcgcattctttaccaactgatttcctacaaatcatattagccggtttgaagtctttagtgccacagtcacattcttcacttccttccaacaacccattg

SEQ ID NO: 161314 - DNA, 1000 bp, Homo Sapiens
ccttctcaaggattactcttaatctttaatggcagctgcattctcaacttaatacaacgttcaacaaataaaaaagacaactgcttctgagcccaatattatacattaggtaaggaacacgatactcctcattactgttctgtctcaggatataagtttgcaaattcttctcctgatctcagtcaacataaaagcagaattacagtttagagtgggcaatgagaaaggtggaatcaaaatagacacagggaaggccataaagagttcgcaagcataaatgcctgatagcaaaaacgatcacagaagattccaaaaccacaatcctgcacaaaggccatctcaatcttacacaaaaaatacttctgcaatgcctgccgagcacctgcctgtccaacctgggactggtgtcacctttgttactgatccttgtagtcaaaaataattatctcaaaacaattatgtaaccctcctcatttttcctttaaagacctttgtcttcctctatctcccaggatacacacagttaactatcgcatgcattttctcattgcagtgctctattcctgaataaatgccattttcttttagagagcctctctctgttcgttatttaagttgacagcaacaaacagtttaggtttttggcaacaaatcaccaatatttacttaaaaacaaacaaaacacttacaacacaggtaggaacaacaggttattttggaaagagtttaatatattctctattgttaagtgcaccagatgctggacttctgaaacaacaattatgcttctgcataatagctttttctacatatttctgttcatgttgcttgttcctctgatttacctggaatcaatgaatctgaaaaacaaaaagattctttaagcacctggtaaatttcaggtcccacattagaaaatgagcaatcatcaataatattgatgggggtgaaaatatgacattgagactttcgggtaatgtgccgagtttactttcatagt

SEQ ID NO: 161315 - DNA, 1000 bp, Homo Sapiens
tttttttttttttttgtgatgtcaatatttttattaggtatggcctctggtgttttcttagtccatttgggttgctatagcaaaataccaaagatactggacaggtaataaacaacagacatttattgcccacagttctggagactggaagtccagtatcaagatgcggcagattcaatgtctggtggggacccactttctcattcatagacagagccttccctctgtgtcctcacactgtggaaggagcaagcgagctctctggaatcctttttgtaggagtgctcatcccattcatgaggctccactctcatgacctcatcacctcccagaggctccacctgaaactcatttgatttggagatttaaagagtagctgtagggcatgttgtacaacttttagaaactttccgaaatgttagctgcatttcattatttaaccctccacttccatcttccaatcatctcttcggaacatgctgtggctgtcaaaaaaaatctttctaaactgtggtttaccattattaccatggggtaataaatactcaacagaaatttctagccagtaccaattcccaacatgttctttcctgtgaacaaatatcctgaaatgtcattgggaagaacaaaattcactttatcttaacctgataagcatatatgtctttagcaatgggagttattttcttttctttttcttttactttttttttcttttcagacaagatcttgctgtttcactcagtctgcagtacagtggcatgatcatggctcactgcaagcctgcatctcctgggctcaagagatcctcccatcccagcctcccaagtcactgggactataggtgaacaccaccatgaccaactaatttttgtatttttttgtaatggtgggagtttgccatgtttcccaggctggtcttgaactcttgagctcaagtgatctgcctacctcagcctcccaaagtgctgggattacagggtgtgagctactgcacctg

SEQ ID NO: 161316 - DNA, 1000 bp, Homo Sapiens
aatttcaggagacaaattccaccattgaattcttgtatcttcagaatcagacctagcatatataatcagaaaataaattttgaagttcaaatcagtggtgtgtgtgttagaaatgtcaacatgtaaaacagaatgctagttaacaatcacattttcctaagaaaaaatttgcatcttaatcatacgaatatcacgaaaacagaccatttccagttttcactgtagtcttggatgtttttctcttcctgtttcctctgtgattggattcgtatctactacagctatgctttgttttccacagagaatttgttcctattgggttcattggttctttctgtagagaactgtggatggaacaagtaaaatatttttgaatctggctatgtagtggtccacaaatgtaagctatatatacaaatcacaaaggcaacgtggaattatctattgctgacgtcataaagcatagtctctttgctgtaagcttcctgggttcaagatgtaatgataaatttttattttgcatcagatcagtgaattcttgaaattttcatgtggttttgcattcttgcaaaatcgcaggcccattctgctcacagcacatcaggaatgacttccagttgggtggtgtgagggggagttttatttgaaaatgattccaaaacaggtgatggtatatgtcaggatcccgctggagccgtgtttggaatcctatatacaactcatcccagagtagaccattcttcaccacgtgtctgatgacatccacccggctatggatttcctcatagggatgttctcgttgtggtctttcttttgggaaggataaatctaaaaagtcaaccaaatagtcatatcctccaggaaaaggattgaagtcctcatctgtctcaatcatcctgaccacaaggttgtaatctttaaatccagcccaagtgaagtattcttttatccaggatgagtgaagaaatatttcatctcctagagcagcattcaagatttc

SEQ ID NO: 161317 - DNA, 1000 bp, Homo Sapiens
gggctcaaacattttctcctttaagagctgccatttttcctggctggtgccataggaatcatctgggtgcctgggcacacccgctgctgctttaaggcttccgccctgatgctgacactgctgctccacgggcccagttctgcatctccaggaaagacaaacagtctccagttttgggcccagctttcctagtctcttcttttccttaccctcagccctgatcttgtgtttgtacggacagtgagctcaccctaggcctggacccaggcccagtttccaaagcaagcagcacacagcgcatgttcacataagcatgggggctggggggacactggggcttactgatctttttctaggggcctccagcccctggcaccacctagaggggaaagtgagtcacccaaaccattgcccctgggcttacgtcgctgtaagctcacgctggccctgttgtgccctctttagtcacagacagcgtgtgagctgactctgtccctttaatgcccaggctgagcccagtgcctccttgagtatctgctccatcactggcgacgccacaggtaggtgtgaatggagtagccaggtgagattgtctccaggaagcccacagcaggatccttgatggtaagaggcacatccttagaggagctagggagcagggaggagaagctgagagtgtgatcctgccaaggcccccaacgctgtcttcagcccacttcccagacctcaccattgccctcaccggtttaggacgaccacaacaggagagccatcgggatgcatcagtgccactgcgtccgggtcgttcttctgactggcaaccagccccactctctgggagccctcaggaatgaacttgctgaatgtgggaacagatggtcagagtccctcggggtacctcccatgaaaccctcatctaagaagtcgcccacccacggacccaccccataactcctgcaaaggctctgccctggctctctaggcctggagccatgctgct

SEQ ID NO: 161318 - DNA, 1000 bp, Homo Sapiens
ttttttttttttttttgctgtaacagtgtttattgatgatgagtccagggctcctgctgaagccctggtggggaggggcacagagcgagatggggcgtaatggaatgcttgaaggctgctccgtgatgtcggtcggagcttccagactaggcgagggcagggtgaggcctcgggcacacagccggcgcccagtcacccggcccagatggagggcggccgggccctgcacaggcacttgccaaggtggctcacactcacgcacactcgtactgagactcaaggccgtctccacaactccaaccagtgcaaatgacttagtgcaaattaaattcagaagggacgggggaaacagagtcgtggaggctttgaatctctcagaaaaaaggaaagacaggaaagctcagaaacaaagagacagaaggatgaaaaagaagaagagggaggtggtggggacggcgtcatcccgctggaggagctcagctctgggatgatgtggtggctggtggtcaaccgtccgccgcagggggtggccatgaagatggagtcgccggtgcggggtgggtgctgcgggcgctgctgttccgatggtgtctttgatgttgggctgatgaggtctggttcctctagcttcaccttccagagccgattcctgagtcaggtagtgcagtggttgtaaagtgcagcatattcatttccaagctagagggttttgtgtccggattcaaaggcccaggcttgagctgggtagcaccatttctttcatgttgtgggttctgggagcccagagggcagccatagtgtgccgactccgtggaggaagtaaagaaacagacccgcttcttgccgcagccccaccagcctaaggtgttcaggaaggccggacgcgcctcctctgtcctcgccgtcacaccggaccatgtcatgtcctgcttgtcacgtccaccggacctggcgtcttggccttcggcagctggtgggcacgtccaccccagctggagac

SEQ ID NO: 161319 - DNA, 1000 bp, Homo Sapiens
ttttttttttttttttggcatggatggattttattgattaccctatatctacaatttgaggtaaaatagaagcaacacataaaagggcctatttctgctaccatgtcatataattctccattgtgaatattgtgataaagctactgaaaactatgccgtcacagagcctagcttcttgtagagctggtattttacaactcgcattgcttgtgaaatctcaacacatgtaagactctcctaggaaggcgcagaacgtcagaggttgcatccttagccccctgacccctcctcactccccgcgctggcacctcagggttacaagaagaactaggaaataatgccggccacggcgacccctggagagggggccggctagaacagcgttcctaagaatccgcgccacagcaggtcccgcgatgttggggccttagtgtcatcgagctagccccaatcctcaacccgatcttcaacttctggtacaccatgcattttatttggacgaaaagtaaaagtggaagaggttctctctgtatttcctctataattcacacgctgagatactgacctctgactgttaggtgatccagatggttttgcttttaattatgataaaaaaacataggaaccatgagagatagcttaggaaaaggtttagtcaaatatacagataggaactgttcactcagtcattaaggagagccgtgaacaaaggatcatttaaatgatttttttttttcaaatagaaaaactaaagaactgaactatcacaggaatttttcttcactgcagaagctgagatgttccagtaggagaagtaggagatatcttcacttgattggaaaataaacaccgtaactcaaggctctgctgagtacataaaaaatctggtgagattcattcctgtcattttccctgtcatttcccagcattgctgtaaaatcctgatagtacattcccaagtacaccagccattccagacccacagtcactctgctcttta

SEQ ID NO: 161320 - DNA, 1000 bp, Homo Sapiens
tttttttttttttcatgtgtaagatgcaagaagacctcttttctaaatggtccatatttattagtactctagtcagagaaatccaaagtctaccatattggaggttttctggaattccaggctgtctgttagactgtagtctttaaagccttgccttatcatactgggccaggtttgtgtgggagataggcctacagctagaccagcaaaggtgctgagagaggaaccctgtcctcctacctggtactttgtgagtgagagatactgatacagacagtggaaagaagagctggatatctcattctcatcaggaagattatacagttctatgatttgggatatgtcataggcatcagagtacaaagcaggaactgaggccaccagcctctcccactgagtatcttgcatttggaagtcacttgtgggactctcagtgaaggtagagttccatgcccaattggaagggtctaagagctgaggtggaagggagctgtagaaatctgaaaccacgggagaaaaagcataagcactgggggatgttctgggggaggtgggcacattcttcttggatggaaggtatctggtttggttgctttgctgattgctgctgctgctgctgctgctgcttcaatttgaatcgccggttcctaaaccaaacctgggagtgggggaagaggggagattgtggtctgttcttggagaaggcattccaggcttctcctgagtgaaaacagccaggttatcatctcacatcctctccaatttaccatgacactgggttctttactgttgactctggtaggttgagtttcaaagctagtttctcctgaagatttctgtctgggaacatggtctggctaaacagagcttctagttctttatactgttggcgggtgaatgaagtacattcttgatgccttctccatattgctgtagtcccagatacttgggaggctaaggtgggaggatcacttgaacctgggaggttgaggctgcagtg

SEQ ID NO: 161321 - DNA, 1000 bp, Homo Sapiens
tttttttttttttttttttttttttttttataatggcaagaaaacattcctaccaattttatttatccaggcatgtcttaaatatggctgtttgttacatacagtgattctgcagacatgttgacatgacagtgaaatacataaatatgtaatgagaaaaggcttaactgtggataaaacaaagtcattacaattaaagactcgagtttttggcatttccaattgtagtcagggcactgaggtcaaatttaactacaaattttgcattgtctacattgaacacatgattcttaaaagcctcatgttttatttcagaacaggcctcaggaagttgcagactgtgcaggaggttgtttagggcacaagtcatttctcccaatattaacttataggcagtctccaaaacaggaatattcttcaagctgagcattgcttgataaacagcatgggctacagcaacaacctctttttctttatgataacgcaagaatagtagtttagatgatggtataaacagtttttctacaaatgatgatggcagtttcgtatttatctgttcaacaatcagcgtgagtaaattcaagactgagatgatataattggtaccacaagtctggcaattctccagttggtctaatccatatgtaatgaccatgtcacaatgtatagtcatgctaggatccaagctgccgagcaaaacaccaacacactcattagcagctgtcaacacagcctcagaaaaaaacacctggtttgcagccgtcacacatctcattactctgtacagaacaactgttacgtatgcctcagtaattggaggacccgaattgggctgaagcgttccccaatgatcctcagcacagtactaaatacccggagaagcgcagccagctttggtgatgacactgatggaggagggacgtcttcatccactgattccccagaggccacatggctgaggtcctcagcatatgcttccatgtcttctagaaactgacca

SEQ ID NO: 161322 - DNA, 1000 bp, Homo Sapiens
tcagctcaacctccgcctcttgggttcgggtaatgatggttccacgtcagcggccctccgcctcttgggtttgcgtgacggttccacgtcaccgaccctccgcctcttgggttcgggtgatgatggttccacgtcagcggccctccgcctcttgggtttgcgtgacggttccacatcaccgaccctccgcctcttgggttcgggtgatgatggttccacgtcagcggccctccgcctcttgggtttgcgtgacggttccacgtcaccgaccctccgcctcttgggttcgggaggtggttccatctcagccgccctctgcctcttgggtttgcgtggtttttctgcctcagcctcctgagtagctaagggaggtgtcttgagattatcatcggctgagggtggaagcggcccccgcagacgctcggcaggtgtcttgatattatcatctgctgagggtggagctgagggtggaaggggagtgagctgacgctcagaaggtgtcttgagattatcatccgctgagggtggaagcggcccccgcagacgctcggcaggtgtcttgatattatcatctgctgagggtggagctgagggtggaaggggagtgagctgacgctcggaaggtgtcttgagattatcatccgctgagggtggaagcggcccccgcagacgctcggcaggtgtcttgatattatcatctgctgagggtggagctgagggtggaaggggagtgagctgacgctcggaaggtgtcttgagattatcatccgctgagggtggaagcggcccccgcagacgctccccgcagacgctcggcaggtgtcttgatattatcatctgctgagggtggagctgagggtggaaggggagtgagctgacgctcggaaggtgtcttgagattatcatccgctgagggtggaagcggcccccgcagacgctcggcaggtgtcttgatattatcatctgctgagggtggagctgagggtggaaggggagtgag

SEQ ID NO: 161323 - DNA, 1000 bp, Homo Sapiens
gcagaattaagaatttatgtatgtcaaaaagcaccataaacaaaatttgaaagcaaagcacttggaaagcatatttgcagcatttcttgacaaaaataatattcttaataaaattacaaattgataataaacataccaatatcaaataaatagaaaattcacaaagaaagaagtacaaatggtcaataagcatatgaaaatgttattcgcgaagaatcaaagaaagttaaaataacattgacatactattatcccagctaccaaattgggaaagatttgataagtgatgatacctagtgttagggtgcaggaaacagggtactctctaggatccaaataggagagcgttttggtacaaactttctggagggtggttggcaacatgtatcaaaattcttaaaaatagccaagcaagtctcttcttggagtttatcctaaggaaatcgttatagacatgtgcaaaatttagctacaagaatgtcagttgcaacactatttacaatgaagattgggaacaaatgaaataatcactatttgaggattgatgataaaaaaagggtccatccatacaatgaagatgctgttgagaaagtttgatatgccgaaaatgttcgtgatattattaagtgaaggaacagaaggagcaaaaaacaaaaagtgtccaatatgctgccatttgtgtgtgataaaagaatatatacatatgtttgacaatgtgtaagcatctccactaggatgcaaaataaattagagggaaactagatgctggcagacggggtagggagaagatttacttctgactacagagcagtttgtactttttgaattttgtatctgtgtaggattacatattctaaaatataaatacacacttgaaaagttattaaagagtatattcagtgtatccagtttttgtttaaaaaaatccacaactgtgtgtgcgtgtgtacatttacaccaaaaagaactaaaaggtatattcaaaagaatacacgtttgt

SEQ ID NO: 161324 - DNA, 993 bp, Homo Sapiens
tgaagggtgagaaatttattcagatttcttcataattccccccaaaagctccaaccacgttgccagtccttgggtgctgcagttggtcggggagaggggctgtgtggaggtcaccttctggtagacggagacccgcttttcagactctgtggcgcagcaggcgggccaggaacatttgggccactattgctcttagccctgccgcgcctgactttctctcctctactttccttccgaccgtagggacaagtgtggggatccgctttgggctccaaggccctgcccgcactggcagcaccaagcgggtgtagaatgactggaaggagcagggaaggaagatgggtgtcaactgtcccggccagtggctgcgtgcatgtgtgtgtgaacagggaaaaggccaccctctcccatgtttctcccgtctcctcggttctcctcggagacccgcagggctgcccgaggtagctccgagttgccctgggtcgctggggcttggtccgcatcctcctccgctagtccgctcccgcgttccacagcgccccgccgctcggtgtgcacgcactgcggcttaacccagccgacaaggcacgcttgccaaagaggcgcgggtgtgtgtgtgcggggtccgcgttcggaggccaaaggagggtggcgtggtagagcccttctcctcctggccgcgacgccttgcccactctcctgccctaatctcggcctgccagcaaaagtgacacctgagcagggactggtccgtagaggcggcaggcccgctggtccggcagctggaagaaaacagagcaaggggcggggacaatgaggaggagcgggaggcgggacaagcggggaggccgccacctggcactgagtgatgcgccctctagccaatgaacgcgaggaactccggcgtcggggcgggaggtcgggggcgggctcagtggggaggaggaggatcggcggccctgcctctcctccctcgcccccggccttccccat

SEQ ID NO: 161325 - DNA, 1000 bp, Homo Sapiens
gacatgatgagtgcatttaatctacaatctacaaaactatacaaattaccaattatacatataatccatttacattgaagctccatgaggtggtactgaataaacactgaggcatcaaattttcaacaatggaacaaggctcacggaacagcagcacattcccaccttttagtctagcatcacaacacttcccctgggatttgtacttatttatatattatctaagtcctaggaagttggtaacaaaaattttaagtcaaaaggataatgaattaaacactccctaaaatctattctaaaacatgcgtgtgaaatatgaagagatcaagcactttgtaaatgtgagattttacagtcacgtgttcctttaaacttatactagtatcttcactagtatctgcacaattttctgtaattaggcttttcactaaaacttaatagaagaggaaaacaacaaagaaaaaaaccttatttgtaaactgtacagtcttagaaaagtggtactatttatttttaaaaccaactttctctgctaaagaaatcacactgtgtggtcatcagaacagtttaagtcactttggcaatacagagatttatttacccttattttgaataacaataatgatgatgataaactattgtcacggtcatataatttttcagaacttacgccaccatggaggcaaatgtgtacagaatatttctaataaacctaaatttaatcacagttaaaatttctcaaaagtattttcaagtgctcaagaatattaaagtttggggggaaatacctaagtcataaataagcaagtattccctccaagattcactaattgggataaaagtctcagggtaagcccacaagaatggtctgcaataaagaaaaatcaggtctgtgtagagtaatttctgccatctttagcagaaaagccaaaaacattctgagccaaataaaagcaaagatcttttgattcagcgccttttgttgtgttagttttaattt

SEQ ID NO: 161326 - DNA, 1000 bp, Homo Sapiens
ttgttttaaattgtttattttttttttaaagaagtctgtcttcagagtacaaccaatgtgattaattgtgcctttaacaaagtcattcaatgtctaaacaaattcagtatctgaaacatcttcatgaggaaaactgaaggaaaggaatttaaaaacacagaccaggaaacaatcacaaaatataggtttaattactacttttaaacttaaaaaaaaataaaaaccaagaaaacaaacataggtactccagtaagacttgctactctgaataatgtaacattttttctaagttctataaatatatactggaagttttagaacacatacagacgcttaggaaaagaaaggctagttccttggaaatgacgatccaggatgatacaatcacttgatgacagaaggtaagcctttcttacaattagattttagcagataattttaccactaatataaatgggtgatgtgtggatcacaagttctagaaggcgaataaaaatactgactccaggtaatttctggatactacaaaaatgaagtttgcttgttttttttagaaccaaaaatactatcttgtaaggtacaaagaaagcttgatattaagtatgaaaacataagcataacatttgtaactaatcacacccatgaaagacgactagatgacacctgaaacatttttcaaaatactgtaacacagatgagtaatattagtataaattttttatgtacattaagatctgtttcagtttgctggtgtgaccaaaccttagaaggtaatcccaagggataaagcagaacataagagcagatatttagatattagtacaggctcaatttgatgcaatcataaaccttcaagatttctagtcactgaaaccccattgtaggtagtgttctggagtctgctataagtaaatctttaatgactagatgttttccttaccatctacactgaatggaaataccatgaatatagacacattttaagtagaagactgacgtt

SEQ ID NO: 161327 - DNA, 1000 bp, Homo Sapiens
tgcaagttcatattttatttccaataggtttggagctttgttgatttttgcatttttgtaaaaaaggaaaaagttttcacttaattcattgaaagccctttcgtgctgagcccaagggggagcctgggccaggaccagaccctctcagccctcttgttcctaccgcagacacccggtgctgggggtgcggctgctcccctccgcccactctgccctcccgcccctgctgcatctctctctgtacagaacaatttttaaaatggaagctaagacacaatatacactggacaggcacacacacacgcacacaggcgtccgcccagaacagggcgggacaccagctgcactcagagagcaccaaggaatgcaaacggagcccctccgggtaggagggcagggcctgggcccccttggtcctcagtcctcagtccgcactcctccccgccaattgccctgctagctgccagagaggggagggggcagggagagctgggggcagctggttgggggcggtggtcatagaatgagtaccagcctggtaggcggccctggggccagggaggctcttgtggggagtccggggaggggcggcggggggaaggactgagggtggaccctcaggaacctgagggctggaactcctgggccttgcccctcaaggagcttcaagggcccaggtgtcaggagtggggctggccctgcagcactggcctccagcccttgctgttctccccaagactaaattaacatttggtaaacttaggagctaagccagctgagacccccagcactccccctcgggcctccctgaggccctcacagctgggggccaggcctgctctgggggacccacgtcttccacactccacccttgccctggcaaggaggtagggggagcagggcctgccctgagggcttctcccttccccttagtgccttccagtcccacccttccctgctcaggccccaggaagaagttaaaaatagttagttcctacat

SEQ ID NO: 161328 - DNA, 1000 bp, Homo Sapiens
cttgtcatctttattcaagtatttcacagcagttatattacaaattacagtaaatgttcaaattccagaattcaaaaattaaataatttacttcaactaatgtcaaatgaagtcaaatgcaaaacatcaatttaacacaattctaaattaaaactacaaacccaaaatagaccatagttgatgaagtctacttaaactacaaagtagacatacatgactgaaaccaaattggactcccaaagtctaagtaaccagatgtacagaatacaaaagatgcaggtacaagcccaaattcaagcttacaatgtgattacaaataataattataataacaatggcattcagctacgggacctgacactgaagatacctactgaatagcaccatagctgaaccaacttaatcaaaaaagggaagaaattacccactccctaaaaataaaatccagtaaacctacaaatacattggcttatgagaaaaatcaagtcatgaaacaacattaaaaaaaaaaaatcacaggtgagattcaagctcgaaaacacaattaactccacagccatcagtttcaaccctagtgcggttccatcatcttcaaaaagcccccagggtccccacagctgagcatgaattattgctgagctatgctgtgatacatattttactcatctgagagcaaggttttacataggagcttatctttataatgctcacaataggaaataagaacagaggtcaatttgtacatatttttgccaatgctatacagcaaaaatgaaaaacttacagaaaggtaaacaaaattgagtccacttttttaatttcacaagctgctttaaactatagaaccaccagatatctgtaaaataagcaaaactggtaagtgtgtttttttaattgagggaaggagggccagaggagttggtacaatttcagctcattgttctccccttggcattagattgactttctctttaagacctaaactgttcaaagtggcagt

SEQ ID NO: 161329 - DNA, 1000 bp, Homo Sapiens
tactcaatgctcagggtttatttgcaaaactgggctgggttgagcagagggggctttgggatgctgacccctctctgacctggccgttgcgacctcagccctgagttaccctgcagcaggcatggacaggcggccgccttgcctgtcgcagcttcctggcagcagctggccttgcctggaccagcctgtctgccccagcggccggacgtggccagctggaatccgtgctgcgcgggcgctccggccgtggcagggacacataggcccgcacatgcttagtttgttccagggcgtcccagtgacatcagggaggggcaaggccaaggtgggccacaggctctcccagggtaggactcctgagtggcgccctcccgaaaggggtcctgctggcccctcacccttctggggccggtttcacccacggggtgggcagcaggagcacggagcgcggggtgccacacacaggccggggggctccgcagaggaggcccaaggttttcatgatcagacaatgcacatcctggctccaggtggacagagcatggggatggaggcagaacgttctcagacagcagtggcctcctgggccgggaagccacgggtgtgtgggggagccatgggcgcagggacacagaagggcgtgcagccacactcatccacgtgggtgtaggtgtgcaggatggctgagccgttaggacagtgcaagggcaccgtctcctcgtggacccgcctctcctggcagcaggtgcactggtgctgcatggcctgggcctctgctgagtacttggacgctccggggcaggagccctcgcagaaggtgatgttgacctcggtctcgcagccctggtgccacaggatggtcgtgttgatgcggacttgacaggagtcctcctcacaggagtagcagcagccggttttcctgaggctccccctgcagctggacacatctgggcaggatgcaggctgtggggtcagcaaatggactccaccctcagcctca

SEQ ID NO: 161330 - DNA, 1000 bp, Homo Sapiens
gcgaaaatagtgggaatatatttgaaaagacaagtcactatgatgtttacagtacaacctcagggcccctccgcacttggtttgcgacactccggaggcgttttgaatggcctacaacaccttccagagaggcggtctgggcctgatttggtctctttcaaatatcaaaataaaaacttttgacgtacacattgcacccaagtaaaaactaaacaatagagcaaaacaaaccatggatcttcaagatacttatggagagaagggtgagaaggaagccctctcaccctttgacccaccttcacaggcacgacgctgtgagaggacacgtgcgtcccaggcctgggttgggtcggtgcatgagggtgccctggccagggcagcggctctgcagccccagccctgagcatccccgtctggcagcacagacctcaggcttgcagcccggcaggggaggcagggagagcgccgccatgcaggtgcccgtgccctcgacaagccatggtggggcctccctgaccccgtctgtcccacccaatacccccattaaaaaaaaaaatcaaggaagcctgtattcacattacaacacaaaaatagcaccagaaacttcagagtaacattgcaaataggcggagcccagagctccgtacagcagggaggctctagagggcggccatggaggctgggagggaacgaggagggcccgcgggagctggcacaggggcggtttcttcccagttccatacgggaacccggttcctggggtcaaggtgtgctagagatgggcttttctcccgcagagcaaatggaggctggcatgaccctgtggtcagagggaggaggcatgaccctgtggtcagagggaggaggcctgttgtgctcttgggggaccaggcggctcagaagcaacccttctaagtagtgagcactgccttcccccacgtggtttctaaggtcactttggaattccagcaacagcagcaagactaagagggaacctacc

SEQ ID NO: 161331 - DNA, 1000 bp, Homo Sapiens
ctagacgcaggtgatcagcacagccatggcactgggcaccttgatctcctcgaagagcacgcggccccgaggggcctccgcacccgccgccccggccgcagctctcagcaggtcttgagtgtgctgcaagagatgctggttccgctggcggcccagtcggcgcagcgccagaatggccagtatgtggtcccgcctgatgtcggggtagctccggataagagtctccaggtgccgctggatgtcatctttgtaggtctcgcccaggatctcagccacgcactggatggcttggtccaaccatgtggcctcggaacccaggccctggaaggtgtcgctgatggcctgggcatccaggctcatcttctgggagccatgcatgcgctccatgccccggaaccgctcccgtggcctcagcgcccgcgccaggtactcgcggaccacgaaccggtgcacctcctgcagagtctcctgtgcccgcggccgggccacacgctggagatgaccggcgaaggtcaccaccttgtccatgaggggatgcagccagtcctgcgtcagccagtccctggtgcacacaaccctgaagagcggctgcaactcacgctgcaagccctgaagcaagtgcttctggaagctgcaggtggccgtcaccaggggcttctccagctcctcttgggttcctgggaacctggagagaagactggtcctgagctcctcgcaggcgttgatgtaggcgcccaggtgcggctcgctcaccgcctccgacgccagaaaagccttttcaaacctgggcacgaagaggccgagcgcccgcgtgcagattcgcagggtggtggcctccagctccgcggagatggcgccggccgccttcacgtgctcggccacgagcatatggacgtccatggacagcggcgcctggtagaggccctgcagcacctcggggacctcggcggccgcccagtgactctgctccagctgcaagatgctgtcgaagcagcttgcg

SEQ ID NO: 161332 - DNA, 1000 bp, Homo Sapiens
ttttaaggtctcatacttttcttttttaattacttgcccatcaaagtcagatttatcttgatattgtttattgtttacggttatgacacattatatatatacacacacacacatatgtatatagttacgtacacacacaccaatggcactgattttggtacacatcagaattacttaagagagtttgttaaaaatggagattctggagccccactctgtgagtctggacgataggtcctacatttttaaatgcccctgcctgcccccaaggtgtttttatacagatggtagactcactctgaaaaacactagaacatacattcttaaaatatcaaacattgaattctgggtatgatcattcttttttggtcagggacaagaaaaaaactgtcaaagacaactgagattttgagtccaggtagccggaggaggaaaagtaatacttacaaaaataaggactggaatgaaaaaggaagatgatggaatacagactgctttttgaactgctttatgcatttcatattatgaaaagagtatttttcctaaaataggtgaattgccatgctgaccgtaacttttaggctgagacaaaacaatattcaattagaattctaatttccattagaaactggtaagtgtaaaccccaaaaggcttacagaaaaagtaaatcacaaaaatacaagcttgtaaagcagtgttcacattaacctcagcgaaaacttttaggattcaaggtatgaggcaaaagtcataatggttgtcaggttcaggagtttggaagcgcatatagtgcctcatctgctgttccctagtctttctcttgatttccatcatctgccctacaaacctttctacatcatctctcgcttcattgtgctcaatatgcctattaggtatggcccatcgaaaattagggacaagtcgcctaactcgcccccgcctgatatttcctccaggcttctggccttcaccccctcccaaatggcgggattcttcttc

SEQ ID NO: 161333 - DNA, 1000 bp, Homo Sapiens
cattttttacctttatactttttaatatttttagtttatgttctacagcagagtttctattactttcgaaatcagaagaaacagatttttttatttcttttaaagagaaaacattaagatgacttaatgtagataatttgtttcaaactagcattcagttaacatagttttaaccagtttgtattacagtaaataaggccgatgagtataatcggtttcattttcagactggtaagcagagggccatttagccacccaagacttatatttaggatcattcaaaatacatcagtggttgaacctccatatgggtttttctgttgcactgagtatataacaggtttaaacttatgtattgatttataatacaagtatagtgacatttaattttaaatggctcttcaagtttttagactggcttgagagaaaaaaacagaagggtgtcttttttccctctcatcactattaatctaattgtaacatgtaatattattttaattgtaattattctaattgtaacatgtaattgcaaagcaaatatctcctaaaggaatatggagaactcattaaacagtgtacaattcttgatttttccatccatacaagaaaagatgcacgtgatcacctaaatattcgcatttggtatgaaaatgcattaattgtccctcttggaaactcataatagctttttgcttgtttttttctaactagataccatacatagttatgatctaggcaaatgctagctttttataactaggtatcaattcacagcaggtaaaaaagttccaagaacaaatcaatttagagtaaactgtaaatttccttcaagtaaaatccatatatgaaataactctgacagagaaaatataagacataatccaaccccatgaagactaaatctgaaagggcaatatgatttgggtttctgtggttaaagaaaaactcaactgagtaatttattaaaaccaagtgtaggcaactgagaggaaaaaaggaa

SEQ ID NO: 161334 - DNA, 1000 bp, Homo Sapiens
acaggtctaataagccttccttggagccaaatgggcaaaaatgtaaggattaaatccctcgcttggaatcggctaccaaaagctttgtgtgacaagaaacatttctgaggcctgtgtgaggcctctctgggcaacagacaggagcagcaaagttgcagcgtgaggcttttggaggcacaaggccattcggggggtacccgtctcagcctagcgcctgaagccggcatgcgccttttgtgtggatgtggtctgtgttgttttgagccttgggacacttcctgtcctgcaggaacttatgcaaggacaggaccctgtatttctggaatcttctgagtgttctaagataggggcatcactgtcatgacctgaagcgcctctgcgtggtgaggagagcctctgcttagttagcgggcgtcaggtaccatgtgggaaaacactggacaactgaggtaaaacttctcctgggcaaaagaccccggggaaagccaatttccatgatgatgaaatttttgagtaaaccataaatcctaacataaaaggaactagcaaaatcaatgcagatcagattcctcaattagacaattgttttgccagcccctttgtgaatcatgcttgggttcataaatgagaagaaacaacttggggtgcagaagcaagctgccctctgccccctccctgaaagcgcagaatcttttcctgctgtcatctgcccagagcagccacaccagtgcccacgtgtcagtgggttcatctctggtttttggtgactttttcttttcttctttggaagtccaaggtttgtgaggtttcaggacaagatgatacagcctagtttgagtcccatctgagacacggtagtgggattcaccatgggcttcagaagtccactaatgggaagacctgctgagggcactagtacagcaacgaaatttcctggagattctgggtttagtggctcggggcagaggcaggagagggtgttctgtctcctcctcactca

SEQ ID NO: 161335 - DNA, 1000 bp, Homo Sapiens
acaagaaattatttttatttattcaggactcagaaatgtgtaaattttatacttgtatataatttttattataaaaataaccctgtagtcaataacaatcgtatattttaaaaaaactaaaactgtacaattgaactgttcataatacaaaaaataaattctaaaggtgatggatacctcatttaccctaatgtgattattacatattgtatgcctcttatcagaatatgccatatataacataaatattatatgcctgaaaaaactaacaaaagtaaatttaaatgggaaaaaataaataaaaattttacctacagaaacaacattccttatttgcagtttaaagccactggaaaaaagattagtactacagatgttagtgcattcttttaccaaatagtgtattgttaccaccatttattttatttacttatttattttttgagagggagtctcactttgtcacccaggacggagtgccatggcatgatctcggctcaccgcaacctctgcttcccgggttcaagtgattctcctgcctcagcctcccgagtagctgggattacaggcatgcgccaccatgcctggctaattttgtatttttagtagagatggcgtttctccatgttggtcaggctggtcttgaactcccgacctcaggtgatctacccacctttgcctcccaaagtgctgggattacaggcgtgagccaccgtgcccggccttgttaccaccttttacctacacccttgagtaaggtggactaggttaaagtaagtggaataatgtgacttgattgaatgcacaatatttaaactgttaaaaatgttgaattaagaaattaagttcacacataatctaaaatttttaacatgtactgcattttcataaaagtaaaattagtaaaataatatactaatttatttttaattttaactaaaactaaaaatttgtctctcaatataatgcagaatattactcagaacacctacctcatgca

SEQ ID NO: 161336 - DNA, 1000 bp, Homo Sapiens
gagctgtagcacttttattgttccttgtctctctacccctgcccagggtaagggcaaacgccttccaagctgtccaagggcacccgcctggcctggttaggttctcctagttgcctgcagaggaatgactccacatggggctggggagagaagggggtaccaccttcctctcccctggcagagcctggacaccagtacacaaagagctgggcccccaggttctgccctaccctttctgggccttggttagggctgtcttggcggcaggaaggtgggggtcagctaggggtggggcacagcgcggcacctgaagggaatgctgggatttgggatagaaggtgggatgtctcttatggggaagaggaaagaaagaggcttctgccaaggctgacatggaacttgctgagatgggcagaggcaagctgggcagagggcaggaaggaggagggacaggctggaggaaggcagtgttggtgaagtggggaggaaaggaactggtagaaacagggctgttcaagagagacaaacatggtccagtggcaggagagaggagaagcctggcaagaaggggcgtagaaaggtgggaacagctgaccaggagcagctgatctgagccaagcagttccagggctttccagccctgggtgtgctctacccctcccctcccccatccccacctcctacgtatcccaggacccgttgccaccccaagttctggaaagcctcccataggtgtggcttaacccatcagctcccaggcgccctcaccctcctgccgctgcccagttggctttactcaccctctaccagcagccgtgtgtgggtgctgtcctggccggcctggcagcagtaagtgccttggtcctcaggtcgaacgtcatggatgaccaggctgtgggtggggccgtggctgcgcatctcatacttatctcccgggcacagctcggccccctcccgcagccagcacacgtggccccccgagcgggacacagtcacctcc

SEQ ID NO: 161337 - DNA, 1000 bp, Homo Sapiens
ttatctcatccttttaatatgtttattggatatgaatattttatgatgcaaatgacattagtacaagcagtctacgaatagagttcaatagtcacacacatatattggggtaagcacaaaatatttcgactagaggggtgcaagcaagcaggtttggagagcactgacatgaaagggtgatgcaggtcaggttcacaattaatgaaaaaacggagaaaaagagggagtatggcaaaccataggctgggtcatgccccaactcgcagtgggaagatgcttatttagcttgctgccatgcgaggatgggggcctaggactattgggtgttctgagttctaaagaaaaatgcagaccttggcttggcgcggtggctcacgcctgtaatcccagcgctttgggagaccgaggtgggtggatcacgaggttgagatcgagaccatcctggccaatgtggtgaaaccccatctctgctaaaaatacaaaaattagctgggcgtggtggcacgtgcctgtagtcccagctacttgggaggctgaggcaggagaattacttgaacctgggaggcagaggttgcagtgagctgagatcgtgccactgcactctagcctggtgacagagtgagactgtgtctcaaaaaaaaaaaaaaagaaaagaaaaaagaaaatgcagaccttttaattttatgtgaaatctcccaatttttaaatatgggcacctaatgggatataacaaaaaatgaacatcataggggctaaagaaaacactgggctggatggcccgagggtgccccatctgtgacttttaaacaccacgccctcctggtctatgttatttcatttatttcatttaatctctgtaatgaccctgtgagacactgcttcacttctcttttaccaatgaggaaactgaggctcaaagacaccagggaatgaatccaaggtctgagagactcgagtctcaacacgatgagaccctggctgctttgcttaatgtgacatt

SEQ ID NO: 161338 - DNA, 1000 bp, Homo Sapiens
gcatttcttaactgaaaatatattttcacagaaacaacaaagcaaaggggataaaaacaatagcgaccagaaaagctaacttaggtgaatggtgccactcaaaggtctttccgagggaagctcagtcctggcttgcgagagtcagccttggctcacctcataacggggctccaagctaaggcgtcaaggaagcagtcccactgcttctcgctgtcagcaagaccacaaggcagatgcccactgctgtcctctttccttgtctactttctcatctaagtgtcgtaagacagccctgcactggtccctgagtaacagagcagctgtcatgagcacaggctcattttatccgagagcattcttatctttgagagaaatgagaatatgacaaggagaactaaacagcagcaggcctagcctcagcagcctttctgagtgatgtctagtcctgacgactttgtgatttccaaagtcgtgaacacctccccacatgtggggtgaattccaatggtgtcatcaagtagctgttttgtgagcccacatttcattgcagctgcaaatccttgggtaacctcaccggcgtttggtccaagaatatgaaatcctatcacccgatcatggtcgaatttattgcagattatctttgcataacaagtgttgttctctctgccagctactgtccattcaagaggccagaacaaagtatgatatatttctagattctcttttttatatacttcaatagctttctcttcagataatccacagcaaccatactccagaggagtaaacactgtagtcggaacattaatataatcacacttttctaaagaggccccaaaaagtctctgagctagcagcttgcctgactgtatggcgacaggagtgagctctggcttatcctccaaaatatcaccaacagcatagacatatggcacattggtctgttccacatcatttacaggtatttttccactcttctcattaattttgacaccaatct

SEQ ID NO: 161339 - DNA, 1000 bp, Homo Sapiens
aatggaaatgttcatattcatttttttccccaaaggaaaaatttctgaatcatcactatgttgcacagtagaatagaaatatgaattcaggtacttagtcaagtttctaaagaatgcaaataacagacatgatttaacttccaaaatctgaagtcatcaacatgattttgtagtactctatctcaggttttacctaaaaattcgttattattcagataaagatagctccctaatcacatgtttttaaaaagcctctgccccacgacaacttcctgagatctgtgaagaaactgcagtcttgtgatcagactccatataggactggcagttttgtaatcgtagggaaaaaacggtgactgattttacgtgtcaatcagttgtagtctgctgatctgattagaagccttgacaaatgcctggtggcgattgcaaataactgccaagcatatagggatgatacagtagcccactgttttgggatcagctcttgtacaagagtataggaacaaaaacatctgtaagtaaggtaccagaaaaataactgtccacacccaaaaaggcaaggagagtaattgagctttcaaggagtgtgtccatgtggttccttcaaggggctcctcagggtgctgttgaatgtgttccaaggccagcctgttgtaagtctcactgatttcaaaaacatagtaaaatgctgctgcactggctaacagatacaatcccactccaatccatcccatccgctgacggaagttcatcattctccatgctctgtgcaatggtcccgaaaatcttcctgttcccacggcaagcgttaaagagtcactcagctctgaataatcgggtggctttggcatttcagagaaagccaacataaaataaatcccctgggtcacccggctaggagaaaggtgagcgccgccagcctggagcaccagctactagtgattaagaacggcgtgactgcggcgggtcacgcgcggcccggcccccgtcgccgccg

SEQ ID NO: 161340 - DNA, 1000 bp, Homo Sapiens
agtattcacttaaacaaatgtttagctaaaattttattaaaaactttcagcccacccggacacggaagactttgcttttacagcagctaaggtatgttttcattaccccgtgagtgatgctaatgcattgcaaatagttattatgagtttatgtagtgcttggtgcctaaaataaatttcatttaaatatttaaaataactcctgaatataagcaatttattctgattactgataaaataacattcacattcaagcctacaaatctgagaaatcattattccatatgcacagaaggccacagtcagtagtctaatagtactgcttaccagtgtagtgtaaacttctttcagaatcagggaacaattctagatcagccatggtgagaaataagtgctcttctcttaggccagcgacacttccgatgggtcttgacatcccacctatgggctggtgtgtgaaactctcatctctacgtccctccccagttttaagagtcaccatgtcacataaaagctccagcatcagccaggcacggtggctcatgcctataatcccaacactttgggtggccaaggcaggtggatcacgaggtcaggagttcaagaccagcctggccaacatagcgaaaccttgtctctacttaaatatacaaaaattagccaggcgtggtggtgcatgcctgtaatcccagctactcgggaggctgagacagagaattgcttgaacctgggaggtggaggttgcagtaagccaagatcgtgccactgcactctagcctggatgacagagagattctgtctcaaaagaaagaaaaaaaaaaggctgggcgtggtggctcacacctgtaatcccagcactttgggagtctgaggcaggcggatcacgaggtcagaagatcgagaccatcctggctaacacggtgaaacctcgtctctactaaaaaatacaaaaaattagttgggcaaggtggtggcgcctgtagtcccagctactcgggag

SEQ ID NO: 161341 - DNA, 558 bp, Homo Sapiens
aggctgtgactgggttttactgaggtaaaaggtaacatcggcagaggccagcccgcctcggcctcattagctgggggaactcgaagtacagtcagacagggtggggcaaattgactcatgcctcctcattctgtgttttttcatgggaaaattccgatgtctgcttgaccgcccgtggtgattcattttattccatatgatgaacatctgattttctaggaccttcatcttcatttcactgaacaacagccgttggaggatctcgtcctggagggcaaagcaggcatgcgttctattgacttcttttgtgttcacggccttgctgttcttggagtcgttttcagaagtctttggtttctcttcctcctgctggggctctgggagggtgagcttgtgttcatacttgaccaaccagttgctaagcaacagcagaaggaataggaacccaaacaaggctggcttatagctcatcagccaagctgccactgctcctatggtgcctgcggaggcaagtatcccatggagactcctaaagagaaatatcagttctgccagcat

SEQ ID NO: 161342 - DNA, 1000 bp, Homo Sapiens
gagatggagtcttgaactgtcgcccgggctggagtgcagtggcgtgatctcaactcactgcaacctccacctcccaggttcaagtgattctcctgcctcagcctcccaagtagctgggattacaggcacccgccaccacacccagctaatttttgtatttttagtagagatggggtttcaccatgttggccaggctggtctcaaaactcctgaccttgtgatccgcccaccttagcctcccaaagtgctgggattacaggtgtgagccaccatgcccggcctcctgtatgccttttctaagtgaggggaggcgtcaggaccagggtggcttagcgtcaaaagaatgggggaggaagtacatttgtagtcccttctccaagccagtggttctcaaatgggggcaattttgccctgcagggaacatttcgcaatgtctagagacatttttgggggctgtcacaaccaggggtatggttgggggatggcactactggcatctggtgaggcccgggatgctgctcagcatcctacaatgcaggggacagtcccctcaaaaagaatcacctggccccaaatgtcagtaatgtcgaggtggagggtcaatctctaagtcaatcttcagccatgtccagaacatcgccaaaggccccttgcagaggagcatagaggtagccccacacacctcttctacaccaatttccaaaaagaagtttcctccccaggtctcatcttacaagacagtttggagggatagggaaagaagaagaggagaccattccgggcaccagcaaacaaagatggctcctcctccaccaacaacctccacctcctgcaagggaggaacgccagacttgggcaatctttggtcaaacaggaaaatgtaaggctgaattgaaggggtactccctccaccccatctgcccagaagtaaaagtcagggtagtttctttgcgcactgaactccacgcttgtgaacagacaccaggaccccgctcccggg

SEQ ID NO: 161343 - DNA, 708 bp, Homo Sapiens
tcagcggctgtcacgggggcggcgcagctgccccatcatgtcggccagcatgcggttgcacagcgcggcgtaggggttgagcagcaccagctggcgccgcgcgaaggggctgcccagccgtgccgccctctcgaagtccctgcgggcgtcgtcgtctcggccctgcagccgcgccaggagtccgcgctgcacaaagctctggcgggcggcgcggccccggccgccgctcagctccaccgcgcgttccagatcctccagggcgcctgccacgtctccctggagtcgccgggcctgggcacggttgttgtaggctgaagccctctcaggcagcaggcagatggcttggccaaacctctccagggctgtgctgaggtccccagcctctgctgccatcaccccctgcagctccagggccttggactgttccagctgtgcttgagggaaaacttcatcttcttctcgttcttccttttctgcttcctctccgaggtccaatccaacaatgtctccaaatggggtgtcagggttgaagatggcctgcagcactgcctgatcatttggagtccccatggtgctcaactccaaaatcccaaaaggtgactccagatgagagaagagggagggacgtggtgagggtggagcctccagcaggaagttgatctgaaaggatgaggaccaccccttcgtgaggagtgtctccctgtccat

SEQ ID NO: 161344 - DNA, 1000 bp, Homo Sapiens
gggacagagtctcattctgtcactcaggctagagtgcagtggcatgatcttggctcactgcaagctccacctcctgggttcaagcgattctcttgcctcagcctcctgagtagctgggactacatgcgcacaccaccacgtccggctaatttttgtatttttagtagagacagggtttcaccatgttggccaggctggtcttgaactcctgacctcgtgatccacccgccttagcctcccaaagtgctgggattacaggcgtgagccaccgtgcccggcccaggacttttaaaacaagcatcccaggggattccggtgcctaccagaagtcgcaagctgcttggctctggagggcgcctaggagtcggtgtcgcctgccacgacactgcaggaaggtgggctgcaggatgggggggtcagggaaccccgaagcacagacgggaacgtccttgtccccttggacgacccagggcccggggcgccctctggtggcgaatcttctcacagcctgactcaggatgcccccagcgctccaggggcaagaagagcacgaggcagacgcggtgggtctctgagaacttaaaataaccctcaccacgtggcggggtgggcgaggagggggctcacagcagaagcagagtggccccggggtgggggcgccacaggacactgagggttcacaccaccccagcctgggcctggtaagtagcaggtcagcataaatccaaccccgcgaggcacatccaaaccccacccagaggggttcaaatgacaggagtgggaacagaggggctccctgaggcttcaggccccatccccaggaagactggcccggcctcagccaccttcaagcacaggagtgaggcctcgggttccagggacgatgggggacccagcattaaatatgtcataaataggtgggcggacactgtgcggacaggcggggctcacattcctctagaccactggggtccactgggggaccagggcctgggccctc

SEQ ID NO: 161345 - DNA, 1000 bp, Homo Sapiens
gctgtatagcccatgaatctcatcggctttatcatgaaagtttattgtttttaatcctagtacaatcagctaccagttacatacagtaaaaaacagaaacagccacaaagcaatgatgatagagatagtctgtgacattgtacagtggaggaaatactctctgttggaatcctccagcagacccccgcctggcttcagcagttaagctatcactccctccctccccaaaacagttaaaagaaaaattaacgtcttgcttgggtacagcaagattctaatacctcttggggacactggagaactttaaaaaaaactaaagcagtagaaacaaaacaagaactgaaacgtggaagcaaggtgacacacaaagaagctccgcgaggccttggctcagaagcacgagtatcataatcatcggggagctgaagataatcctccattctgctggcaatggcctcccagtcacgtttccttttagtaccagtcctcaagccatccaacttgtctagctttgcctcagatgtgtccatctcccatttgcttttcggaatgtaacccagttcgctttcctcttcctctgcatctttcttttcttctttctgttcttcgatatttgcatcaaaatcttccatctctacctcttcaatagcagcatcttgcagcaaagaacgaatatctagacgcatcatgtgacgaggtgcagtttcccagtgatcagccatcttatttatttctttaagctttcttccatgaatatttctcttgccacaagtctggttatctgcactcatttcagccaaatatacctcaaatcccttggtttttgctgcactccaaaactggtcaaaatgcctaactctgtcattgatggcatccaggatgatgaagggaaaaaagccatcatccagagtctttttgaaagttttgaacatgctggtgcggtaagtctcctccatctcagcttcatattcatattccattaccttctttttcactttct

SEQ ID NO: 161346 - DNA, 595 bp, Homo Sapiens
taaggaatgattccttttatgtaaagtttcaaaatatggaaaactcaaaaatatcttctgtagggagaaaaacatacattcttagaatatattagacgaagacttttacttgtttctttttcagtttaaggatctgctgttctacttttgcaatttctcgatctacacgatccatacactctattaactcttcctttgaaagttttgaaggtgaagcattttgatcatctccacacggttgccccagaattggagaggatggagcttcatgtttgcctccaaatgctggatcctgctggtggtgggtgctgggaaacgtatactttacagagtgaggaggataatgactttgttctgtgctgaatgctccttggttgggagggtaacctgaacttgacattatcagtaaagaagtcctcaccagactgtgagatcaatgccaataaacaatcatgtttctaggaaaacatctaccccatcacatttctaccactgtggctgagctgcagtctccgacatcactgacaatcacagcgaggcgagccatgatggcacaggttccagcctccagcatgtggcagtgcctcttccttct

SEQ ID NO: 161347 - DNA, 767 bp, Homo Sapiens
caaagcttcaggtctgatttattagccactttagtttcataaaactcagcatttctattaaaataaaatgatgtccaaaaggtttgcttgtttttaagaaaattgcatttaatacagggcaagactttgttatggtttatttatttatttatttattttttaaacaaagctcaaattctcctgacttcacgcctgttactacagctggagggaaaccgatttcagaatctatctgatatgtcggatttctttgtggcatccacttcatcgctcagcagccagccatgatgtcataagcccatcagatttccggtagggggaaaacgctgcccccgggttgctgaagggtgcctcggtcacggggccgcgtctccacaggctcaacagctgcgagtccccgggactgccgacctcagccttggggatccgtcttgaccacccccggattcggaggcgcccgggccggaccacctgtgctggtctccacctcctcggcaaccccgggtcaccggagatgctgcagctcgagggtcccgcctgcaccatccatggctctcgagatccttcagagcgcggacccggccgagaccccgcggagccgctgcgcgtggctggtgcccgcggtcgccccgcagtcccgtatgcggcgaaaccgccggggctgcttacctggcccgcaccctcacgctcccgtccgggctgcgcagccgcttctctcacacattttgcgataacatcgatggcgaaagaaaatgttgtaaatcctc

SEQ ID NO: 161348 - DNA, 1000 bp, Homo Sapiens
gggtaaagatgaatatttattcactttacaaagagaatggtattaaattgccataaacagctccatttatagacaaatataactgtacattacaccagcagctggttcaaacttgctttcccaagatgcttatatggctctggctcttaagatgagcacacaaatctctgttctgtcattggtattaaaaactccctcaaagataatggttttgttttacatattcacaggtgggaaaaaataaatccatctgcccagccctttcttagaggtgagcttccatgtgcatgtcccctagtgagcactaagccaatatcggctcattctttaaaaaaaaaaaaaaaaaaaaaaaaactactactgataatttgcaaaggcttttgtagcacaccaaaatatttatacatacataaaaaatcttgagtgagacttatcattttaaaggtaaacagataccctaacactgccaagagtaggtaatgaaaaggaagaaaaacattaaattatttaattataaaaatattttctttggaaaaaaaattccaacaaggttatcattaatatctaaaaccaaagagaaaaaataaacaattgttctttgatccattagtaatttaaataaaaatggaaacctcttcaaaagcagctataactgaattttttttaaaagttgcaggtaatgagcacttctaatctatacactgatgattctttagaagtaatttgcagtcaagaaaaatccttaatatggctaattctctagttttttaatgaccataatttttgttttgttttaaaaaaatacttcacatgatagcttcaaaaataagtggttattctggggaagcactccaaatattcaatctgactcaagtcagattatcacagttaatagacaagctagggatactgaggattttttttaattaccatcatttttactccagtttgtagttatcccttcatattttatgaaaatgtaccaaattaaatgtactaa

SEQ ID NO: 161349 - DNA, 1000 bp, Homo Sapiens
aaatttgagatggagtgtcgctttgtcgcccaggctggagtgtaatggtgcgatcttggctcactgcaacctctgcctcccaggttcaagccattcccctgcctcagcctctgagtagctgggattacaggtgcacgccaccacacccaggtaatttttgtatttttagtagagacggggtttcaccatgttgctcaggctggcctcgatctcctgaccttaggtgatctgcccacctccgcctcccaaagtgttgggattacaggcatgagccaccgcgcccggccttcctggtagtttccattccatctccctgtatttttctcttatcactctcgaagtctatctttcttgttcttttcctccctagctttttttttttaaacactcctttcaagctgtgtccaacacccacaaggaatgactatttttaactaatcttactgacctcatttaatctattcaataaaacctctgccctaaggagcaaagaaacttgcagaggaagtaaggcaaactggaagaagcatactgtcagcggattaaattcttgagcaaggcaatactccttatggattcttcccatgtacaatccgtaactcttcccatgggcctttatatcaaccctaagataattacactcctgcctcaaaataaaataaaataaaacccaccacatcttgtattgtagacatcccagctgcatgttaagctgagtgaaagtaccatgctgtcttttaaatcactttatatctacttaatcatcccacagtaacccgagttgaagaagttactttggtttctcataaatgaatatgcacgtgctgaacatatcggaaagaaccacaccctctcactgatgaacacgttggcagttctcccaactgttttatcaagagaagctagaaggtaaagaaaaggaaacagagccctataggaaaaatgattgacttcacacgtttgagcgatttgggcttcagctatgactttgctggagtac

SEQ ID NO: 161350 - DNA, 761 bp, Homo Sapiens
gagagaaaagggctttacttggcggctttgggtttacaagatcgttggtgaacaatcagtctgtctggcaggaaggtacgcccacaaacattacagggaaccaactggctgtgggcacttgtccaagcagcttcatttaaagcatcaagatcatagaagcctttggcagtaatggtcctgacttctggttttttaggtactggtctccttaactctttaggcaacaagttgttttcattatgccattttttcagacattgtggctcatgaatgctaatagattttgttccatattcacgaccacaaatgtagcaaacaactgctggtggacgccgtatcattgttggcttagtgttgtggtctgtcgatgtgagagccatgggatcatagaatgctgccctgatatgcaggcatggttggcaccaaggaaagatgaagaaatgacacaggcagttggatattagtagtccagcggtcagcatcatcaaggggtagtttgtgaggtcaaggctggttttcatgacatcagcacagctgaggaggtgaactaggaccactgaatccactacaagattgaaccctgtgagaacataaggcacgatagctgattctaatctgaaatcagaccaaggattccggggggaaatcacttcctgtttctcataatttgatattctgtaaggttgacacaagacaaagcaaccacaatctggtttaatggacaaagaacatggaccaggccctatcttgcaggtagccat

SEQ ID NO: 161351 - DNA, 1000 bp, Homo Sapiens
tcatttattcacttgttgctgtatatgcaacaggaattcataatatgataatgcagattctgttctgtcttctatcatgttttgaaggaagtttgctttcattggactctcatcccttattacataaagtattgggaaaaatggtctctgctctctaagccaagagatgaaagctattattctggcagattctggtgtatcaagttctggaaggtctgtcataggctgtggaattgatgcatagttttgaactcctagaacttggctgagaaaattctgtgtacaattttttccaacccaaagcatcagtacagagcctgcatccatgaggaaagctccatctctgctcagcttctccactgaaagctgaagaatggggggctgaggtatggttctatcactgatgttgagtgctccctcatctgagagattgtcaactctatacaaactgggatgagttgtgagcataaggtaaaccaagggctggtttttcacttgacacatagcaaaaatgcgttcatctagacgtgcatttgtcccagtctggaatgatttctgtttaaggagagccaacacaaaaagtgggaaaagccgcaaagaaaaaggaaccatgagtccaggctgctggttacttaagactgaagaacggtaagccatattggccaataaccctgaaattgcttgaacatcagctccaagaaagacatcattcagagtcgaaactactggcaaacacaaagtatgaacacgaattcttctttcgcctttgctggatgtatacaagagtgctgactgaaaagaaaccaactgagtgtcagtaagactctcttccactgacatctgtactgcatacccagcgtctgggttgacgttaggcaaagacagtaagtcggttgacttcgacagcatgtatactttggtgcaccgaatcctcatgactgcctcaaagccaatcttccgagtaaggtatctctgtagttccttctgtaatttctgtact

SEQ ID NO: 161352 - DNA, 783 bp, Homo Sapiens
tgtagaaagaaaaaagtatttgcaaaagttttattttaaaggatcaaaaataaatactgcacatatacacagagaaaatccactgatatttatgttctttgacgcacactttcaatacatggcaccttcatcttctttattgagaaaataaactgttatgggtccataactggtatgcacagtctctgtgactctggcaaataaccaggagccaagtccatataataaagttggaataccgaggttgacgaccttgagcgccgtgaagaagcggttctgccgggccaggtcctgccagggagccttggagcagtggtacttgatgaaggggaagcagccggtgcgcaggacgtggtagttggcgccctgcaccggccagttgaagtgcgagaggccgaactggtcgttgcggacggcgctgtagggcacgcagaaggaggtccagtgcggcaggcgccgctgcagcagatgccgcgtcagcacctccgaggcgctgggcttggggcgggcggcggcgcgcgaggcccacggcctacacagcagcaggcggagcgcgacctcgtgggccctcctcagggcctccatggcccgccgcgccggggacgcaggctggtgtccgcagccgctggcgcgcaagcgcgcccccgggcgagcgccgggaaggccaaccggcgccgcgcgggtgcccgagagcccccggtgtgcggcggcgcgtgcgcacagcggccccgtggcctcccgctgggggtggagtccgggggatgggaagcgtgagcaatccat

SEQ ID NO: 161353 - DNA, 461 bp, Homo Sapiens
caaaattagtgttgttttaattaccagtgtctgtaatgttatctatccataactgcctgaaatagaccgtcacagagggtcagaaggcgacctgagctcatacttccacacatagcttccttatcggttctggagtcgtaacagcagtgtgctctggatcctgatagagagggaatggcttgcttttcctcatcacagtctgtactcatgaaatatttgtctctgaagccctgaatttttactgcagggctgttgatgggaaacttggaaagaataaacaaaaatttaaagagtgggaagcacctgccttttctgaaatccatcattccgctatgtcatccatggacctcaaggtttataggagatgctcggcctctttgttgaagccacagggcagtgaggccaggtgtgttgaaggcctctccagggccccagagacagggatgctggctggcatttat

SEQ ID NO: 161354 - DNA, 566 bp, Homo Sapiens
aaaagtttactggtttttatttttgcaactttttgtaaattttaaattattctaaaaagtttaagaaatgaattgtgctgaggagtataatcagcacgcagtgcgagttcttatagtggccacgtccacaaaccctgtgttgtggaagaacagaaggcgttctgctttctgtgtttcaccgtctctccctcgctttaacttccaggtcccggagtagtggtgacagcaaggtctgttggtttctttggtttaggtttgatgaaaggccactccagtggggtaggaggtgggcagggagaacaggggctagggtgggaggggcaggagttgggtcctgggggtggaggagatgacggggagagtggcttggagaaatctctgatccagatattcccagaacaacaagaaatcaagcttctgaatgtggtctgttgcaagcttggaaggtgcacacctgttgctgcgagggtaggctgcccagccgggtggtaacgttgaggaaaggacagcagcttcgcaaaggagtcaaccgcaggttccagcatccccgatacggccgacgtcat

SEQ ID NO: 161355 - DNA, 1000 bp, Homo Sapiens
agtttgaaaacagttgataattttattatttgccaataatatgttcttctgatgtgatgcatataatttaaaattttctcatatcctaagtgtagtttttacatgatacagaaagtacagtgaaaaaaattacctgttgcgtataagagaggcaacatagatccaaacagacaaaacatttttggggtatgggtgtatgtatacagctaaagcaaattcaacattaggaacatcaatattatgtactccagtactatacacagcgtcaattaaaggcttcacttcagaataaggcatgtgaagaggaaatccagagaacctgtagtctcccagctgttttagcagttctgctctgtggtcatcttctacatcttctccttgacttttttctaacagaggcaagaagtgacgcagagtagaggtacaatacctattccaccgagtcagatggcgtggcctccagtccatgattttttcttttagtattttttcaatcctgtcttgtagctcagctgcagctgctttgtctgagcgctggtaaattagctcttcaggctgaacactggaaaggccaggatatggaaggcttcttgaaaagaaagatttccatagcttgggcctggtgacatcaaaatttatccttagtggagattcatatcgttgaatattaaaccaaatattgtcaggacctattaaacagcccacatttttcaagggacagaatgtatcaaattgtccataaaaatgtccactgcagggattccatattaaataacgaccttgctcccaagttagcacataggcagttggaccctcaggaatagcattgcccatcaacagccaggccttcttacccagagacagaaagtaattacacaatagtactgcatgttcttcttcatcccctgccaggagatcaagaaattgatcagatgtgctccagaggtcacagataccaccaaatgagacagtgtcaggcaagaagggaatcaaggacaca

SEQ ID NO: 161356 - DNA, 677 bp, Homo Sapiens
acagccagagaacaggaaagcggcggccattttatttttccctgggatgctggtggctgcgggcctgacgtgtccctgaggctttcttatgcttctggtccagcacctgggccatgtagctctcctgctgcttctggatccggaagtcagacatgtgattcctgaagatctgtttctgctggctgataacttgctgcaactctttaatctcattctctttgccattaagtatatcttcttgctttataatgtgagactcaatctcattgcacttggtgatgagctggtccttcttgctggactcctgaaggactttgctcttgacactggagagcgctttttcaaaggccagcttctctttctccagctgcttggatagcacctctacctctccgagggcaaactgtaacttctcctcttccttggccaggaggaccttggttttggcatgggcagctttctcttccaccagcttcttctccactgcctggaactcttctttactgacaaaattttcgtcctggagaaccatcacgttcctcagctggtggattagttcctcctgagactcaatcacgtcccgcagttgatctaaagcgagacacacagatcctgaccccgccttcgaccacccgaggggcgtcgccatcttccgcccccgccagctagttggaaat

SEQ ID NO: 161357 - DNA, 1000 bp, Homo Sapiens
ttaaaggagatttacttttactgcagctcttcttgcccatcaactgtccaaaaacaaaagactaggaaacagacccagcagcctccacccgacccagccacagggcctcaagcctccaatcagagccgctccatggcacccctcagctcagctcagtgttgcctgggagcaaaaggctcggagacaaagcccagagggtgagcaggggggccagccccgcgtgtctgtgagggtgccaagcccaccgtgggccttgcctcctctcccaggactcccgcgccctcctgagctcctatcagcctggcctcagtagcaagctggctgcccaggctcttaatctgcaccgaagtccctggccactgtcccttcaccctggcatgaggccggcctccctctccaccagccggctgaccgtgcgcagggccaggggcagggccgtgttggcatcgcggtgatagcgggggctgcacacctccgtgctgggtgtgagcacaaactgggccacgctaggcatcttcagcagggtcagcagctctgtggcccgggtacggatggcttccgcgccctcctcgctgtgcgtggagctggtggctggactgtgagccagggtcctcatctttgacagcaataaagaggccctggggatcagatcttggctccgggaggccagcttcgtcagcgtggtcatcagcacggtgaccacctgggggggacacctgggcagggcagcagaggggcggcactgggtgacctcgaatagcagagcctccagggcttcgaagaacttgttgatctgctccacggtgcacctccgatcgtaggtcaccgacaggtactcgccgatggcccacaccacgctggtgacgaggctcgccctgctgcagagaccattcacgctgcccaggaactccagcaggtctcttgccagctccaccaccagggagggtttcagcgtacacagggccaggaactgagaactcagcacactgtgcacaccggc

SEQ ID NO: 161358 - DNA, 1000 bp, Homo Sapiens
cgcttaatggttaaattcttcaacaaaataaatttattttcagaaatagctcctccttcaaagtcttcagaataccactcactgcttagtatttatagttgtgctggtttggagtgggatatggcgtcactttcagtgctgatcccaaaagggtgtcctccacccagatgactgtctgtaaatctccattcttctcagaagtagatgtgattttagagccttagaaacaatgctgatggagttacttttgagtgacttctcacttcagtatttcaagggtgaagtgtcaattaaggcattaactttaaccatactcttctttcaatggtatcttccgatgtaacaaaagccctttggaatatatttgccacataaatcactgatgacactttcctttggcatgtgttttctggtgtttagtaaggttagaactcccatggaaagctttcccacactcttcacactcatacggtttctctccagtatggattctctggtgatgaataagcgttgagatctggctgaatgcttttccacactctccacactcatagggcttttctccagagtgaatcctctggtgattaataagtgctgagttcacatagaaggccttcccacattccttatactcatacggcttttctcctgtatggattctctgatgcttgatgagggctgagctcacactgaaagcttttccacactcatcacactcataaggtttctcaccagtatggattctctgatgtttgataaggtctgagctcacactaaatgctttgccacactcattacattcatagggtttctctccattgtggattctctgatgtataatcaggtgtgcccttacactgaaggctttcttacactcattacaagtataaggcttctcaccagtgtggattctttcatgcacagtgagggttgagcgcacgctaaaggcttttccatagtgatcacactcatagggtttctctccagtgtggattctctg

SEQ ID NO: 161359 - DNA, 1000 bp, Homo Sapiens
tcatttcttggctctacttgcattcagcacttgttcttgagcagctttctttgcttttaccatctcgacaagttccttgtatcgtttcatgcagtccttctttgtcctgccaggcaccgcttctgctattttttcccatctttcaggtgtatttactgggtatgttttcaaagcttgttccaaaagcttctgttcttctgttgtccaaggggtgaagtctgtatatggaccttcaaatcgttctgaaggcgttgcgttgtctgcttgaggtaccactccatgttcttttttgaacttatcaaatgcctttttatttatgtcatctttttgatgagggtcaagtttttggagactctttgctttgccaataacatctttggcagttcttttgactccagaggaagaatgtatgttcatgtaattagcaataacttcccatcttgaatttgttccagcagggaacagattcacagctttaattagtaattgtagatcatcttctgaccaatttttacttccatttccacctccaccagttgatttctctgtgttcttagatgcttgtcgcatacgagcctcagcttcctctttctcttttctgatttgctcatttatttcttctatctgtttttccaaagcagcctttcctacttcttttgtgcatgatgtgagtgtttcattcaagcactgtaagcttgccagttcaagccgatcacaaagtttttccacttcttccatcattttaacccgctctgcctcattatcagaaaaatgattccaggtcttgcatgagtttcgaagtttttgcctttccttcttaatggcttttttctggatatctttttccttctttgccagcaatgcttgctgtctgacttcctcctcttctttctccttagctaaccgagcagcttctaattcagcttgtctttgatcttcaaatgatgaattcatatcaccaagtttaggaacattttttttatttgaccatctggaattc

SEQ ID NO: 161360 - DNA, 1000 bp, Homo Sapiens
tagtctcgtccaactttattgctctggagaacaggagggcaagccagcgcggggcggtagtgcccaggcatccctctccccgaggccgccggcccggccgtgccgtcggggaggaccccgcacccgccgcgagcgcgcacacaccctcggtgacaaataaatacggcggccgccccgcccgtggggtcggggatccgccctgccctgtacggggaagggcgccggcggcccctagcggacacgcgcgcggcctccgggacggccgggtcgtccgcagcgcaggcccggggcggcggcggacgccggggacgcgagaagttatgggccacccgggccggcggcctcagctcagcacgcagcgctcccgccggctcaactgccggctcagcttgcggcgccgctgttccaggccgcgctccaggcgctcgtcctcctccagggcgatccgctccttgtggtccaggtcccggactagctcatcgcgctggttcaccagcgacaccagctcctccagtaggagctgctctcggtgctgctgagcggacgttttctgccagtcttcgatggccagcatggcccgcagctcgcggctcagcagctcgaaccttcgctccaagtcctgctcctccatgagcagctgcagctggtcctgcctccggatgagagcgttcttcttgttgaccagggtgaaccactcctggatcagcacctcctcctgcagcttgttggcacctgactccatgaggctcctcagctgcatctccacctcagccgcccgcccatctatctgcctctgctcctgttccagggcctgcagctctgcacacacgtactgacttgtgtcctggaaccgttgcagcccagcctcctcccctgggcttgggggtggttcctccgagggggaactcccaccagggggctgttgagagtctgcagctgtgggtgggcctggggcagggctggggtcaggggcctggccttctgcagccgcagctcccat

SEQ ID NO: 161361 - DNA, 391 bp, Homo Sapiens
tcagatataatttttttctttataaattgtccaatctcaggtattcagttattgcaacagaaagcagacactgatgagggctttggagcaatgcagagctggtcccagaggcaagatggagggagcttgtgcagctctgggcgtccctgtgggcacctctgggccaagtccagcttcaccttcaccctcctgatttcccacagcaggcaggagggtggtggagcccacactgtggggcaggagagtctctcagactctgagggcaggccagcatccatcctggctgctgcaggtgacgggttggcttcctgggctggctgctgcaggttgtgggccatagttccatttgtacagatggtcatgccattgtctctttgtatatccagcctct

SEQ ID NO: 161362 - DNA, 1000 bp, Homo Sapiens
caatttctttttttttattctgcagattaaagacactcaatctttaaccttgaagggcaggcaaaaggtcggctatgctgtcaacatagaagtcagggaccattttcttcttagacacgcagtcactttcctgattattcttcacatcccctagagtggagactccggtgagggtcaggatggtcttcaggccacaggtggcgcctaggaggatgtctgtgtccaggcggtctcccaccatgacggtgcgctcggggttgatgccgtattcctgggacacgcagtcgaaaatgaagcggctgggcttcccgatgatgtcggcctggcgctgggcggccatctccacggctcggaccagacacccggtacccgcgatgaagcggccgttctcaagcggaagccggttgtccatgttggtgcccacgagcaggcagccgggctgctgcaggtagcgcagggccttggtgagcttcatgtagctgaagtgcgggtcaaagcccaccaccaccgcgcgcacgtcgggctccagcggcgcgtgcagccagtcgccgggaccctcgccctgcagtggctcgggccccacgcccacgctggcgacgcccacggcctccagctccgcggccagggctgggctgcccagcacgtaggccttgggcgcgggggcgccggccaggcgctggcgcaggtagagcgcggtgcagtaggccgtgccgaagacctccaggctggcgccgggccccgcggggccgccgaagcccaggcgccgcagcttctcggcgtaggcagcgcgggtcttgctgctgttgttggtgatgaagcccaggcgcttgccgcgggctcgcagcgcccgcagggcctcgggcgcgccaggcacggcggtctccccgcgccacagcacgccgtcgcagtcgaacagcagcgtgtccacgtcggccagcagcgcctgtgcccgctcggcgctcagccgcacgcagcgggcgtcgtcgccaccggcctccgc

SEQ ID NO: 161363 - DNA, 1000 bp, Homo Sapiens
cacaggcactgcttccccccagccctcctccccggcacctccccgtgggggtctggaccccccctcctccccggcttggaggcagacacagggtcccttgcaagacacgacccagcaccaaccacggaacagctccaaggcccctgggcccctctccggcctggggctgggagctacgcgcgagggcccccgcgggcccccggggcgcgcaccctgggtgcgggcccgcgcgggaggggcggtgccaggccctgcgcgggcgctacttgacgttgaacaccatcagcggccgctcctcccgccgctgccacgggctcttcttgtctcccgcctcgtcgcccacctccgcccccagctcgtcctccgggctggtgagcgagtcgcgccgcagctcgctggcgctgctgcgggagctgtccccgcggctgcggccccgcccccggggtaccgtggccgcccggccctcgggcgccgccacctcgtccagcagcggcgtcagcgagttgtcctccggagagcagaggcccgtgcggctctcgctgctgctgggctccgtgtcctcgctgagcgccaggcgcgggggcgcgggcggcggcggcggcgcggcaggcggggcgcgctcccgctcctccctcgcgggccggcggcgcgcgggccgcgcctcgtggacatctacgcccgagtccaggctggcgtcggtgctgcgtgccccgccgcccgcccagttccagcagcttcttctcggtcagggcctgcagctccccgttgaggtagtgcgcggggatcaccagggtgggcatgacgttgcggtagacgttgtccttgaggtggtcgatggagccgcagaagatgagctgccccgcctggcccagcgacggcggccgcgccagctggtccaccgactgcgacagcaggaagtcgggggtcttgccctcggccgcccccttgtggcccaggtagtggtcgaagggcggcggcggcgagggcggctcgtgcagga

SEQ ID NO: 161364 - DNA, 762 bp, Homo Sapiens
ttttttgtattttttaggtggacaggaagtagaatttattggtgagtattaagaggggggcagcacattggaagccctcatgagtgcagggcccaccacttgtccagagggccacgattggggatatacttgaccccacagccatctgggatgagccgcttttcagccaccatgtcttcaaattcatcagcattgaacttggtgaagccccacttctttgagatgtggatcttctggcggccaggaaacttgaacttggccctgcgcagggcctcaatcacacgctccttgttctgcagcttggtgcggatggacatgataacttggccaatgtgaaccctggccacagtgccctggggctttccaaaggcacctcgcattcctgtttggagcctgtcagccccagcacaggacgacatcttgttgatgcggatgacgtggaaggggtggagccgcacccggatatggaagccatctttgccacaactttttaccatgtacttattggcacaaattcgggcagcctccagggcttcagaggacagctgctcatattcatctgacaccatgtggccacagagcggaaactcatccacttttgcctttttccgccccaggtcaaaaatgcgaatcttggcatcagggacacctcggcagaagcgagactttgggtacggcttgttcttacaataccggtaacaacgggcggggcggcggcccatggcgacaccaggatcttcagtggcacactgaagggaaaga

SEQ ID NO: 161365 - DNA, 1000 bp, Homo Sapiens
tgcatgttcggatgaatttattcttggagaccctttatttactaaagcgattcagggccgggcacggtggctcaggcttgtagttccagcactttgggaggccgaggcaggcagatcatctgaggtcaggagttcaagaccagcctggccaccatagtgaaaccccatctctactaaaaatacaaaaattagctgggcgtggtagcgggcacctgtaatcccagctactcgggaggtcgaggcatgagaatcgcttgaactgggaagatggagattgaagtgagccaagatcgcgctactgaactccagcctgggcaacagagtgagactccatcctgagatgtagtttgtttctgtaaatttcagaagttgagttcagaatagacatatccagatttataagaatcacaggcttcttgctctcttggtgccacctcctggaacacgggggtggcatactgtagctcctgggagtgtttggcctcatcttgggctgtggaaacacacggcctggatcccacttctggcacagattcctcctttgcttgtttttcaaggatatttgcatagattccaacttccatggctgtgtctccacggtccctgggcacattatttctcatagcttttcttgttttgtatttgggcagtacccaaaaagccagaattaggattatcaccaccagcaacagtaataaccctggaagtagtagcttcagacagaaaggacagctgtctccgcctgttgagggcatggtgacagggtgactgtatgttgcatagttaggcaatctgtttttagcttcacacctatactcttcctcttctccaggattcttcttggttaagttaaattcagcaggctccctgtcatacttggaaatagctggtgatatggcaacatggttttcaaagaaagtgtaattgatgggcagcgagccattgactgagaggcaatgtaatgttatatgtcggtctgtttctgtttgaatgaccataa

SEQ ID NO: 161366 - DNA, 673 bp, Homo Sapiens
aaaatgtctggaaacatcgacatctcctttccctgcgtcctttctggacatggtttgatggctcctaacagtgccaggcacacagccagtgttcacttccttcttgtgtaaacaatcagactcagcctctctctgaacaaccacttaatccgaagaaaggaagccaacgtgcccacaggtcattttcttagctgactgaagactggaggatggatcccagagcagcaaagacgtattcaatgtagactgaaagaaagcatgcagtggttctaaccagacacaggcatctaggcaacaggtgtgagaattcccacatggccctccccacatgcggtgtgatgcattctcatcagaaggcaactggttggactgtgaatggctcactgaattgctgattgcagagcacctctgggtgggttccatgcaccctccagcctgtggaccatagcagaacacatctggaaggctttcattttttttcagtacagagcttcccaggggtgtccaagggagagaatacagtcatgggttcttagttactatttctggttgggccagtaaagccccttcctcatccttcttttccacctgtcactagagacagaaactaaaaaccaaggcgtcaggctgctaaaagccatcgtgttcttcccctttgcccttcttcctgtct

SEQ ID NO: 161367 - DNA, 1000 bp, Homo Sapiens
ctactgatctctgatttgtctgtctctgttgggacgactctggttcttgagagtggcttgttgactgctggctgcatagctcagcattctgctgtgttctgagtagaacgggtgtctgtggttgcagggaaacccacagactggggcttgaaactgctgtctttgctgatttaccttcgaggcatggcgcgcatggcaaagtgacatgttctcctccagtatctgtccaactgctgtcatgagcctctcagcttcagcactgctgccgtacacgcatgatctgttttttactgttttttggctctcagcagtgactggtgctggcttcctttctttctttgaaaaaatcgtctgaaaaaattgcttgatgttttctccaaagtggcttattgaaggaggctgtttctttgatggcagtagctggacgccttcattctgacgggtgtcttctgttttcctgcctggggtaagttgaggagtcctcaatccttgaaacatttcttcatgtttttctaagttgggcttcctagagttctccctcttgtgagtagggggaaacattgggctttggctcttgcatgagccttgacagtttgggttcctgggctccttgtgccccatgttactccttctggctgacatgaggtcacatagctcctgggaagcctgcatgttcccagtaggcatgctctggagatggccctggggcacttgagaagccaaattctctgaagcatggggcacaacagatgcttgcccatctggaaggagcacaacagtggcagaaacttgaggctgggtctctgacttcgtggcctttccaggctcaaattcactaacagcctcctccatgagacacagctttcttgggtcttgggagacagacattctagggagtagagagcttttgctggcgcctggagccttgaaaccacgcacatcctcacttgtggcttggaggtttgctctcatacaggttcccaaggggactgtgggttgt

SEQ ID NO: 161368 - DNA, 1000 bp, Homo Sapiens
ggttgtgttccaataaaattttattaacaaaatatgacagtgggggggccacagtttgccaaactttgccttggaggacatgcagaggcaccctcagaattcagtgaaaacctgctcccatattgctaagactcatgaagtataatctctcaccttctttctctttcccctgcccaggccctaagttagggttcccatccatataacaaagacttctggtcaggtggcatttgctatctctgggattccctgcccatgaaagccacaaagagatttcttcttttacacaccctgaagcatattatggccccagcaaggctaactaaatcaaactgtggtttaaaaacaaaacaaaccaaccactgtgaaatatttatttttgttttgtagtattaagcatgattaaaccagtgcagaaaaataccaagtacattgggtgaacgatgagctagctgttctagtatttgctttttgtaatccagttaagaccatcagcatatacaacatcatcactaactcaacaatgtagctgcagggtaacctgtggataccctgtgtgctctactggcctccaaaggcattcaggggatcatcaaagatgttggacaccttgtgttcaaatcttggttcaggtgcggcctgtgcagatcggctttttggtttggttgtcttagcctggataccagaggagaagatgtcatccatatcatcatcaaatatagacttggcttccactttctttttggacttttcttttggttttacagttaagtcagcaaagatatcaatgttatcatcaaataaattagattccaatgttttctccttctctctggttttctgagagggtttaattgcttccgtagcaaatatatcatcctcaaaaatatcttgtgttgttaatatgacatcctgctgactattggattttgtctcattcttcttgactttctgatctgtaaagaggtcatcctcatcttccaggagaggaaaggtattt

SEQ ID NO: 161369 - DNA, 1000 bp, Homo Sapiens
ctataatgtattagtgggttctcgtgtctccaaattaccaccgtggctaggctgctggaaaaaagcactgttctgttcactccaatctcctggtagactctgttggtctatagacttctgtgaagccagtgggtttctactaataaccaggtccagcttattcccggattctgctatgaggggcacaacaaggcagcagtcaaagtctctggttcggacatgattcacctgtaagagcctgtcatagggctttaagccaccaagatctcctggcccagctgggcgaatatttttgacatacactcctttctccagtaagccatctgctacactgaacccaaagtcctccatgtcagagtccttgtacaaggtcaccttgtgcagctccacaggagttggagacatgatctcctttatttcttgtttcatttttctcagggttactgacttcctacccacatctgaaggcagggtgttgctccgagttgtttggctgtagtgcggccgcgagctgctgcgctcctggaagctggcctgtcgccccagctgactgcgaggtgttggagcctcatgattcaaactcatcgtgctccccgacatgattgttgcctccagttctctcagaattcctgactgtccgcaggtttccaaatcctccagcgcttgagaccagaagttctcctcttgttctgtctctgcactatcggcagcccctgcaaaaccactggctgtggaccggtcccagtcttcataactcagccccacatctgggtaagtctggcttcgaggcttagtgactggggacaagctgcctctctgttttggactcctccagtcataggtgttgaaattgtatcctgaggcctgaaaactagtgccttgagttccatagctggtgtctattgcagacccatcccatgaatccacagcactgtccacactgggcaccgtggaggggtacatgtcggagagcttgcctggcttctgtgctggtgaggag

SEQ ID NO: 161370 - DNA, 1000 bp, Homo Sapiens
gaggaaataaaacgtttattgagtaaatgtttatttagtaacagcaacacatagtttctcaagaagaggatgaactgaaaactcctctaaggcaggacgaagcaactttccattattcttagtttagaccagaatctttaattttatattctcctttaataactgtcaaaatacaccaaatacttagaggaaaatattcacagtataccaaaacattttaagataaagagcagtgtaagagtagtattctctacataccacagtatacaatgatgccttcctgcaggtttagaactattactactcaaaatattaatacatttatgcaaaatgattgagaaaattgaaatacctgcaaccttttccagtttgacttcaggaacaggtgcaaaccaccatcctcttcacagatcttctgttacggcaaccatcaaaaaccattggttcagctctcaaatactgatgacaatgcatgtgatgcatgcgtgctctgctaagttttgaacagataacatattctacagcaatgctcaagccctggattatttttgcctgacaaaaataatattccaatattccctgaagaggttttataaaaaggttgaaaatggctgtttttcatagtcaaagccaatttcctttattttttgagacagggtctcgctctgtcacccaggctggagtgcaatggtgcaatcttggctctctgcagcctcaaactcttgcactcaagcaatcctcctgcctcaacttcctgtgtagctaggaccgcaggcaaacaccaccacatctggataattttttaatttttttgtagagatggggtctcactttgtcacctaggctggtctcaaactcttgggctcaagcgatcctcctgcctcggcctcccaaagtgctgggattacatgcatgagccaccacacccagccaatttactttttaatagaatatacactgttgaattctatcttcatgattttttacaagaggttgctat

SEQ ID NO: 161371 - DNA, 1000 bp, Homo Sapiens
taaaagcacaaacacttttatttttaatagtagtgttttgttacaatttagtgaaacaacaaataaatacattcattggccacagctatacttttacaaccagtttgaaactgattatatagctgagaaacactgttaaacaataaaaaaggcagctatgcataaaaaagccactttagctataaattacattttccataaaactacaaccaactacaatgagtggtaaaggtttcaaaattaatggccacccaagtgaaatgatgaaaacaaatactgctaatcactatagaattacacacttaagtaatgaaattcactttttaatgaacaaaaatgaaggtttgatactgtcatcatgtgcttcagtgcaggatgaacagggaatcggtagccctttgattttataaacaactcctttcgagaccaaacttaaagtgctcctagtgctttggaatttttaagcaaagattgggccagagtgtatctttatttgtctttggtgatatgttagatgtgtataaggagacaaatgcaagaatttgggtaccctagtcagtgataagaataaacttacaaacctcaaatttggaacaatcaactaatgcagcagaaagaaccaagttattttatctgaaaaatttttaaaaagtaatctttgttagtttggtcaaataggaacattatcgaggggagccttactagaaaaactttatcaccttgaaccccaaggattaacaaagacaacatatctttttggacagctctagatgattagatgcctaacattattagcaaaataaacagttagcattctgagaagcaatctaacaactggagttgtaataaaagtacgcttttgtcacttaataccacgggtaactttttatactatacattttaaaataatttggttacaatgagagaattataaacaaacccaaaataacataagtatatgcttctgattgaatacaaagtcattttgtatcataaaaag

SEQ ID NO: 161372 - DNA, 1000 bp, Homo Sapiens
ctcatccagtctggggacaggtttttatttttttatttcttatattttttaagacggagtttcactcttgttgcccaggtgcagtgcaatggcatgatctcgactcactgcaacctccacctcccaggttcaagggattctcctgtctcagcctcccaagtagctgagattacaggcatgcaccagcacacccagctaattttgtatttttagtagagacagggtttctccatgttggtcaggctagtctcgaactcccgacctcaggtgatacacccgcctcggcctctcaaagtgctgggattacaggtgtgagccaccatgcctagcccctggggacacttttttcagaggccagatgtcaacttccatctccacatgcctcagtttacacatcattgcatctcagcacagagccccatcatgtagggttactttgggttattctgcccctgtgagaagaaactattggcagcaaagccatactgccctctgccacctctccccagctcaggccagctgcgcctctgccgtgcagtcaatcgttggctctgtgggtggcctggagccaggccagcacccctgctaagccagtgccttcacgggcgctgatttctgccgtggtgatgttctgcttggcacaagcaatgatgtctggaagcctgattaatgacttcatctcctccgtggacatgtaacagggtaggtcgattttattgaagagtatcagcaccgatgcttctgcaagttgttctgcagaaaggagacctaagagctgcacacaggatgcagagagctgggtggggtcagaggcgtccatcacaaacaggagagaacggcagtttccatagtaactggaccagatggggcccatgcaccccccaagctcccggatggtgatctttctctgtgccacgatgtcagtaagattggtgcccaccgtgggccgtgtcgggggcggctcccccaggtcgcctttcccatcccgggagctcacctc

SEQ ID NO: 161373 - DNA, 1000 bp, Homo Sapiens
caaacctgctcttaaaagccacacatgaagctctaaaatcctctgggcttatggctattggctggccaattgctctcatattatcaggtgtcaaaggcctagaaccagattgctgggcatgagtcccatgcaatttcagatgtaggacacatttcactacaatatgtgtacaaaatccaaggaagatccagatattctgccatagtctctgagaaagtacaacaggaggaaagataatactcaggacagtggatttcattaatggcatacctcctttaatatatcttttgtgataggagcaaatacaaggaatcacacatttaaatcagattcccctttctaaataggatttaatcactgtggtaaagctaggttcagagaagtcaactgtaaaattccttgctgtaatggctcatctatagaaaaatgcataaccactttaactcattcctctcattctccttacacatctgcatttccggttattaagtaattaaaaatgtccttttcctatctacacctcggttaaaagaaaaacaaaaatggggcattgacttgtatacacatggacagatagaaactttccaaagctaggaatggcaactgaacacataaaagacatgccagtgagccattcagttgggatgcatcctcccctttatgagaaatgcaagaaaataatgccatagaggaaaggtacctgctccaaagcaaaataaattagcatgatagaaaccactgcattattctatttgttgttgctgatgctatttggcttttccgtgtggaaaagggatactgcatctttcactcagctcttatcgtacaaccaggcatgctacacaaagttttgaaggacctatgcagtcgtcatggcagaaggccccacagcctttgcacacaatcatggctttcagccggcaagagcatttcagttccaattcatctgcattgctgctgtcggcaaagttctgaacgggcatctgagcgttctgaccag

SEQ ID NO: 161374 - DNA, 1000 bp, Homo Sapiens
gccaaacagattggtcattattgtacacatagctggaagggaggggtggtcccggggtaaggacagggctgcccaatatttggggggaggaagggactcttcttccaaatgggcttgtccgggaaccggggtcccggggagctgggcgcctggtccacatggaccccctccacctccccacatacgctgtggaagaagggcaggagtgagaaatgctgggggaggacgaccctttggtctgagatgtggaggtgatcataacagttcccgcccgctggctgttttgttgactttggagaggccttcccggaacccagagtccgtcattacttgctccatctgaacatcctcctcgtcctcctggggcagctgcaggtacgggttgtttcctgtgggctggaacttgtagcccgtgagcacgaagaaggccagggtggagccctccaccaagagctggtacagccactgccactgaaagggcacagccacctgcagcaggatggcgatgatgcgggtgaagtagacgtagcagatgaccatgacatagtaatgccggaacagcttcagcttggccaggttcactgccaccttcccgtctgtgccagacgcatcctggagatgccggatggaccagactacggggaacaggatggcaccacagcagatgaggtccaccaggaacaaaatctccttccacagcacgtagtcgctggcgccttcctcgcgggactcgatgatgatgtaggccacgttggccaggacctgcatggggatcacgatcccaaagaccttcttctccttatccgacaggacgtacttgatgaaggcccagcctgagccaatcagggcgatggtgatgaagaggagggcgcccttcagcaggtgtgcgatgtagtacatgacggcaaggccttcgatggggtggccctggctgttgatgaagtagtagttgatgctgtggaagaggagagagatgctcttggtgaaggccaaggccgcc

SEQ ID NO: 161375 - DNA, 1000 bp, Homo Sapiens
tcagtttggagtctccatacagttcccaatttccaggtaagagttcctcctgagctcaggctcccgggctgctgctgtctgctgagtgagatctcggtccttgagacaaagtaatttagcaataggatgacagaagtgaacagaaggtgtgtaggtgatctcagagggggctggagtgttacctaacctaagatctgcagcctcagtggcagtggtgctggactcctgagtgtcctggagggcactagggaagttggccctgacagcacccgcctcctccggagggcagccaggccgcagtagggccctagcctggcagcacagagcccgctcctcttcccgggttgctcccaggcccctgtggggccgtggggtatccgggcctcgcgtcccaccccaggagccgaggctgtgggtcccttggcagtccgagggcaggcccagatcacagtccacatcctctggaatgatggggatgcgctggctcaggtcccgggccccggggtagcagccgggcggtggttcctcggtgagcgtgtactgcacactcaccgagtagtcctcagtgtagcagccgctgccccctccgcccccgcgggccacctgcttctcttcatagaagcagcagggcagaccctcgtatttcaccccatctgtcctgggcaaatggtcggggtgaaggccgtacaagccctgggagcttcctgactggggctccccacccgccgggccagagccctcgtagaggtggggccccaggaacaaggtgctgctgccagctgctccggcgctaggcccggctggggagggctggggctcgcagcagcaggcacacgacggcaactcgtggccccccttccaggtcctcctgaggtcaggggcggccccaggagaagcctcgagccccacttctgaggtagagctattgggccccctgtgctccagggaggagttgctgctgtagttcatctccaggctgcaggtggacacctgatccccc

SEQ ID NO: 161376 - DNA, 1000 bp, Homo Sapiens
tacacactcattcaaacctttattaagtacctaccatatgtacaatactgttccaaatattaagggaatacaaagatgaatttttaaatggtgccaaatcccaaggagtttacaatataataatagtaaaaagtaatttaacacgaactgtaggaagaaaattacaagtaaacatttgcccctgatggagaaaaatgaccttatttttaaatttaaagcataaattgccagtttggaaacactgctattacatacacctgtattagttcatccttttaaaatgatgctgattgtttttagaaaagaaaatgtcttatgctatattatctttatgattggcttcaaattttaaaacaaaaatttgcttaaagaaaaaaatatagatttataaaatcagattaacactgtacacagagagataaagtgtgttggcaataatatgtaaaaagttgaacacaactgggtctagcagtgaagagttaaatctgaattactttggagacttgccctagccaagttattatgcacaatttcatcatataaaaaaagggatacttgcccctaatttagattataactcacacatgccataattacttccatctgtaataatacatagggttaaaaaaactagtataaaaactttcctaataatttacaaatcaaaaataatttggactagaactaaggataaaaagaaaaagggatgatggtgtagacaatttaacagtaaactctcagtgcaaaaataaatgtaaatttgcaagtatccatttttttctatactttttttttttttttggagacggagtctcgctctgttgcccaagctggagtgcagtggcgcgatctcggctcactgcaagctctgcctcctgggttcatgccattctcctgcctctgcctcccaagtagctgggactacaggcgcccaccaccacgcctggctaattttttgtatttttagtagagacggggtttcatcgtgttagccaggatg

SEQ ID NO: 161377 - DNA, 1000 bp, Homo Sapiens
tgaattctaatacatttatttaaaatccagttttataatattccacactctattccaagagtacaaagtgttgggcacatgttataatgaagtgttaactggaaaaactactacatttggcagtctacctccaactgtaaatgaaatttctattgcaaatcaagtcatacctagctttcattaaatcgtttattaaatcaagaaaatttcaaaattgtttatacttggttggctgtatctgaaagcaaatctttaatgcgtttatttcaaggtcagaagtgatttatttcaaggtcagaagtgatttttctaaatttatgctgcattttaaaattgatatacagtgtttctcttaccggtttttttttgggggggtggggtgggtaggggttgatgctattttttggttaaaaattatagcaaaagaagaaactgcctttaacaatttttctccccaaaagtctgagaaatagttactttgaataaagaaaacctaattttggtgtcttgtagggtaaatgagattttcacattgcaatacgctcataatagtacagtaaatctttagaaatttcttcttgaaagattgttacattagaagtgagtgtagtttcgtgaaataatgaagcaaactattttctaacactacgaacatcagaattacagtgaaatacagcatttttcctatgcttgtataacatgtagccttgtcaagaatctgctattaatttcttcagtatgaagaaaacagtagagaaaatgagaacgttcctttttttttaaaactatcagtttttacacttaccactaagtttttacactttccactagataaaatgtgttgggtcgttttgtattttaaagtatatttttgtttttgtgtttacaactttttcagaagagattaaaatgtttatttgctgctctttttgctcttaacattactagagctactactagcactagatggcctagaagggctgcctactagtgaagagga

SEQ ID NO: 161378 - DNA, 1000 bp, Homo Sapiens
ttacaaggcctttttgtgagggctgctacgcaaactctctttcccccgcctctgccgtaccacaaagtccttctcattagaaagagagatggggcggtcagtgtttggggctggggatggcttggtcacgtctctgcccacgttctgtttcctagctgggggaggctgggctggggcagggtccttccctttggtttcccctacggtggcagtcaccgagagagccctgtcccggtggctggccccgcccatggtgtttgggtcggggtggtgtgactccagaggcagggtggagacccggaaggagggcagggagtcactctttgtcatgtgggttcggccctccccggcaggctgagccttcctatggtccctgttgctgggggctggaagctccagcatgcccccggcggccttggcagaagaggtgtcgctgctggctgcagaggcctctctaactccggccctggtttcagggaagctggaggagcagctcagagacttttccgggagggccgtggatcggaaagaactctgcccagtggctgagggggaccgtttcatgccattgggcttgtctgcctccgtcggtggcttctggggaccgggccctttccctctggcctcagggaagcccttccccacccccgcggctggccgctccgcgcctttcaaccggttctcgctatgcacaaaggaaaggccggcctcgagcttgtcgccctctgctggagcataaagtgcttcagtgcatttcttcccttccgcccttctgtcggtgttggcggccggctgactcgggcttttgtctgtctgtctgttgtctgtctgtttgcacagggtggggcaatctttcacagtggatggtttggggtgctttggagacagggtttgcttttcaccaacagcggacagtttctggtccgctggctcactaggccctgggtgtcccggccttggcaaatgcacaggcttctccagcacctccaggggccgccca

SEQ ID NO: 161379 - DNA, 1000 bp, Homo Sapiens
tcacatcacggcctccatatgcaggatcctcagggcctcggagatctgcgcgctggggtccatctggccgtacatgcccaccaggaaggcccggtggagcagcacagccgcgtgctcttggcacaggagagcgtactcaggcaggttccggagggccgtctgcaccacctcaaagtcctggctgcccaggcagtacatgaacgtgggcaggaaagcggctgcaatgctggggctgttctgcatggagcgcagggccaggctgaaggcgaggttgcggcaacactcctcggccgagctcatcagccgctgcaggttggtcgagaagaagctcaggatctcgggtctccgccgggacatctcgtctatgtcactcagaacctccagcagatcctccaccgtttggccccgggaaagccgtttcatgtagggggccatctcggccgcggtcagaggggtgaacagggagacgctgaccaggggcaaggagccggctgagctctcctcctcgccctcttcgtccaggcctcggtcggtcctgtcgtccctgctgggcaggctgagccctgcaaggagggatttcagcatcaccaggtcactgttgtcgaaggacaggtcgctggggagagaagatgctttcacctgggaggaagacgctggcaggaggaaggctgggtcaggggtcaaatggagcgggtcggcgtgcttctgcaggaaggagatggctgctggggcattgtaggtaatgtacttatggatgaactgcacaaacttgttgatgaaggcagccagatggcgggaggacttcctgtaattcagcagcaggcggatgaaggacagaaggcagtcccacagcgccccctggtgctcgctgcggaacacgtgcggctgcagcagctccagcaggcccagcacgtgcaggaagcagctcaggtggttctgctgccggaactcctggaagttgaggtgggtgcggccgtgcaggagcgccgcgatcatgggc

SEQ ID NO: 161380 - DNA, 1000 bp, Homo Sapiens
aggtttgacatttattgtagcagaacagtaatatcacagtatgggacaaaggtttacactttgcagggtattctttgggggaatgttaaatactgtaataaaaacatgttcaatcatggtaaaatgttcaacttgttaaaattacaaatgaacaaaaaaaatttttttctcatatattgcctaaataccaaatgaagagcttaaacttaagattcaatgtgaaaacgagtaaatatgttcctaaatttgcagaaaataaaagataaactgtagaaaaaggtattttgatttacagttcacaaaactgtatctgaacatttccccagaaaaatctaagtttcatttcaagatcgtaaactacgttcactgtgtccatagttaacaaataactaccccaaatcaccaccaccaccaccacccttgcagccacattgcaaagttcacagatcctgcggcaaccgctagtgttctgcagaggcccctcctgcactcagaagctcgatttcctccaatccaatgcagctggtcgggtgggcggttacggactggacaaaacaatttaacaaccccacttcctttccgaggacactcttcacttcgtagctcccatcttcaccggcggcaaacctcagcagggaggaaatgctgcgctgcaacagcttgaccttcactctgcactgcggtcttgagcggcagtccaggaagacctgcaggtgcctcttgagaacaggagatgtgaccacccgggagcagtccccacaggaaaaggcgcctctgtcttccggcctctgttccaatctcccgttgccacacatgtcacacacaggccatgagaaagcagtgctctcgtccacgccaaccacagtgccttgaacactgcagatggagttgacaggtgttgcagagtccaggctgtcgagcatcaccgggccaggcagctcacaggaacttgcaccagagaccacactcaaaaggggcttctgaagcaagaggacagttc

SEQ ID NO: 161381 - DNA, 1000 bp, Homo Sapiens
ttatccagtatgaattctcttgtgttggccaaaggttaaatgctcactaagagcttggacatatttcttggttttcactccagcatgagttttctgatgttgagagagggatgaactctggctaaaggcttttccacattccttacacttgtagggcttttctccagtgtgagttttctgatgctttgtaagagatgagctctggctgaatgcttttccacaatctttacatttgtaaggtttctctccagtgtgtgttctctgatgacgaataagggctgagcggtcactgaaggctttggcacaatcattgcatttatagggtttctccccagtgtgagtcctctggtgctgagtcagggctgagcagtagccaaaggctttcccacattcgttacactcatatggccgctccccagtatgagttctctggtgctggataagacctgaccgatcactaaaggctttgccacattcgttacacttataaggtttctctccagtgtgaatgacctgatgctgggtaaggaatgtgctttggctgaaggccttcccacattcattacactcataaggtttctctccagtatgaattcgctgatgttgagtgaggtatgaactctgattaaaggccttcccgcattcattgcattcatagggtttttctccagtatgaattatatgatgccgaataagggctgagcggtgactgaaggctttcccacactcatgacattcatagggtttctccccagtatgaattctctggtgcagagtaaggtgtatgctctggctaaaggctttaccacattcgttacattcatagggtttttctcctgtgtgaattctctgatgcaagacaaaagctgagtagtaactgaaggctttctcgcattcattgcatttccaaggtttctttcctgcacaaattctctcatgcctaattatatctgaattttgttttaagttatttttaaatgaatcacaatgatgtagtctc

SEQ ID NO: 161382 - DNA, 914 bp, Homo Sapiens
gctccccgcagggccgcccgggccggtttcaggcgggcttgcggccccaatcactgctcctgttcgcggggacaggcaggggctgactgggaggacgtcttgtggatggccttgtgctcctcggcggcctcctcccccgggtcgccaccgccgacctcctcgatgaccacgctgcgcacggtgccctcgtccaggcagtgcggggcgacgccgtacacgcgggggtcagagacagctgcgtggaaactctgcaccccgcacctgctgcagaagctgtgcagcgccgggtgcgtgttggaccgataggtgacgatgctttctgcgccctggagcagcgtgaagcgcgaggccgggacgaggaagtggcggtgctgcttcttcctgcacagcctgcagctgcaatccacgacgcgcagatctgcaggggcccagaccgcaaagcggaccgcgccgcagtggcagcccccggtgtgatgcacgaggcccgggtactcgaaggtgtccagcaggaccttggcggcgccctcgcagctgaggccccacagtttcctgaacgtctcccagcgctcccgctgtgcgcccaggtccagctccttaggggactcggcgggcgccggcgggtccgggagtggcgcggagggcagcggatctctggagcccgcctcccgggcccgccgccaccggcgcttccgccgcaactttcccagccacctcttggccgccgcgtggctcccgaccccgacttggacccgggggcactgcgcgcggctggcgcccatgaccgcgatggccgcgcaggcggcgggaggatccccgggccgctttcgcctccgccgctgagcagtggcgcggttcctcactctgcccatggcgcctgcagcctccggagcgcgtgcccagcccgctacccccat

SEQ ID NO: 161383 - DNA, 619 bp, Homo Sapiens
tgaagagttatttgggacctgtattcattggctagggccaccataagaaattaccccaaactgaggggcttaaacaacaaaaatttcttttttcacagctctggaggctgaagtctgagctcaaggtgttgacagggtggcctccttctgagggccatgaagtaagagtgtgttccaggcctctctccttggcttgcaggtggccatcttctccttgcctctccacattgtcttccctcatacgtgcctgtgtccaggtttccttttcctgcctcccgggtgctgcggcttccgccacgacagtctcgaccctgcacacggatttttttcctccgttccatgaaccaaacataatgattctggtttacatatttaagcgaaggggagaagaaacgcgactctcaggacccaagggctgaggcagggtttttctgtctcaaagacctccagttaagacatttttctcctgcaaagcctttcctacaatgatggcttaatcgtgtaattatgtaaaccagtcacaacctggatagctaaaacaaaaaaaccaattccctacgcccgagccaagcctgctccccctcgccgtgccgcatcccaaacaccccgcgctcgctca

SEQ ID NO: 161384 - DNA, 1000 bp, Homo Sapiens
taggctatgaagaggggttttaatgaagagactctttacaaaggtgtaggagtaggcaaaccacgagacagcgcagtctcctaggcctcagagctttggggccccaggacccaggatggagggtatggggggatggggtcaccgggacccagagatgagtgaactttgtgacggtggtagctgcggcctctgttcacttctggaagacatgcgggctgccctgttcctgctttactgcctccttcttcctttgccagtaaaagaaacatctccagctatggccaggagtagagcactgctgagactcacagcccacagggaggtccgccggttcctggctgggcagaaagtggggtcattgcaggagaggaagtgagtcctgcagtcagcacagctggtgaccttcagtgtggactgtatgtccttctccttcagcccatcagatatcttattcagcctctcagtaaagagattcttgtgcgtgtagatctcttccagaagtactgttttatcatctcgtaacgttttaatggcttggtgtacttgagtgaagaatttggctgtttcttcttccaaatggtcacgatctgaggatgagatacaggtcaaagggaagtcaagggagtaagatcccaggtcaggtaaagaggccacatccaatccctgatctcctggctgtgcctcaccaaggtaccagggtttgagaaaattattatcctctaggaacaaggagtgaatactttgagaaagttctgtgggtggccctggggtcacccagaggatctgcaggtcatagtctatcaaggcagacagttctggccagcagcggaggcagttcttcccttcaatggcaggcaggagacagatgatcaggagaggcagcatcttctgggttcctcctactgtgccccagtgccctgcctggaagttccacgtggaacactggtgttctgtccccttggcaaccacattctcttggcaggacaaagtgcattctccc

SEQ ID NO: 161385 - DNA, 1000 bp, Homo Sapiens
gctgaatatgtcgtatatacatatatataatattttattttaaaatgtcattgaacatatacatttctttagctttttccaggggacattgcacctaagtttcaaaacacacaaaatagatcccctttactaaacagttttcattttggggttacaaaaaagtcaatgtttcacaatcacaaagcataaaggtacatggttctgaaacaatttccaggcagatttctctcattcactgtactagggtagttttggaaacccagaccatgatccattccttacaaatgatctccaccatgggcctccctgggtctccagaaaaaaaacaaagaaaactgggggcaaaacaggagtaaaataataacctcaggactcaggaaacaaacacaaaatacttgtgggagatcagaaaagtagaggacacaggttctccttcaagtacatcacagtagaaaactacagcacatttacagccttatttggtcactgtctacctggttgctacatgaacaaaacttcacctaagacacagaagaaaaattaaagctatttacacagataacactgtggattcgaaagagcagtcctctgcagaccggcactccatctgacaaaagccacagtgctcacagaagaggcaagtcagtctgctcgcgtagcgtcctttgaaaaatcccagtgtacaaacatgtgccacgtcaccacacaaaaccaaagtctgctcagagaggtgggctatggtgtgcaggctgcaacctttctctgcaattgttaagtcttcaaaaatctgagttcctcacataaaattctgtgctgtggccagagctcgttttaccattttcttagattggatcacttttaggatcagcttcgttgttctttgcgtagacaatgactctcacagctttctccaagtgtcccagaagcactaacttactgaaaatagaatctcatcaaagcttaacatattcactctgaaaacagcggagctgctgggtcg

SEQ ID NO: 161386 - DNA, 1000 bp, Homo Sapiens
tcataccaactatggcaatttttatttcatttgccctgtagccatgtcatataccaggtttttaaaaaatagggaaataaggaatttactcactttgacttcagattcactttttcaaatgtcactcacaattatttcacatagaagatattcaaaagacaaaggatttatttaccctttttgcaacagaaaattacacaattaaaaattcctatgtccagtgtcactgaatggggaaagaggcaatacattttaaaaaacaagaggaaaaaatgctgaggaaaaaaatgtgcaacaaatctaaattcttctaatcttgaattcttatatacaactagaaaaggtaatggcaatatagatggtctctgatgctcagaaacacatttcatcactttcttttctgcttcatccagacattttcagtactgtcaagctcaaaaacacagttttagaaagatgataaataagagaatctcaaagacttcacatgagctcttctgatcagagcagagcaaagtaagagaagccttacttgtctgatcatattttaaaataataggctccgtatggttcacaagacagaagagagaagtaagtcagctttcaatcttggttcccagacagagattaaaacaatgattacaatctaattattatatgagacagtatttcttcccagattatatattttataacttgaacagcttttcttaaatactctctcagggatgattttaagtaaaagccaaaatactaccagttaatttcagattcttattatagatttttcaaagtccgcctgtgtgcagaagcaaaattatgaattgcgactcgaagagttgaattacccccagggacatcacaggaattgatgaatgaatgtagtgcccgagtatatgctctgtggtttttatagaaaatacagttgttggcacaggtatcaggatgagcatcccaaaaatcaggaccacaacagcatagtggaggtaaagtaatatta

SEQ ID NO: 161387 - DNA, 1000 bp, Homo Sapiens
tcagccatgactgggagtaaggtgggagcgccgacacctctccccctccacttgcccccatcctgcagcaatggacaagcatgtgggcttttcattttctgtgggctttttcagtggggatgtgacgtgctcctcctgcttggacacctcttggctcataaaatagtggttttcaaactgtagcgccctggaattctcacctctacggtagagggagcctggacaagggtggccctggggcccccattccttctgcacagcagcaatggcggggccaaaggtagctttgacctccacactggctcggatccaggccggcagcttggccaggacagggggccgggcgtatcgctggtccaggagcactatgctggcaaaatccttctggtgcctgatggccctgcctatggactggttgacggccttcatgcacaggttctccaccagagccttccctgggggtgcctggccgggggctctgggtctgtcaccctctgtgacactggggtcactcacgagggtttgatccaagtaggccatcttctcctgcagctctgcagaccggcctaggttgtcagagaagttgatcccttcactcatctttcctccaaccacagagaggagcagggcctctgtcacctggcctctctcctggccacaggcctggatgcacctggaatacgccagcagcacctgctccacctggtgtgcgctcttaggttcctggaatatcttcttcctggcagccagacggcccagcaggccacccttctcccagtgggcatggacctggcgcaggtactcgtaggaggagaagaaacagaccacccctccagaaaccacaccgcacaggttacagaggatgcgacccacctcgtccatcatctgaggcaggtctcttttctggaaggtgaattccagcggctggttggagatcccgctgcagatgacaaggggcagatgttgtctggagggatcacgtgaccatcgccagtcacac

SEQ ID NO: 161388 - DNA, 1000 bp, Homo Sapiens
ttgaaaagttaaaaattccttaattttttattcctggtaccactaccacaatttacagggcaatatacctgatgtaatgaaaagaaaaagaaaaagacaaagctacaacagataaaagacctcaggaatctacatctagttgacactatattgcattaatcaatagctgcactttttgcaaactgtggctatgagagtcctgaacaagaagggtttcctgtttaagctgcagtaaattttctgactatggatcattgttccttctgtggcagatttttacagttcctctaatgcatttgggacaactctctcgaggtaacctgcagctttcctgacaactccttgctctctctcctgctaagaactgtagcccttttctgctgtttttagaaccttctgctaccatatccaccacttccaccaccagatccataaccaccaccatagggactgcccgagcttcttccaccaaaactgccccctttcatgggtccataatttgattgctgttgtccactatgatttccaaaatcattatagttcccaccaccaccatagttaccaccgccaaaatttcctccttcattgtaaccatcatatcctccaccacctccaccatatccaccaccttggtttccatatcctgttccaccaccaccatagccccctctactactataaccaggaccaccaccatagttgccaccgtcacgtccaaatctattatatccaccatcacctcttccataacttcctctgctgccaccacctccaccaccatagcctcctcttccaccaaagtttccaccaaggccaaaattacctccagcacctccaaagtttcctccgcgacccataaaattgccagatccacctccatgacctctctgtgatccagcagactgcatctcttgtttagaaagggcctttttcacttcacaattatgcccattaatagtgtggtatttctgaacaacaattttatcaattatatcatgat

SEQ ID NO: 161389 - DNA, 1000 bp, Homo Sapiens
cacaaacgcatttatttattaaccaaagggatgatcctaattaatccaacacactttgaaatagctgcatgtaaaatgttcgtgataaagataattgaacgcagtaatggaaaaaaaaaaaagaaacagtatggagatttgctcattgaactgagcttggtcattctcttagttaactcctgtccaaagtgatgatggaatttttattctactttttcatagatccgagtacaggcgacatggttcatgacacactccaccactaatttcccatctttcaattttcttgttattgtgctttccttcccatcccactcctgatgctgaaccaatgcaccatctgtaaagttgcagacagtctgagtttttctgccatcagctgtggtttcttcaaacttctctcccaggggacaagaaaactgtgttgttttcaaagtgctctcagtttttatggtgaggtttttgccatcacaagtgacaatacaatctggcttggccattgcgcccatttttcgcaaagctattcccactcctagctccttcatgtattcatcaaagcctttgctgtccaccaggcgccatcttccttccagctgctgaactgtggccatggtgggtgcgggcgggctggcatgcagagagtggtctgcgtcggcgtggcagcgtgctgtcacagccttcagctctccaactgacattggttgtttggagggggacaaatcctgactcaggatccaagtatctttcttcccctccatggtaaagaatgtaattcttaaagaatagtgtattacttccactttcccatgacatttaaatcttggcttatgagattcctgccttagagagagaaataaggtgttagggacttggtaaccatggcccaggaagagttctggggcaacataagagcaagtcccataaaaggctcccagcatctctccttctgcaaatgtggtgctgaaaccaaagttgactatatttaagttatgttcttcat

SEQ ID NO: 161390 - DNA, 734 bp, Homo Sapiens
tattgttatttttctttaatggggaaaattggactcccgcgtgtcagatctgtggatttccgaaaggcaatggaaatggtactgacatcactttgcactttaacaatcggatttggtcagggtacaagttgtttgtttaacccgacagctcggtgcaccccgtcgcacgctttgcacactcattaaaacgattattcacgacctgtcgagtgttttcgggttcattcacaggaaaggcttggaacgagggacagcaattcaagtcaacactgtccactacccctatgcacgtgaggacgagttgctgcgtgcgtaaaaagacgaagggaggggtgggtgagtacgccttagctataagtcccgttcatccgatgctctggaatctcaatctcgacagaatgccaagaatgcttggtcctacaaggaccacgtcgtcgctacgttaacttcaagggcttctgtctgcagccacccgcgggactgagcggctccacctcttacagcgctgacgctaaggataagtagtttcaggaaaactcgccagggtgagaagattaattccttttccatctcccaaggccctatcgttggatcttgctgtaagagccattccagtcctgatatccttttcctcggcatccttcggacaacctcaggcagagccctgcttgttggaatggctgcgcagattttcatgctggagagttccatctgtctggcagaagctgaagtgg

SEQ ID NO: 161391 - DNA, 556 bp, Homo Sapiens
tctattgttacttttttcaatttattaatgacatactgtaaacaacattaaaaataataatccctttcatttctcagccccagcacagctgcctcctccctggggtttctgacactctcaggatgtgggttttcacactgtgtctctcgcacagtaatacgtggccgtgtcctcagatctcaggctgctcagctccgtgtaggctgtgctgatggacgtgtccctggtcatggtgactctgccctgaaacttctgtgcatagtttgtgccaccactgttagggttgatccgtcccatccacccaagctcttgtccaggggcctgtcgcacccagtgcatatagtagtcggtgaagatgtatccagaagccttgcaggagaccttcactgaggccccaggcttcttcacctcagccccagactgcaccagctgcacctgggagtgggcacctgtagctgctgccaccaagaagaggatcctccaggtccagtccatggtgaggagctgagctctcaggggattctctagaggacggatgtggttgttgggtgatgct

SEQ ID NO: 161392 - DNA, 1000 bp, Homo Sapiens
tcagggacattggtgagggagaggagagccagttggctgccgctgggactcgggctcctctgaggatttcttccacaagtcttggtattccagcacgtgaatggcttgtgctgatcggatgaagggttcgtggcgatggattgcgtctcttggtggactgcactgtgtatgacagagatgatgtactaaaaactccacagctcgatttggccaatttcgagttgaaaggatggtactggacccaggcctcataagtagcttgtcatcaagatctaggagcttgtccattagggagagatttcttggctgtagaggcatcccataaaccaagagaccattaacatttggctgatgactacttgcttgacagagactcattggatttgaggtaacggacagcaccttagactgtggcactcgtggtaacaccaaaggatgtggctcactcagcacacagaaactttctgaaacgggtctggtaactgcaacattactctcatcatggtgggcaaatccttcccagtgactacgtgtcaactgctccatacagctcacaaccttgctccatacattgtcaaacacataaacaaggacatcttctttcatgcagtaaaatggagcaatgggaggataccctaatttctgtttctctgtagctgcttctgatttcttcccatgaaatccctcttccatatctgtgcaatcgaatgctaggtattcctcaattattccttcggagatgattatagagtcttcctcgtctctttccataaaagaaaagctggaggatttggcaatagaagatgctttatgagcatacgaagatgaaaaatgtaacttctttccccttataccaaatatagtagaatctctttcttgagacaaggttgtttcatatgaagctgaaacagcagaaggggatctaggatacaatctataaccttcacttggaatgattatctgcctacctagaatcctgaggtgaggaaagctagctgtc

SEQ ID NO: 161393 - DNA, 1000 bp, Homo Sapiens
gcaggtgtgcagagaccatttattaccccacggctgttattgcctgggaagctgagtgccctgagaccccagccccctgaggctctgaccgggacaaatcccacaggcactccgcctcatcccaacacacccaaatcaccaatcgtgggctctcccagtcctgccccatctcccggagagtctagtgaggtggggagggcacgtgtgtgtacatgtttgagtgtgtgtgcacatgcacatagacgtgtgacatggggcagctcgtcccagaccccaaaccaaaggctggcgggggctggctgagaggtagttgtgcctactgaggaagggccacagggcggtgctcactataagtcagaactgttcatttctgctgcaatggaactaggcagccttgccagccatccggcggcagtgccggcccatgctggcggccacctccccgaggctctgactcttggaagggtagccccggagacctggccgtgtcgaaatggaaccatggctcttgttctgatgaaagccttccccgggagaggagtctcctctgagtgggctccgcgcggtgggatgcctgggggagtgtcctccggcccagtggcccccgctggacttctttggttctgattggacgcagatgtggaggacgcaccaagtgtgaggccaggccccgccctcccagactcctggctcctctgggggcaggagggacgccagctctcccggtgaggaccatccctcctacctgcgccgaccacgtgcctctcaggggcccgggcagcagccagactcctcatgccgcgccaggagggacatgcgggagaaggtcttggtgcagcgccggcaccggtacttcttggcgtctgagtgcgtttgcagatgggcccgaaggttggagcggtcggcaaaggccctgctgcagtgcgagcaggcatagggcttctcccctgtgtgggtgcggacatggccctgcagtaaccagggcctggagaaggccttg

SEQ ID NO: 161394 - DNA, 1000 bp, Homo Sapiens
tttaagtactcttacaaccattctttttcacttttagtacagtatgcaataaattacatgagatattcaacattttattataaaacaggctttctgttagatgattttgctcaactttaggtgttctgagcatgtttaaggtaggctaggctaagccatgatgtttagtaggttaggggtattaagtgcattttcaaattaccatattttcaacttacaatagtttcaacgggaggtaaccccatcgtaagtggaggaacatctagtgcctggcacagagccggttctcaataaatataactcttctccatcttcttcaaacctcaggccaggtttcagtgacctcctctcactttctaagattatttttgcttgctggtgggtttactgtcatttttaaccacatctaacctaccttaaaaaagtgtatggatgggggtgccaggtacaaagacttagcataaagaaaacgaccatttactttgaaacataaacaaaggccaattaataatttatgagtctgttccttgtccctcgagtttttagcaggcatggaatcattccacaggtcattatttcagtttggtctctgttcctaaggggtgaaggttttctgagggctgtggatcccaaactcacctggctcagaggctcaaacagcctctctttgtccatcaacccgatttagacagcatcctgggcctgaaaaccttctgtgctggcttcaagtgaaaatagttcactgggtcaaaagtaggctggtccaagacgcaggacggtcagtaaacgttggctgtgttcagaaactgcggcttggctgtttcttacattgatttatggtttgtttccatgaaaccgaaaatgattggtccacctggcagctggctggctggctggcaactggaggcctttctgtcctggctgagggccctggccccttggtggcctttgggaagcagcatctcatcgggccgttttttcgttctggcgggcggccggc

SEQ ID NO: 161395 - DNA, 1000 bp, Homo Sapiens
ccaagtgttagccatttataaataagtacatttgctttcatacatacagttccttgtacagatgacaatctgtatacatggggcaggaaaatgcattcatttgaacttttcacatctatctcacacagctcacatgtacagacaataaaactgctcaagcaagtacagcaaaggaaaatgtctttccttatacacaggggtagatgcctctgtggggtgtggggcatccccactgcacggcttcacaactgtgtggtgttcaatatatcaggagagagaacaaacatgcattggataatatactgtacagagaaagtcctttacatctgagtcatagaaaacctaaaggaaaactaagtgcattaaagctttttccagcaagtgtcttgaaaggacagcaaagaggaggaagaatcaaaatcatattagtacaaatcactctttaattgtagactgtacatgtctgtactaattaaaatcatcttggatttggaggagacagaacagagacaaagatgctgtgctagatggaaaggaggccacgcctgaaaaggcacctgccctgagcctgatgaggaactggcctcactcagcaggaatcagccaaaggaaacaaaaaacaaaacaaaaccagaacaggaagtgtaacttacaggatttccaaaatcacctgtgaatgaagtggagatctggagccggcatctcttaactttttttttccccccagtaaattggtatgcaataaggcaggtacattcaagtactgaattttccagaattaactcttgtctggcgctggggaccaaagggattgagttgagccccctctaaccagactttctggttagcgattagcaaaagaaaaattcagccagcaagtgctacaaaaacaaagcagctagggcacttccgttccacagagtaggtctacctggaaaaatgagcgcggcgctggcctgatctctacgcgtccagcggcagcctggcaagtcagctcagc

SEQ ID NO: 161396 - DNA, 1000 bp, Homo Sapiens
attcaaaagtatttatttccacaaatttttatccacagctaaatattacagtgactattacaagcatttttctataaacaaaggtgtagtttacagatttgtgcaaagtgggaaaatattttcatcagtagtctttcttccatggtgttggattcacccctgaatatgatctgaactctttcagagaggcagtccttcatctaaatgtcagttggtggcaaaatgttatattcaaatctggattattctgatacagtgtcactttagaaagtagcttagtttcatttctgattgatcccctttgttagaattagaaattttttgaaaaacaatcttttgtatctaatgacctttataataaaaaaaaccctgtcctgtgtttctcattggcattaacctctgtctacaccctctaattctctaattatggcaccagtgggtataaaaagtgaattatggttatttggctcatgcagcaaattaattggagaaactgaccacaaatattctgtgaagaactacaaggtcttgccccatgctgtcccattttagtgaccatttagttatgcaggcattatacaaatgcctcaatttaggacacccttgctgtcttagtaggtcaagtgtatgaaaatttactttatgcagaagaaatgaattctaatttattggttactggaatcttaatgtatgaaagctctaagtaaatatttgatgaattgatggtagcagtgttgatttttaactgttccaagctcctagttttgttttgtttttacaaaagccttaaaatttagtactagggaaatcaaaggaagcaactcccactgacatgcttcatggaaaggggaaaaacatctacctttgggtctaatctgcctcccaggtgagcctacaggtactggaactctaactgcaactatgagggcacagggaaaatgcatgtatgtaatatgcttgtcagcttcagcaacaactcatgtgtacattcacatttact

SEQ ID NO: 161397 - DNA, 1000 bp, Homo Sapiens
tttcttaatatttacagtttatactctggaagagaccttgtcaagagaacaaaaacacaagccacatattgaagaaaatatttgcaaaatacagatctgagaatttgtattcaaaatatataaaaaattgttaaaactaaacaataagttaaacaacccaattaaaaatgcacacagatctgaacagacacttcaccaaagaagatctacagatggcaagtacacttacaaaaagatgctcaacatactagagaactgaaaaccacaaaaagatagcacagctggtctatatctcttagaactgctaagctctttaacaaatgacaaattgctggaggaaaaacaagaactcttttcattgccagtggaacacagtgtataagaccaaactatgccaccccaaaatataatggtaggaaaccagaatatgcaaccccaaaatatgtccctttggcttaagaattattccaagctaattattttggaaaaaaaaaatgctaacaaaggaagttgtgaaaataaagtagaagttacttgtgtaaggaaaatttacatctataaaggaaatcaccatttaaaagctacctctctcaacaccaagaagagaaggataactaaatcactgaagagtcttatcaatggagaatgcatggacttaagtctgtataacgaaccttacccttgtctaatgtgcttttgctggttaactccccactactgcacctcaaatcttctttctttaagttgaagatagtatttatgcttgaattgaaagccacctgttggagatttactcatttttccctgagtatctcccatgtaaccataagatatacatgtttttaaacttttctctttttctcattttaatctgtcagtttttacagagcgttccatctaagaattccaaaaacagaaaattatttttcctcccctattacaagttgggcatttttttccaaagctaaacaagtctcaccttacaatccaaaaataacat

SEQ ID NO: 161398 - DNA, 1000 bp, Homo Sapiens
cttttcctggatacaggtcttgataggtctcttgatgtcatttcacttcagattcttctttagaaaacttggacaatagcatttgctgtcttgtccaaattgttaattcagcttaactatcattcagctcaggaagatgactcagggccttatccataccttcaagtttgctcttagcaagtaattgtttcagtatctatatcaaaaatggcttaagcctgcaacatgtttctgaatgattaacaaggtgatagtcagttcttcattgaatcctggatgctttatttttcttaataagaggaattcatatggatcaggatgtttgtctttctttgtatcggtgctcagctgagtctgcagtgcttcagaggcagctttcattttataaaaatctatgatttctccttccagttgttttttctcttcctcgagcttccttatctcctcctgttgaatcattttaagatgctcgaacttgtcctgcagtttgaccacataattgaaccttcggatatcttgaattgcacttgagaagtctaaccgattaaaggcttctcccaaggtgcaatagccatgcctttcttttgtgctttctttatggacatagatccatttttcatgataaaaactttgagtatttgtgtcatttctaaaatggtcctttttcctttttttggatgcatattcatgctcttcattattgactatttctccatcttcactatttaagatactgaaataaagacatattctattaaaatattttttcagggagatcttcatttggcttttcttttgtaaaaggatacaaatacttcaaagtgacagactgtgggcttgaaatcacaggggtaatgtctaatacatttttgtttcattttgagaaataagatgtatcctggttctttgagaatattgtaccagaaagtgctgaacatgttttagaatctctgaagggtcttgatatgcttatccaaggtagtttcaaacatcaaaatgg

SEQ ID NO: 161399 - DNA, 1000 bp, Homo Sapiens
ctgtttttgaaaaatttattttatactcttagaagctaagaactttgccacacatgaaccaaatttagaattaaggttcttccctagtgtatctacttccttttgaaattttataaacaagattttatacacaagaggtagcagaggaaaattccagtctgcttgttccaagctcagaaggtaactgcacacacctcgatgttagcagggaaggtggggcaggacagggtaagtctgatgatacggcactctagttcctaaaactgactgtagttgtcagtgaccgtgtgaggactccaggagaagtcgtggtgagatgcccgctgggatgcttgttttctttcccaggatgccttcaacgggcagaatcggccatcttaagatcggcctcactaagggagcttcttgagaacacacagcattattgagttaattgtgcaattcctgctctgtttgcagaccattttgaaaggtttataaaaacatcttcatccaaaaaattggcagtaaaaatgacaactcttccaaggtaagcctgtcataactgtcactgttgtactacattaaaaaaagtcatcagcaggttcattgactgtagctgtcagcaatcaagtggttaccagcaaagtgaaaacgatggtcattgcagcaacaatataagcaacatgatctgaagcgtataatatacacggtggacgatcctgatgaagctttacagtgaggacggcaggtgctaggggtgcggaaggcgttgtttccataggaaataaggggactagaagtggcaatttcactcctgattttgggctcctgagagtgcagtcgccagcgatgatatcccagtgtggatcatcgccagcatttcaaggtcatgtcccacacaatctcttggtgaggatgtgggcggagagaaggtgagaatagggtaggggaaacagtaggacaggaagtattcacgtactcaaaaccaatggtagaacatcacatttcaaactgcaag

SEQ ID NO: 161400 - DNA, 1000 bp, Homo Sapiens
aaatttaaaaagatgtcctcactgcacaagtgactacgggctacaggcaaggatgggagacggaggcttcaacacaactcattgcacttagaaccgttactaaccgaaacaccatttgcttgtcaacaatgtacccttgacagcagggagaaacttctttatagtctctgcttcagacaagatttacagctttctccaaggccagaggccaattgtgaccacaagtcttgtttcttgtccaccagacccaatcctctggcaccttgtaccccccgttcctcagcaatatgctcggcctaggttccagaggcagctggaaggaagcagctatgggctcattcagttctgtttgcccaaatccagaagccctaggaaagtcccgtctgagtcttgactcctgacccttgcagtggctggagtcggtactggtgcacacccccactcccacggtgtgggtagtgctgtgaattggaaaccgcagataccctggaggcctggtagacagctgactgcccagcactgggcagactgatagtccgtaagtctgatggcaatgacgacctagagttctgaggaaaggaggtggaactcagagttcctgtgctggactgagaaactgaatctgaggttggcgagtctgagggtccctgcagggtagggctagcagcactagaagggcagctcctccttggaagattgctgccagtgctgtttccagaatgtggctggctgctaaaataccctggtgtccccgtaaatggggccaacgagtctgtggacacagggtgggcggggctggaataggacgtggaagagagggatgattctgaagaaccgtgagagggggggtttccaggtctcagtgcagtagttcgataactgtatcctggagactgtgtaggatgtcctctgaagggggaggaactctgctgaaggaggctttgtgattctgtccgaggactatcacactgcaggagctggtagctgtatctggaagggc

SEQ ID NO: 161401 - DNA, 1000 bp, Homo Sapiens
cactgttttctttttttttattatactctaagttctagggtacatgtgcacaacatgcaggtttgttgcataggtatatatgtgccatgttggtttgccacacccatcaactcatcatctacattaggaatttctcctaatgctatccctcccccagcctcccacccactgaaaggccccagtgtgtgatgttccccaccctgtgtccaagtgttcccattgttcaattcccacctatgagtgagaacatgtggtgtttggttttctgtccttgtgacagtttgcggagaatgatggtttccagcttcatctatgtccctgcaaaggacatgaactcatccttttttatggctgcgtagtattccatggtgtatatgtgccacattttcttaatccaatctatcattgatggatatttgggttggttccaagtctttactattgtgaatagtgccgcaataaacatacgtgtgcatgtgtctttatagtagcatgatttgggattatgtgtgtctgttggcttcataaatgtcttcttttgagaagtgtccatgtcctttgcctactttttgatgtggttgtttgtttttttcttgtaaatttgtttaagttctttgtagattctggatattagctgtttgtcagatgggtagattgaaaaaattttctcccgttctgtaggttgcctgttcactctgatgatagtttcttttgccatgcagaagccctttagtttaattagatacgatttgtctattttggcttttgttgccattgcttttggtgttttagtcatgaagtctttgcccatgcctatgtcctgaatggtattgcctaggttttcttctagggtttttatggttttaggtcttacatttaagtctttaatccatcttgagttaatttttatataaggtgtaaggaagggatccagtttcagctttctacatatggctaaccagttttcccagcaccatttattaaaaagggaatcctttcc

SEQ ID NO: 161402 - DNA, 1000 bp, Homo Sapiens
tcaaaagcgggacctgggaaggccgctgagagccatgagctgggctgggctgaaagaggccactgggaggcaggaggagctgggcctggagaggctgactcgaggaagttttgcacctggagaggccgccgagaggacggagctgggcccggggaggccgacttgctgctcttccaggcccaattccaggccgacttgaggacgacttgggcctgcagaggccgccgggaggcccaagctgggcctagaggagcccaccgaccggaggccgtttggggcctgcagatgccatcggagggcaggagctgagcctggagaggccaccgtgaggcctgacctgggcctggggagcttggcttcaggaagctgtgggccgaccaaggccgccaggagatgggtaggcactgagtccaaagaggttgttgagaggcaggagtcgggcctggagacgcaaccaggaagaagagctgggcccagagaggacacccggagggtgcaagtgggtctggagaggccgacttgaggaggttctgggcccggagaggccgccggaagggaaaaactgggcctggaaaggccgttgtgaggaatgagccccatgggcctgaagaggccactggcaggcgggagctgggcctgccgaagcggccgagaggcaggagctttggacttgggaggctgcagtgaggcgagagctagctgggcgtggagagtctgctgtgaggcagaggctgggcctgtgcaggccttcgggaggcaggaggccaggccttgtcgaggcctgcagaggccaccgaaagtcaaaagcggggcctgggaaggccgctgggaggcatgagctgggctgggccgaaagaggccactgggaggcaggaggagctgggcctggagaggctgactcgaggaacttttgcacccggagaggccgccgagaggccggagctgggcctggggaagccgacttgagaacgacttgggcctgcagaggccaccgggaggc

SEQ ID NO: 161403 - DNA, 1000 bp, Homo Sapiens
aaagttagttaaatacagtgcctagaaggaacagacggcccagcgcaacaggtcgaggcctttgtccttgatgatttttttttcctctggctacgttcagtccgactgagtgcagcgctatgcatatgtaaacatattcgttaaagccgatcacctttaaggtcattcggaaaaaagcggtccttgttttcgcggtgtgggtgtgggtcgtaacagcagtctcattcccccgggaggaaggctcttgggcgttggagagtcccactcgggttgtgccacaggacaatgtgggcagggcgtgagcggctcggcgggcgcggcccgggcgttacctcctgccgatctcgctctgccgcaggaactggatgttgttggcgctgtcggccagctcggggtactgctccaccgagagtacgtagtacccgtcgtagccctgcaccttgccggcgctcagcagctgccgcttctcgccctccgtccagaggcgcgcgccctcctcgccgtcgcgcacgcgctgctgctcgcgcgcccaggcccgggcgagcgcgcgctgccgcgcctgctccaggatgcgcgccttctcctcgtccagggtcatgccgtagcgcacgtgcagcgccagcgcgccgaactgcatctccacgtccgcgaacctgcgcgtcctgccgttcaccaccgtggtggactgcgacaccgtcacgttgatgccgttctccagcgccttgcggccgctggtcaaccgcagcgtgcccaggtcgctctcgggcgtggtggtcttgatgaagtagtgcgtgtccttgccctcgatggtgaagtgcaggttctccaggtagaaggcgttgttgagcacggccgccaccttgatgcagtcctcgttggcgatgttgagcacgttggtctgcacgcggccctggctgacggccagcatgacgcccttgccgatcagcgacttgaccgtggcgaaccacagccaggactgcgcgccgccggcccggcgccg

SEQ ID NO: 161404 - DNA, 712 bp, Homo Sapiens
agtatgataattgcggagtttaatgaacaccttgcttcacttcggggtctcatctgggatttcggagtgaactgtgtccagaggctgccagtggcaattcatgagggagtcgtagagttcttcacttttcaccataaactcttggtttgattcctcaatattcaaatgaagatgtggatctgtaaccccaacactttgggaagctgagaccagtgaattgcttaaatctgggagtttgagatcagcctgggcaacatactgagacgtcacttctagtgggtcttcatcttggttttcagctagaggtgtggtttccttaggcataaccagagttccagctgtgtgttcaggggtctcatgcgcagaaaaacagtcctttccatttccatccactgcacagccatagctgtagccagaaagaaggtaagagccgtgctgtcgcgcataccagttgccatagcggtaactctggctgggctggaactcctgcttcactctaatagcagaggggagactttgccagtagcagtaatagttattttgttgagctatgccaaaatctgcagaactctctggttgggccatttacccagaaacctattaacgacagaaagcctcgttccgctggtccctgaacaaaaactcctaccctactagtacacagcccacaacaatgcacgctgccggcgctacagcccctaagcaaccggcc

SEQ ID NO: 161405 - DNA, 1000 bp, Homo Sapiens
gctttaaaaatgtttattcagcgcctgcaatgtagaaggcactgtgtttggcaccatgaggaatacagaaaccaacaaggcatgattcttgccttaggaagctcacagtctagcgtgggaaattagaaattgcacatgcacacaggtaactgtcacaccaggcaggaagcactaaatgctgtgagattgataccaacattataagaacccagaggaagaaaacactatttggggatgaggataagagattagagaagttcccttagaagtagggggtttaaacatgacagatcaaatgtagataggaaaaaattcagaggaaaatgtaatcggggaaggctctaattaaaaccagaagcaggaggtacttctgtgatgtgatggaggcaggagaagccccgctgggctggattcagaggggaggggagacaagaggatggggaggtggaggagagagcagggagtggagtgggaggggaggctggaaagatgtgtggggatcaagacgggaaggtgagtatgtgagtatgtgtgccagacaatggtgtttccatgtcaatggaggtttctcagagagaggtgatctggctggagaaagcttaatctggtggcaatggacaggtgactttaagaagtggggaacgagggaaggaggccagtttgaaaatgataacaagggtccagactcagtgatgcagcagtgaccatgagaacagagcagctgcaggtagaagatggagacagaactggggagatctggtggaggtaagccgggtggaaagatgatgtcaggtttatacctagagacacatgatccattcacaaagccagggaaacctaaagagaaaacacttagaatttgaggagaagaggctagggctgggcctgagacatgggctggcctccaggtggaggggtccagcaggcaggtacaagccggatgagagttcagggcagagggcagagccggaaacagaccaaaagctgccatggagtggcg

SEQ ID NO: 161406 - DNA, 1000 bp, Homo Sapiens
gagacagtattttactcttataggccaggctggagtgcaatggcgcgatctcagctcactgcaacctccgcctcccgggttcaagcaattctcttgcctcagccacccaagtagctgggattacaggcgcccgccaccacgcctggctaattttttgtatttttagtagaaatggggtttcaccatgttggccaggctggtctcaaactcttgacctcaagtgatcctcctgcctcggcctcccaaagttctgggattacaggcatgagccactgtgcctggatggtcaattgatttttgacacggacaacgaatggatcgaatgggatagcagagtccacttgtgccgtggaatacacaaacacgcaccaggggaaatgagcctcagccctgacttccaccacaagcaggagtgaatttgaggtggatcatacacctcaacacaaaagcgatgtcctatgtctttatgaccctggaggagaaaaaaattgcctaaaaatcataaaaaacaaattccaatagaaatgactggtaaatatgcaaagactggactgaagaactttgatttgagaaaagacgtcataaagggagaggaaggcccagccacagactcggaggcagcacctgcaacattcctcagggaggagggctggaatctgggtgcatgaagagctcctatgaatgaatgagaagaagacagacaatcccacagaagaacaagggatagccttaaacagagatgtcacaccaaagaagatacaacttgtaaatgggcccagggaaagacacgcaatctcactggtgatctgggaaaccaaaaagcaacatctcaacagcagaccgtggtgcaggccccccagacaagcagccccgggccgtgtgacctcgtgctcctgcggatgtgaagcaaggccctcaagcccagtgtggccccgtaggaccctctgtgaccaggcagagctgggcttctgggctgtccagtagggcagccgttgcccac

SEQ ID NO: 161407 - DNA, 684 bp, Homo Sapiens
ttatggcaaaggcttcttggacagaaccaccagttgctggcaggtttgcacttggcctgtgctgtaatgcacttttcttgggggaggtgagtgtcgcatctcttcccattctaaaatgctgttgtgcacaggacaagagtgctcacccattggctgtatcccttcatgacttgacttgggctcagcctgtttggcaggtggtctctgaggctcccacctattttcaccttggttcagttctggtttatgcattgtccagactacccaggatgtgacgattgcagggaggaggtcatgtttgtcataaaaatgctttggctccttaggattcagcaaaggtatccactgcctggtgtctgtggtgcctgcaggacagtgcattctggggcccagggctgaggcttctcgtgtccttggagctgctgtcctcccgaggagtgtccacactgcagccagctcagcctcaggtgtcttctctggttttgaaaccaaatatggcattgcagtgctgtgagatacaccacagatacagtcagctttgtcctgggactggatgttagagatggttaaggagtggtcagcctcagacctggagcctgagaagtgatcagggatcccgtcccccttgccatggtttccatcactcttaagccacatcacacaccaagggtcttccctgaccat

SEQ ID NO: 161408 - DNA, 1000 bp, Homo Sapiens
aaaatctcagaaatgttcaataaacatttgcagagcgagaaaataaataacatcgcaaaggagccagtggctcctcttttccccgcatgttccttgggtcaggggtgcatgtgtctcactagaagtcacatgtattaaaagcaggtgagttccagctctctacaaccccactggcccccacccaaatgctcccaacgggtccctgacaccctcgctggtagctcctgcctttgataagctcctctagcctcaactgcttcttgatcctggctcccttcccagacaggctgcccagaaccctggttcatctgctcactggagccgctttgccagccagccagagaccccctcccagccatggcctaaagagccaacagctgggaacttgggctcatccccagctgcgtctggtcggcttggcggccaactggaaaacccagggcctccatggcgctctggacagaggaggccccgatcccagccccggctgccagccaatgccagcctgtccacttgacagaaaaacacacgctggccgcctgccccagggtgtttccagaagagaaatttaatctaatttacatacttctaggtacatcgataaccaaaatgtggccactgaaaaaagttaaaaggtcaatcagctcctggcttctagctggcccaggattgcaaaataaaaagatccacgttccttattctctacacaaaacgcgtttttaaaaaagtgaaaggtctagggagctatacatagaaagcaacagtgaaaagggagagggagcaggagtgggggaggagagtcccaccccccaaccccaccctccagggccccagagcccctgaggctctttggggggccttgacatggcaggaggcagctgtcagctctgagctcttcccagctgggaaggcccctctcgggggcagccaacaaggatttccgtggcattgtgggctcagtggggggctcccaggccccagcaggccccacagagggagc

SEQ ID NO: 161409 - DNA, 498 bp, Homo Sapiens
tcagggggagtgagtgcactctatatgatggaggaagaggacattggtgcctgtgggtacttcagcaccaggcttggtaaagcacatactctctgtagcacagccccgcatagcaaatctgggtttgaaaataccagcctgcacgtgtccagataaggagacgcagtggttttcctttccagtacagtgggtcatgggccccatgcatttgtccctgaagctcgcagtgcaggcggggcacatcaggccattctcagtaagattggtcaagggaacagacaaaaaggcactgttgcagccgtcgctctggcagcagaaggagctggttaccatgtggtccttggggcccatggtggtggatataacgccggagtagcagtcctgggacctgatgcagcccttgtaggtgtgcaccaactccttgccctcccaccccacccacggccacccctctctccctgtccttccgggattactctgctccccgccgccgtacat

SEQ ID NO: 161410 - DNA, 816 bp, Homo Sapiens
ctatttgaggaaggcagccgggccttcccagagcagggactcagctcggcagcagggcaggtgcacgcagcatagtatttcgggaagccacccctgcgtggtgagcccacgtttcctgagagctgtgacacgcttctcctggcgccgagcgttctcccggaggccggagaaggcagctgtgattcccaggcgagcaacgggggctgcccacctcctcctctcgttgtcatccaggtgagcgaagagcacgttcttggagatggccttggccagcgcagtcatggttttgtagtccttgggaatcaccttcctgacgtaggacacggcgtcctcctcggtgtacacctcggcactcacgcctcctcgccggcggcgggccttcaccacagggttcgggggggtgggcgacacctcctcatcatgggagtccgactgtgagtttgacttttgccgcgccaaaatctgcctgttttcttcgggatcagaaccagcagctccgttcacagccaaactcgccttcaaaaggcaaggagatggcgcgccaagctcagcccctgaaatcacacacgcggggttgaacgtgagtaactcagcccatcgttccgcactgtgaatctgctccaatacctgcagagacaggtccagctcccatgatccgggggaccaggggaccagctgggaaacagtgatggagcccagggtctctccggagctgcgtcctgccagccggcggggctcatccaagctaggcaggcctggcttcctcaggctgtggtcccagaagcacgctccacccagttctgctgtggcagccat

SEQ ID NO: 161411 - DNA, 1000 bp, Homo Sapiens
ttcagaaattaaaacatttattacatgaagaagaacggaatggggatggccaggttgccggcctgggtggggaggctgggggcgggcagggcagggggaatggggtccattcgacctccccgagggcaacgtccacagctgtagccgagaaaagggcaaatgcacgaggggccaggcccatgcccagctcggggtgaaggcggggcactcaggctggtggggcagggggcgccctctctctgccccttcccaacttaaataggcataaataaaaagcgtccagaccctcaggccaacagaggctgccctgcccagccccgttccgcaggctaacactagtgccggtcatcagtcggtgggccagccggccaggaagaggccaccccaggaagggggccggtcccaggccacggaggtagttggagtcagtgtccggggcggcctggccctcacagcacgatccacgtatatcgctcgctgtccgccagaaccttcagggagcaccctttgtgcagcgcctcattggtcatcctgttgacgtagcggccgctgctctccggcaccagccacttcatgaccatgtccacgcagctcttgcggtaggagctccagacactgccgctggtctgccctttgacctcagtcaggtcgcctacactgactgtctcgaagatccctgtgttgaggtcccatgccaccttgaggctggtgtgataggtctttggtcggagctggccctcctcagtgggggacgggaaggccaggagcagcaggccaatgttgatgaggacctggttggtttctgggcagacctccagaatgacgatgtcatagtcgctgaaagaacagaactgatggccccaggtagcgtcgtggcggatgacctcattgataacatattcgaagtctagtgtgagctgctccactgtcaggtactggccctggacagcagtccgctcccgcatgggccgcaggttgcggccacgaagatcagtcacca

SEQ ID NO: 161412 - DNA, 1000 bp, Homo Sapiens
tatacatgagcagtcgctgtatttgacccaacaaaacttgtcactcattctctgaaacaggttttatgttttgctcttcttccaccctgttcacagtgcttcagacccagtttgtagtacctttcttggtctaggctcattcccttggtgatgtcctcttgtattattgcattcttgatccattcccccatgtttttctttgcatatctggctttctgccacatggtcaggttaaactaacacttcttagctgtgtatttctctttggggaacttacttaacttttctctgcctcagtattttcatctgtccaaaggtggcaatctgtgctggcagatgcgcaccatatgactccgatcttgttaaatgtatagttttaatgattatttcaaagcagtatggagatgagcatttcaaggttgaggatccatatctgatgagcgtctcattgctggtggtgactcgctgtagagtcgcaaggtagtgaagggcatcgcatggtgaaggggaggagtgtgctagctcaggtctctctttctctgcttttgaaaccactaatatctctcccatgacaattcattaatccattaatccattaattgataaattccctcctgagggccgtgatccaattacctcttgaaggccttacctctcgatactgccacactggggacaaagttcatgcaacatgaatttcagagggaacaaactttcacgtcatagtgttctgcccttggatctccaaaacttatgtctttctcacaactttaaatacatatacgtttttttccatcctcatagccccaaaaactcatttcagcatcagcatcagctcaaaagtccaaattccagagtcttacttgtaaacctccgaaattgaggcaagttatccactttcaagataaaatggtgttacaggtataggacagacattcccattccaaaagggagagagaatcaaaataagagtaaaaagctccaagcaagtccaaaaccc

SEQ ID NO: 161413 - DNA, 567 bp, Homo Sapiens
ttatttaattcacctttattgtgcactttcaaaagttagatttaaggtagcttttcaggagaagttttaggacctaatgttggaaagaatgcattaacctcagggtctgtttcaacatctgtgacaatgttttgtattgctgatgaggttcttagctggacagtcactcttgctgccctccagacttattccggtttcttgggggcttattttcttctaatccaatgtatcccaaatttcagtcacttacgtcccattgtcaccattcttaccatttccatgtatcatctgcacaattatgtacttaattccttcttctttgaattggctttcattttgctcagttttcctgaaagctttccacatactgatgccttggccgcatcctggagagtctgattttgttggtctggggtgcagctctggcacagcatttctaaagccctcccgttgaaggaatatgcagccagggctgagaccacggttctggagggaggtaatatctgcaggttcttgaggatactccattaccctgagctcccctttcccaaccacagggacatccat

SEQ ID NO: 161414 - DNA, 1000 bp, Homo Sapiens
caccttttttgtttttatttttttttttgagactctgtcacaaggctagagtgcagtgctgtgatctcggctcactgcaacctccgcctcacaggctcaagccattctcttgcctcagtctccctagtagctgggactacaggtgcatgccaacacggccagctaatatttgtatttttagtagagacggggtttcaccatgttggccaggatgttctcgatctcttgacctcgtgatctgcccacgtcagtctccgaaagtgctgagattacaggtgtgagccaccgcacccagcccacagcccacttttaacccacaggagctgatctgctgtcctgtccgctgcagtgcatggacttttttctcagcccttattttcccctattactgtgattttctccaagctgtcttccccatgtgctcatgaattccgggtgatgacggataatccctgactcatccttgcaaccctgacacaacgcccaggccctgacatggagaagtgtccatgaagtctggttgaataaatgagtgaatgaatgaatgaatgaacaaaattagctagatgtagtgaggcctcttccaccaaaccacagctgaagggttttggagaaagcctcattctgcaaggaggtctagatctttattaggcctggccattggcggggcttgaacctcagagcccaccactcctagcacctcttcccctctcttctgctgtgcttcaaatggacccagagatgaattaagtcagagaaattcccaagtctcctttctatccacatccaggttaacattgctggaaagtgttttgcctactgaggacttctccttcccaatatgattcttggtatgtgctcacattgacttcgtattgagggcactgcattttattcaatgcgacagcatagcacagtgggtacatgcataggctgcagagtctgactacatttgttcaaatccagcttgaaccacttctcagttgcatggcatcaaatg

SEQ ID NO: 161415 - DNA, 846 bp, Homo Sapiens
tttaataatcaaaggcctcaagtagctgacattctctacattttgtacttagcctctattatcaataataaatactttggtaaaaccaacattgatgctattttggatcgactccacatacaagcaaactgtgtgcagacactcacttgcagaccagccttgggatgaatttcagccaacatttggaggaaccccttagttcagaagtgaacttagctgacagcatccaaatgtattatggaagcatcacacttaacacctctcctccgccgcgcgggcgcgcgggccgcggacgctccctcgtggctggcgcgagcccccggcgggcggcgcgcgcgggccgttaccgaccgttagcgccaggggctgcggctgcggcgggcggagccgggggcgggcgctgaggggccgtggggccgcaagaggcgggagcgaggggagcagggcggggacgctgctcccaggagctcccggcgacgactcgggcctactgcgagcccgggaagaggccgccggcgaggccgccactggccggctgcgcgctcccccaggctcgggccgcctgggccgctccgcctcgcttagacattggccggctggcagccacctcggccccacggtccccgccgccgctgcagccagcttcccgtctccatgacaatagcgcgatcgagaccccgcccctccccgcccctctggcgccgagacccggtagttccaggaaccagtgtcttctccctcgccgtccggcggggggtcggtagaaggaaggcgaggcggagacgtgcagacgtctgaggcctgtctctcgcccacctgctgctgccggcgcagaggggcagtcat

SEQ ID NO: 161416 - DNA, 1000 bp, Homo Sapiens
cacacatccaaaatgacaaattagggttttaagccagcactcttagacttcaaagcctcttaaccattccactgccctgctgtagggcatagggagataagggggataagctatggttgccatcaaagagttaatatatcaataatatgcggatggtgaggatgatggcagctgctaggggtctacaggcgtgtaccaccatgcccagctacaattcttattattcccaaatgctactgtgtccggaattggtgggttcttggtcttactgacttcaagaatgaagccgcggaacctcgcggtgagtgttacagctcttaaggtggtgcgtctggagtctgtccgttctgatgttgagatgtgttcggagtttcttccttctggtgggttcgtggtctcgctggctcaggagtgaagctgcagaccttcacggcaagtgttacagctcttaaggcagcgcgtctggagttgtttgttcctcccggtgggctcgtggtctcgctgggctcaggagtgaagctgcagatcttcgcggtgagtgttacagctcataaaagcagcgtggacctggttagtggcaaactgcgatgagacctcatggtcatcccggttagacacgtccctgtctgtgctgctcaagccagaccctcgaagcctcagaatgggatcttagagacaggatcttcaggccaggtggcttcccttcctctctgcgtcggtccgtcccacctcggctcggcctggcgaccctaactccgctccgcgcccccggccgcggccccggcccgcctcctgggcagccaggccccccggccactcggccggcagcccgcggcccaggtctgcaagtgggagctgggctggggtccccatgctccacacacgcgtctcctctcccccagccctgccgcttccagggccctcggtgacgcccgctccccgggcccctcggccccccgcctctcagccgggcgctccctcggggccgcctcctctgcct

SEQ ID NO: 161417 - DNA, 1000 bp, Homo Sapiens
gaagtcaagaaaagggtggacttgaatgtttatttacaggatgctgcaagataggaaattccacatagaaattagaaacctagtcagaggacaagcttcatacagtatgtacagttggaactgttcaagtatagtttcagtgtaaaaagtgctacaataacaaaccacatttaagaaagagttcttagtagagaaacaataagacaaaataccaaacatagtacacaacaaatttatgcctcagctacatgatctaaaagttaaaggtcccaggagccccatcctgaacttggaaagtgtagccttcagaggtagtttctggcacaacgttttgatcttcctcttcctgtcccgcatgcagctgagtgctgagttgcagtcagatacggaggaaatccttagtaaggcagtccggctcgtccaggcctgcgtggatgtcctctccagcaatgggtggctcagctctgctctggcagctctacagagaaatacttctcagttaagcttaatgaagccttatatacagactcattttcatggttttgtagagcttcaattttgtctacgcctccacattcttcaatcattatactaagtttctcagtttcacctagtttctcagcagcctgaaagatatttgaaatggcatccaggataaccagaataatcttggtatcttttgcaggtaagaggttcatcaacggttctattatgccacagtgaacaaggtacacaatctgttcaactgttccacggcccatacagcttccttttgtgtctcaaaatcttagagagatcgctgacaaggaatgggactaatccatgattcacaacttgctgtatctggtcctggcggctggctgtgatgtttgacattgtccacgtagcttccttctgaatgttagttttggggttggtgagcaggctgggaaagacggcgagtgctcctgcatcaatcacaacctgagtctgttcatctgtaccagtgacgatattccct

SEQ ID NO: 161418 - DNA, 1000 bp, Homo Sapiens
cagtgtccaaaaaaataaagttttattggcacacagccaagcccactggatgacacattgtccacggctcatcttgcaatacaatagcagggttcactaatgtgacagacatggtgtggctcacaaagccaaagatatttactatgtggctttttacagaaaaggtccgctgacctctgactcaaagcaacaatcatttatttcacttgtgattctgcaggcggggatcagctgggcagctctcctggccaggcggggctcagctgggtgcctcttctggccaaggcggtgctcagctgggtggctcttctggccaaggcggggctcagctgggtggctcttctggcccaggcggggctcagctgggtggctctcctggccaaggcggggctcagctgggtggcaatcctggcagaggtggggctcagctggatggctctcctggccagatggggctcagctgggtggctctcctggctgaggtggggttcagctgggtggcaatcctggtggaggtgggcctcagctgggtggctctcctgaccatggctgggcttctctgcccctggagggcagctacctgttggatggggcactgtgactcttctccttatatctcctcctccagcaggccagccttgggtccttcaccaggcagggtcccataagatggagcagatgcaggcaaggcctcttaagcttgggcacagggcagtcacagcgtcacttccactgcagccaactgtccaaggcagggcacaaggaagcccagatgcaagggccgggggagtggtctccacttctggactgacagaaagtgaaagcagtcccgggcgatccggcggcagattcattgagtcattggataaatacttcctgggtgctagtggggaccagctgctgtcatgggcgctgtcacagcagcggggaataaccagaccaaagtcccgtcctccaggagggtgctcaagtgatccgtccacctcggccttccaaagtg

SEQ ID NO: 161419 - DNA, 691 bp, Homo Sapiens
cttaacaggaaacacgtggcaatcacaaagtgccaggcccctttcctatggaagtgtccccagagccctcgtgggcccagccgccgggcagctggggtggggtgggagagcagctggggatgctgccttgggagcccatgctgcccagcacgtccatcaggtggtcacggagccagccctgggcccagagcagctctggaggacaacgtgaggccttccggccagaggaggtaactgagaactgggttggtgcttccggaggccttggaaacggcaggaagggccagacgccaccaccgagagcaggcgggggagcccgaccctcctctggctgagtggaaggctgctcgagtcgctgtgtggattttgggggactcctgaaggcagtggggccgggagagaaacagagcaggtggcgaggagtcccggaggcttcctccgaaggttctcgggcctttccccgagagttctggggagtttccccaggacagctggcattgggggcagccttggaggcatgggtccccaccaaggagtgttcaggatctgctgacagaatcagagcagggacaagatgagggacctcagggagggacagatggagccccccaagtctgaactcataggccccccgggagccccggtaggaggcggcggcatccttggaacggcaaagggagaattcctccat

SEQ ID NO: 161420 - DNA, 1000 bp, Homo Sapiens
ctgcccagcattcatgtggtagtgaaggaaggaggactggatcaatcccatttcaaagcatgtctctctgcactccacactgtcctccaatgacactgtaaggaaaccgctttaagacgtatcaacggctttaagtaaatgtattttctggcatctgggagacctgacattctgtgtcataatgaaaatctgtcatgtttctttattttaaaaatgataaaactgcaggttcacagagttacatggcttacttgaggtcacacggggatgagttttcagcactgccaataaaagcaatcacatgaattattcagtaattattcataggatccatataattcagtaaatattcacataattatttactagttgttcattgaccaattcgtacaaggcattttgctcaaaactgtgtttatatttggacattgtatcttcatcataatcctgtggtaatgctgttatccgtaagtaacaggtaagaaacctgaagaggagggatagcaaatcatgtatttggacatatttcctttttttttttttggtttttgtgatgctggaagaatgaccagaatgagtcataggaagagtatacattcctgtagtattttccaggacagaggtgtgacctcctagagtactgggaccaaaattcccaagtgtctgcaaccttgctttaacagtatgggagatcacctctatcacctggaattcccctggaactctggaatatacaagagaagtatgagacttgggtcttcccttggctgtgtttaattcactcttctatggaataccaatgattctcactaagactggccttttcataagcacaatgtgcattttatggagaagattttacactttgctctatttagaaagaataaatatgagcagtggtttaggttttatgccctggacttaatatgtttctgattcctgttttgagattaaattctcatgtaaatagaaaaatacttattatttctcataaggccaa

SEQ ID NO: 161421 - DNA, 799 bp, Homo Sapiens
tttttatttttattttattgaattatttttggtgtgtctaggccaaggaaagaggagatcgtgggtggggaaacagactgagggaatcagaagcaccactgtccatccggaattaaatccacatcccagcatcttctgcaaatatttcactaattatttcctctcggaactcctcccctcgtgctccttcctctggtgaggccggcgctcccctcccaggccgcagcggacagacagggattgggttccgtgtgcctgccacaccaggcaggctcttgcggctcccaactaggcggccttgcactccgcgtgcattggccacacatcctcgcctcctccacccgctccgccgccggttttcttggaagttaaatcttggaggatttgtccacacccgctccctgggccccagggcccggatccagcctgggtgggggggtctccgggcgggccgcagcgccctccgtgccccggggatgctggcgcacagtgcggagcggagttgcgcgtctctcgtccctttgttgacaattccctgaaccaacttgagtttggccggctcggccgcggccctgacgtcacgcacggtcacgtggccccgcctcccgctggatcgccggggccgggagcggtagcgagcgcctagtaccgagcgccagggacggcaggagttcgcggagcgcggccgctgggggcggacggcagagcccgcgccacgcgatgcggggccgccgagtgtgagctgagcccagcgggccccaagccacctgcggccccctcccctctccctgccccccat

SEQ ID NO: 161422 - DNA, 1000 bp, Homo Sapiens
tcaaagcacagtttctagagagttttcacacgctgtcagacctcctcgggtagtcaagttagaaatgctctttttggccaggactcttgctatttctaactgctgaagccatcgtttctctttaaaggcacttgccacagctaagcagtagattgcgttctcccatggagtcttcccactgtgctctaagaaagatgagaaggaggacttcagtaaaaagtcagcactgggtgttgcatagaaaaacgatggatgtgaatatcccactcttgaaactggagggagggggacttggggaagatatgtgttttttatgagcttttcttttttcctagctgtggcagtaatttttttctgattttgttgttgatgtttttgtaattcagagaatgaacttgcattcaccagtggatgaaatttgagggcttgttttcttgtgtccggctgtgaaattgccaaaggattgacaggtttgctgcttgcagtttgtttgctgagagatggtagcttgagcacgatgctttgtgagtcgctgttcccagccttatgccagctcttggaggtcatttttggtttggtgaaaccatccaccatcacagtgtctccaacttttgccccaaagacccttgctccacaaaactggcttttatgaagactgtgactctgagctctgaggatccattgttttattttaatataaatcctcattgggactgaaatttttggaaaagaaactgtggaccacattttactgagcaaatataatacacagtctttatgcttgtgtttgaacacaatggtcaggggagtttgtcctgctgcatttttgcattccaggcacagcacactgtagttgacaaaggccttcagaatcaacagttggcctgcttctgcggctgcatgaatggggcatttagagacatctgcatgaagggcttcatggcaccatgctcgataggggtgaacaccgactgcctcgtggggccgcgcaccctgcttc

SEQ ID NO: 161423 - DNA, 1000 bp, Homo Sapiens
ggtctcagcaagaagtagcgcatgatgcgacccagcagagacagcaaagtcattgtatcctctatcatttattatcgctagagcctcaaccaccaccagcgacgcgcgccccgaaggctcgccgggtccgggagcactgcggggacagcccgccgggagggaggcggagcagtgcccgagggtgggggagaggatcgcggagcccagccagaggcagccgagcaagcggctccgagcaggcagcgcgagcagaggcagcttcccttttgtctccccgcctcggcggcccggaggcccgtccctgccgcccgcgccgcctcccttccctgagcccctttgtgagaccgcggcggcggcggtagcagcagccgccgcagcagcagccgctggtgccccggttgggcaagaagaatcaagttaaagttgcgctgggcgggtctgccgcggtgagcgggagagttcaggggcgccggcgcccgcgcggtccctccgggggtgccccctcgagactccggagagcgatcagcaggtgaggcgcagggctccagagcccggcggacgagggacgcaggtcccctcggtcgccgccgaaggggagcgcggagatggcggaaggttccaattccttcacacaccccgggggccccagagaataaaagttttgcgggagcctgggcagagacaggggtacgcagagcccggcgacgcggcacggtcggtactgagccgcaggcggccggctgggctctgcctgcctctcccaggcacctcccggtgggaagccgagagccatacgtgagcgttccccccttcggcggctgcactatagtgcggtccccgcttcgccagccataaggcaagcgagaagggacgcacttctcccggcttgcaaagcggtagggagacgatcgggccgctggccggataacctcgggagggacgagaagggccgctctttcggagagcggccgccgcccctggagtaggggactcagtggcc

SEQ ID NO: 161424 - DNA, 824 bp, Homo Sapiens
cctgttacgccgtcaatgcagcaggcaatgaggggaatgacacagccctctcattcccggaacgtagtcaatctcggctctgcggatttcacagaacacactttgcctattgccggctccaacaagaagtaactttccaggaagctgccggccccggcagccgccaggatcgctgcctgcgctgcgctggccgccggggattcacccagggaggcggggccgctggggaagggcccgaagacaatgccagcaaatcgcgtcccggagcagagatccctcggccgtcctggctggactgggctcagcctttgcaaaaaggctggcgggggaggggagaagcatgatctcctcaagcaaacaatgcctttaaaaatccgattcgttcccagattcgtttccagtccgaacagaggcgcgtttctccgacgcggcctccgacggctcccgcagtgggaggggccgaactcgatccccgccgacccgggcgggggcgacggcgctgtctccccctgcagagcgcgcctgctgccgctaggggccgccagcatgcggacgcgcgtttgccatcgacttcccctaagaggggccacagggacaggaagatggtgtgttcgaagcgggttatttgtggtttttcttagtgcaaatagatgctcatcgctgagtgatgggcaagcagcgaggcctttctgattttcatccctcttgccaaaactttggaggttgtatgccatccccattggagggtgccctccttctgtcagtcctagcatctggtcagggtaccgccgcccgggaggtggaacggcgagcccaccgcccat

SEQ ID NO: 161425 - DNA, 1000 bp, Homo Sapiens
gtttgcagaatcctgtttattgtgtattaaagatttgaatgttaccaaattgttacaaattctttagttcaaaagggtgtcaacagtcccatgatttagaactcaggaatccagaaaactttgtcaagagttaagaggatctttgattaacagtcacggtctccaggtttcctctgtgttcaagagtaaaaatttcttaaataagaataagagccctcggacttgcttttttttgagacggagtttcgctctcgttgcccaggctagagtgcaatggtgcgatctgggctcactgcaacctccgcctctcgggttcaagcgattctcctgcctcagcctcccgagtagctggaattacaggcacacaccaccacacccggctaattttttgtatttttagtagagacggggtttcaccgtgttagccaggatggtcttgaacttctgacctcaggtgatccgcccgcctcggccttctagagtgctgggattacaggagtgagccaccgcgcccggcctttttttttttttttttttttttttgagaaggagtcttgctctgtcgcccaggctggagtgtagtgttgcgatctcggctcactgcaacctctacctccggggttcaagcgattctcctgcctcccgaggagctgggactacaggcgtgtgccaccacgcccagctaatttttgtatttttagtggagacggggtttcaccatgttaggcaggctggtctcgaactcctgacctcaggcaatccaccctccagggcctcccaaagtgctgggattacaggcgtgagccactgcgcccggcccagagttgctttttaagaaaggaagagaagactcacccccaagaaaatagaggcaacagcagtattaacaaaagaaagagatcattacattcttaggctcttcagggatttaaatctggagcctcctgcagctttctgacatttgagccttactctagggtgatttccacggttcccacgt

SEQ ID NO: 161426 - DNA, 533 bp, Homo Sapiens
tgtcaaatcttctcatccattccagaatcactaaaatctattccaatattttgaagcagatcatgaaggaatcgctatttctcttcatcgtgaaagtattgacatctgttggcagagccaggtccagttcccatgttatcattatggagttgttggaaaaccgcactttggaggaagtacctctctgtatgtgaatattcgaggtaagcaactgtagaaactttccagatctgggggaaattcttctggcagctagagtctgtagtggccatctctctgcgggaagaaactgcagcacttggaaacactgcaaaactctgctcaaaataccatgtagacagtgccagtaacaaagatgttctcaatgatcttttcatctttagaattcagagaactggtacaaccacggatactaaactagtgattattttcacgaattgtcaaaatgcattcattctctattctcggggttttccttaatcccgctccccccgtttgtcgtgggcgcgtgttcgctccgaggaggcggccgc

SEQ ID NO: 161427 - DNA, 567 bp, Homo Sapiens
ttgcatttagagagactttattgctgtacagcagaagagcaggacatccaagatggttagtaacatttaaattcacctgtcatacaatattttataaacttagcttttatagaaccaaacagtaaacaacacaaagttaaaccaaattttggcttctcagggcaggtatcatgatagttctttccaagtttctttatccttccttgaccaatccattgctgtaaatcgatagtagttctggaggctgggaagtccaagatcaaagcatcagcagatttggtgtctggtgagggcttgtcttctccttcatagatggcaccttcttgctgtatcatagaggccagttgggcctaggcttttctttgtgggaagatttcgaatcccctagttcagtttctgtgcttgccatggatgtattcagattttctatttcttcttgactgagtttcagtaatgtgtgatgcttaggaatgtgcctgtttcgtccacgttgtctaacgtttcacgacaggactgttcagaacatccgctgtctctcctttagtgtgacaaggctttcttcctctg

SEQ ID NO: 161428 - DNA, 1000 bp, Homo Sapiens
cacacacaaatctaaagcatatttatacatcactttaattctaattgaggatgcacgtcacagtcatgtctgattgaaactcttagattacagtcttcaatcccaacaaaaatcccatttcatccctctatcactcacagccaaatgaggaagtatatactgcccactttgcctctccttcaccaggtgggtcagtatgagccttttggcccacacactgctgagaaggaagctcaaaagattaaccccttaaaaacaaaacgggagcgcggcctgatgacaaactgaaattcaatccatttatttacacgtacattgtacataagtttacaaattctcacttctgccactcagctagaacttttcggggaaagcctccatctcttccttgatcctgttttctacaagtaatgcgaagttactgtctgtgttctgaaggttatagctgacaaacacctgtttgttggtcttcctggctggcccacaggaagtgtgttggggtgtgggaagagtggagcattcagcctcatgacctttgcttaatccccactctacgccacactcacaggccaggccagtcttccctccgagccctaggcgctgggcaaggccagtagaggtcgtgtcggaagtgtctccaaggagggaggtagacacggggatggagtcgtagcggctgcacatggccacggcgaggttgcgcaggtgcggcgtggcccccacccacaggaacagcgagtccgtcagccgcatgacgtggaagtggaccagctgctcccacagcctcgcgctgaagttgtgcagggagacgtccccgccggcggcgacaaccagcccctccatgccgccccacggctcccggcccacagcgccagacccgggtcctcgccgctgccagccccgccagacccgatggagcgagcaccgagagaccgagcgcgctttcgctttcggccccggaagggcgggggtgaggggcgtggtcggggaggggcgatcc

SEQ ID NO: 161429 - DNA, 1000 bp, Homo Sapiens
ggtagcacaactttttttattgttttttgtttgtctgtttaccttgttggacagtttctatttatataaggttgttggctacttctgactggttgagcttcatttctcttttttcaatatgcagctacaagaaataatgtaagttttgtttgtatttgcaaatcaagcgaggttgagatcacttatgagacctaactaattttgtctgctcagagattattgagacatgatctccattttaatttcctttaacaaattttctgtacttttactttccatccaaacagtaacttataaattattattgttgtacatatgtaggcccatgttgtgtatgctttgaagacctgtcctgcattcaaactcatttgtattatgttattattgaatttgccccatttattggaattataaactgcaatcccccaactacaagaggtatgagctctgatgagataagagtaaagatgaatcagaagtgaaaaccgtcctccaacccacacatgcagtaaaaacaaatttcacatgaatacaatgagtaattatctaaaatttaaagtaccctgaaaacattaatgtttatctcattattatgtaatatggaaattaaaaggcaaaaaaatccaaagacttactgtttaaatataattgaagttttttatatgatgaagtgctccataatttaaatgtaaaaaaccaataggaaatatatgaaataaaataaaattatacgtaaaagtgacaatgcctctattagatttaacagtatcttacaatagaataagttgaaacctacaaaatggaagaaagtttaaaattaggcagatattatcagcctggtgaagaataaatacatatgtcaataagcatttaatgtattttgtcttagattttacatgaaataataaaaagtaagcaaaccaatagcatggtagtttcaccctgattgattcaaactgaaaaaatattaacatttctccatgagaagttggattcatgg

SEQ ID NO: 161430 - DNA, 1000 bp, Homo Sapiens
tacacaataaatatatgcaatttattattaattttaaaaacaaatggtttaaaatgctaacattagtcacttccatatggtgagataatgggcaatttttatttccttcttccgcatattttttatgcttcctaatttttgccattatccatgaattatggatgggggacggggggttaaaataatgtttagtcttctaggcagtggatatttagggcattaaatccagggcctgactccacagctgagatgctacttgtggcgatcatcttctcccaagctccacattttagctttgtacagagtgatgtcactgtagaccctgaagtggttcatcctgtggtcacggcgttctgggtcgaccaaggcttctgagtcccacccaatttcctggttttcagtctgtgcctccgggtacttcttcgttggcccctgggcagcatggtgaatgagattcagaaacctggcgtctgcgggttcctccaggttatcatgccaagacataggcttcctcgtaatcctgtgaaccttgcgcaggggattcacatggtactgcgtgtggagtttctgggttcgtaactctttgaggtacagctcccgcaagatctggttctgatggacctcatctgtgaccaccctctctttcgggtgtcccgccatagccttggggctgctccgtgggtccggggctctctcggcgtcctcttaccactcgcttggctgcgggccttctgcagtctctaggcaatggcaccccactccgtctccaggcaacggcgttcgtatgataccgctctggcctctcggaatccagcctctttactagaaccgcctctggatactgccaggaaaaaggcttgccatcaacttctctgcccctggtcctgcagtttgctccgtggttacaaaccaagttccacggagaagccagttcaaatgcagaggcttgtgcagtctggctgcccaggcaggagaggaaaggcgcaggccaggccgaatg

SEQ ID NO: 161431 - DNA, 1000 bp, Homo Sapiens
acagcagagacaagtgaacatttatttttatgcctttcttcctatgtgtatttcaagtctttttcaaaacaaggccccaggactctccagattcaattatgtccttgggcttggtcgactgctgcaggagtctcagggagccttctacaaatgctagagtgactcatttaccaacattaaaccctaggatacatgcaacaaagcaggactccttcctccatggaatgtgccgatttcagatgacgcagcaccgaatgtagaaaacgctgggaattttttccttggaactagactgtgatgagaggtgcttgacatgaacataagctactgtcttttctttttttttgagacagagtttcgcttgttgcccaggctggagtgcaatggcgtgatctcagctcaccgcaacctccacctcccaggtccaagcgattctcctgcctcagcctcctgagcagctgggatcacaggcacgcaccaccacgcccggccaatccttgcatctttagtagagatggcatttctccacgttggtcaggctggcctcgaactcccaacctcaggtgatctgcccacctcagcctcccaaagtgttgggattacaggcatgagccaccatgaccggccagctactgtcttttctttgacccttcctttccagtttttgaagataaagcaggaaataatcttctctgaagatacttgataaaaattcccaaaacaacaaaacacatgcttccacttcactgataaaaaatttaccgcagtttggcacctaagagtatgacaacagcaacaaaaagtaatttcaaagagttaagatttcttcagcaaaatagatgattcacatcttcaagtcctttttgaaatcagttaatattattctttccccatttccatctgaatgactgcagcaatagttttttttttttttttttttttttttcgagatggaatctcgctctgtcgcccagctggagtgcactggcgcaatcccggc

SEQ ID NO: 161432 - DNA, 1000 bp, Homo Sapiens
ttttttttttagatcacctacacagcgttaaattcgcactgcaaattatacaagggtcagctggttgcttaaaattctcagcagtgatcttgcccccatattcactccgacaaggttttagctatacaaataatttttgcagtgtggttcccgaccagcaaaatcactatcatctggaaacttattagaggtacaaattttaaaagtctcaccccagacctactgaatcttacactctggggatgttgcccagcaatctttgttttaacaagtcctccatgtgattctgatgcacattaaaaactaagaagcatgcagaaaatcaactttccctgcaatcttgaaggatggtgggattggtggtggtttccagtttagctgagtctcagctttaaggtgaagaggaagaacgtatcagattcatcatcccagaaagaaagaccttattatttcctcaggttcctcaatgctctctgatgctgaggaaaggaaaccagatttggcaaatgccccctgggcaaaaaccagtttaaatgtcacagacaatttcccagacatcctgtaccttcccttcccttgttttctttttttctcttaagaactttcacttgatgctttagctaggataatttaaaaaaatttttttttaattttgaaataattttagattcaaaggaagttccaaagatagcaaaagaggtcccctgtaccctgcacccagtttctcccatggttacatcttactataatataaaatcaaaactaggaaactgacattagtacagtgtgtgtgtatagctatgtatcgctttatcacaggtgcagatttgtgtcactaccaccaatcacaatcaagatacaaaactgttccatcgccacaaagactacctgctttatagtcacattcacttccctctctgttcccataaccccatccctaatccctggcaacaactaatctgttatttgtcctccatgtctataattttgtcatttcaag

SEQ ID NO: 161433 - DNA, 996 bp, Homo Sapiens
tcatgtctttgaaatgacaaaagtcccatcctttgttgcccgtgcagtaatctgcttgtggaactctttaagaacatccagctggccaggcctgatgtggatgtatgaccggatcttggcgatggctcttacagcctcctctggactccatttgtgcacctgaatcaggtatgctgccaccatagtggcactcctggagcgcccagccttacaatgcacgtaaacacactggcccagcgactggtacttgagagcaaattggactcccttctggaggttgtccaaggtggggatcccagtcatgtctactgtgctgagccgcagctgctcgactcctagtctcttccactcctgtgaagagttgcacaggaacctcgtctcgtactcctcgttcatggtgatcaccccgcgcacgttctcgtcctgtaccagctggcgcgtcaagctccgcaacggcagcgcgcccagcagcacggtggggtcgatgcggtggtaccagtcccggtgcgcccgacccggcaccttcccgcggaacagggtgtagagcagcgtcgggtagaagagcacccgcgccaggccggcctccagcagcgcggtggccgccatcccggcccggcgcagcggcgacccgtcggcccccgcgctcgcggtccggacccgcgagaagagcaggcgggtgccggggcggggctgccagctgcattcagattcccaggcctggctcttccctccagtagggatcggagacaaagagatgcgcccctgcagctccctaggttgagggctccgcccgcggccccaggggcttaggtgcggctgctcctccacttcccagcccgagggggcgctgcagcgcccggcgctcggcccgcccctacgccgcgctccgctcgcatcggcgctgcgggcggcgccgcggtgatacgttccccctcgccgcgctccccctcctcctctgccctccccgccggtggtaggtgccggaagtgccgccat

SEQ ID NO: 161434 - DNA, 1000 bp, Homo Sapiens
atagagaaacagcagtgggcccagggtaccggcgcttagcataccaaggacctgcactggcacgggtctctgagttccctcagtttttattattatcttcattatttcagcaaaaaggaatgtagtaggagggcagggtgataataaggagaaggtcagcaacaaacatgtgagcaatagaatctatgtcataatgaagttcaagggaaggtactatgactggacgtgtacgtaagccagatttatgtttctctccacccaaacatctcagtggagtaaagaataacaaggcagcattgctgtaaacatgtctcgcctcccaccatagggcggtttttctcccatctcagaattgaacaaatgtacaatcgtgttttataccgcgacattcagttcccaggggcaggcaggagacagcggccttcctctctctcaactgcaagaggctttcttctttggctaatccacctcagcacagaccttttacaggtgtcgggcttggggaccgtcaggtctttctcatcccacgaggccatatttcagactctcacatggggagaaactttgaacaacacccagctttcaacggcagaggtccctgcggctttccacagtgcattgtgtccctggtttattgagacaagagaatggtgatgacttttaccaagtatactgcttgcaaacatttggttaacaaggcacgtcctgcacagccctacatgtcttaaaccttgatttcatacaacacatgttttaatgagctccagattgggtcaaagtggttggggcaaagtggctggggcaaagctacagattaacaacatctcagcaaagcaatggttgaaagtacaggtctttttcaaaatggagtctcttatgtcttccctttctatgtagacacagtaacagtctgatctctctttcttttccctacatatcccccttttcgttttgacaaaaccaccaccatcatcatggccccttctcgctggtcgctgtc

SEQ ID NO: 161435 - DNA, 1000 bp, Homo Sapiens
tatagagaaaaatacatacaatttattcattaaatagggacaaaatttctgtaactctggaaggtcaagttacatcatcaaagttgtttatttaaaagtagaagtatgtgttggcaatcgttttcgtaagagtcagaaaaattaggccggtttcacaatatggagtgtcctttctggtcaacagtattgcttcaggacagaagagcatttcacagatctttcctgtaacttctagaaaagtcatccagccagatttaggctcaagcttctttacaaagccattttcctgaacctgggagacagaggttgcagtgagccgagatcgcgccattgcactccagcctgggcgacagaatgaaactctcatgtgtggcagggagaaagggtcagcacggacacgacggtagtcttcaaatatgtgaaggggccattcgtgtgaaaacggggttatacttggaaaaagcaaaatacagtgagaacagcatgggctatgatgtataaagacccagattcaaatcctggtgccatgatttactgtgtgttatttggcttggagacagattagcatccttacctagaaaatgatacttacctcataaatgtataaaaattagaggcaaaaaatatttataagctgcctggcacagactgacacactgtgatgcacagtggtgttagttctcatccctagacctttctgtaattctagaacagtgttttcaaagtgagaactgaaactcattaatgggtcacaaaatcagcttagctggatagtaaccagtatttttcttctgatgaaacagaaggaaaatattagagcacaccatttgtggcaaacataatcataattttgtgaaacttctgtttcagttattcatatacatgtgaatagattatgagttaaaatgtatttcttatcatgaagttggatccaagaaaaaaatgtgaaagtgactactgtagagcactattttctatgtgtgttctataagatactagt

SEQ ID NO: 161436 - DNA, 1000 bp, Homo Sapiens
agggaacgtatggtttatcagttgagaagacacacgagcttccacaaattgatatatttacttcattgccagcggagtacactcgcatacatagatatctctgagtcactttaagtcacataactgcaaggatacaaacaaacactagttcatccctgtggctgagtgcccttggggaatactcagatcccagtggggcttctctctgcatcttctggccactctggccgttctccctgagcccacccaccttctccccctcccttccattcttccacgatggtagcaaagcagggaagtgccagtggaaagagactgcaggtgcacagaggcttggacaggccagagtccatggcagctgctttggcgtctctccttggttcatgtggtgggcacttcaccacttcaaggacactgtcaactccctgaaggcaaggcccagggctttgacttccctaggcatggagagacagtagtcaggaaaagcagctccttggcagactgctgggtgtgtgacaactgtgagggctcaggggctacaagcagggacagggcaagctcgcaaacaaaaaactgagacccgatgcggtgcatgcggggagcagagctgtgcagggcgctgcaggagcagaggagggggcggggcaggacggcttccttgaagggagcccttcaggcactgtcatgtgccacatcctgtgtgaggcacttcaccttcatcttattgcatctgggattcaaatccagatctgtctggttctaaaacccacgtgctttcttctgtacaggttgctacctgaggggacatctgctctgggactcagagaatgataaagagatctccagaataaatgaatcactttcagagaaaagtaaaagaacaaaaacacaaaaataaaaaacacacaaaagaagcaaaaaaatactacattctccccaaatttcacatcgtaagtggctggaagtgcaaacataaaggatgctagcaacatggccgcgg

SEQ ID NO: 161437 - DNA, 1000 bp, Homo Sapiens
gctgtcagtaagcaaatgtaccttggagtgaagtacagaagatttttatgtttcataaattattcccagtggtttcagtttggcatacagcaaagatacagactggattctgagaacctcctcctgccccccaaatttcctggctttggcatagaaagggctacacagctcttccatcaagccctggcattttctactggtagagattgatttttctacagaagagctcagattttatctcactaaaaagacgtgcttgatttttaaattggaaatttacaaaaggagtgaaatgaagtgtgagtagtaaggtagtgggtgtctgtgtacatcctcatgcccaaccccagaagcattgaagcctgaggcttagcctctcccaggcattcctcaggtcctctgaaggaccttccgtcacacaagctgagaacttgctgaatttgaaaagcaatttgccctttggcatcatcatataaagagatttacctccagatgataataggtgaagacaaagacttacaggtggttgattgttgttggtttttaaagccaactgtgatcccatcaatgtatttctaaggaaaatgtaaactgttcatacattctcttaaacatcacagtgaaaagcaagtacccgtatgtgtgatagggcaggcagagggctccacctgctctgcccttggcaaaggcccttggctacactggtgaaaatgccagctcggcttctgcacggatacactatgttgtgccatccaactggagtgccggtggaccccaaaggcagggcagggcagggggagggggtattttgaaatgttttcaggagctctgtccagctgtctctgtcttccagcccggaactgctgcacaaagctacaaggacactgatgagaccatggatctgctgctgttctctagggaagacttggcttggagtgtggctgcctggattcgaaagtgtgtccttgactccatggagtaattcttgtagttttgcttg

SEQ ID NO: 161438 - DNA, 1000 bp, Homo Sapiens
gtagctattataaatgggattgctttcttgatttctttttcagctaccatgttgttggtgtatagaaatgcttctgacttttgcatgttgactgattttgtatcttgcaactttactgtgttgatcagttctgagagtttttggtggagtctctacatttttctagatataagatcatgtaatcttcaaagagggggcaattagacttcctcttttctaattcggaaaacctttatttctttctcttgcctgattgctttagacagaacttctagcactgtgttgaataagagtggtgaaagagagcatatttgttttgttccagttcttggaagaaaggcattcagcttctccccattcagtataatgttagctgtgggtttgtcatatatggcctttgttatgtggaaatatgttccttctatgcctaatttgttgccagtatttattatgaagggatattgaattttatcaaatgctttttctgcatctatggagatgatcatatggttttttttgttttttattctgttgatgtgatgtatcacatttattgattagcatatgttttatgtagcaggagctcctgggctcatgatagaatgatggaattttagatcacatggaattttaaacataattacattttataatcctttcaacctagaaggagataattatgagaaagattagatcagttatgaacaaaataaagaaaccataattttctttgcaatttggctatgatttaaacacaacatacaattttctgtgtagcgtgtgaaaggatgtggaacacatttgctcctatggtaacataaaaaaacccccacccctcagatgttataaaactcttactcatttatgaaactactgaagaatggtagttgcaagaaaagtccagaaggactaattttcagagaggggagccctttgtgagtgaccgttaagcagtggcagtttgtggaggcaaaggcggagaagaaagcctgccaaagac

SEQ ID NO: 161439 - DNA, 1000 bp, Homo Sapiens
actttgatttaggaagtttatttttttctatgacaggtactttttccagcattttctgcttatataatttaacaagattaaatacctaagttttgatattgaccacacctgttaaactacatatacgatttttaaaaaattgtagtaaatacacataacataaaatttatcctaattcgttataagtgtacagttcagtggcattaaataccttcacattgatgtgctaccatcactaccatctatctacagaactgtttttacacttgagatttttaatttttttgagatttttatttatttacatttttagagataggtgctcacatctatgttgcccaggcctgactcaaactcaggcttaaaaggtctcccatctcagcctcctgagtggttggcactacaggtgaatgccactgtgcctggcttacactaacatttttaaacttaaaaatatgaaatattactgttcacagagaaatcagatacatttttaataatgccatttacattctaaatatgttgacaaaattcagaccagaacttacaattggtgtattaactaaacttttgggcttggtattcaataatgattgtttaaaccactggcctcataagtcaaaaatctaagatcagtgtaaaaatcgtatgcatttttatcttaaagagaaataattcgaagtactaaaagttcaattttacaaacctagaaaagagatttctgacagcatagaaaaccagacattctcccttcactggctaactcctatgggaagaaaaataggtggtaagaacacactttaggctggcgcagtggctcatgcctgtaatcccagcactttgggaggccgaggcgggcggatcacctgaggtcgggagttcgagaccagcctgaccaacatggagaaaccctgtctctactaaaaatacaaaattagctgggcatggtggcacatgcctgtaatcccagctacttgggaggctgagggaggagactcgc

SEQ ID NO: 161440 - DNA, 856 bp, Homo Sapiens
agtggtgacctggatttagtgccattctgtatgaaacaaaaccagggggctgtgcttccggctgtttgtgcggttttgtgcttcattcttcatgggcacagatgagcacggtgataacagtgtttacgaagccaggtgccggagacagtgaggatggctgctcctgggaattcatcactcgaagcttcatctgcttcaggtaggtggaggtgaggggcatgttgtaatcaataatcccagagaccagtggagatggaggctcgttttctttgggttccaggccattggagttaaagtgcatcctcttctgacactccgtacagctcatcaggaaccgggtcacggcctctctcgggaggaaggcataggtctctgcgatcgctcggtaggttttcttctgcccagcgtgcttgggggctttgcctggctccgctgagctctccacatgcatcgagtagatgatgtcaaagaaatcttccaccacagcgacccgcttcagagagatgccctctggctccgacaggccatctgcccccgagcccgtcttgaccggcacatacaccacttggcccatcttgggttcccggccgctgcccaggcggaagcccttggagcgcacccagaactggaacttgcctttctcgccggctgcggggccgctgcccgcgccagtcccgccgccgccctgcaggacctcggcgatccgctggtatttgctgcgtgtcaccgtcttggttttggccgagtcgccgtaggtgcgcaagcaccagtcccggaactggcggcccagctccgagtccccggggctgcgctcgcgctcccagcccccgcgcagcagcagcgtcggcttcggcat

SEQ ID NO: 161441 - DNA, 1000 bp, Homo Sapiens
ttagccaaggccattttctttcaggaaggttgaaaagtatttatattttttgatacttacttctctttctgctttctctttttcatattgatctatacattcttttaaatggttaccataattgaatacctcctcatttttctcttttagatgacgttgcattttcgtctcaggaaactgaatattaattgttaccttgcttttgttaactttcttatgtgcataaactaattgctgtcgaagccacctatttttgctttctagtttaaataatttctgctccagagactcctgctgttcagtgtgtttgtccacattatcttgttcattttgatacatgtgttcagctttcttcatttgacactgtgtttcacatcggtctctttgtgcatgttccgaaaccaatgcattttctcttagatcatctcctgcataattgagattaatttttgggcttttggatttcctttgagcttcataaagtggttgatggagcacctcattgttatatattgtattactcacatcaacattcattattccttgcaaatgagcatctcctgcactgtggaaagcaagttcttggttttttcttgatgtgacactttgatcatggtcttgtaaagcagaagccagtctaggatggtgtgattcaatttctgtctccagtatttctttgtcttgtttttccttcaatttagaagtcagcatcgtgttctctgctgtcagaactttaagctgctctctatactgagatgccctttttgttaatgttttctgtttcagttttagggtcatttgaagttcagcattcttttcttgtaaaatcttaatgtcctcaaagtatttattttccttcacctggtgttgacgtttcagtgtggctacttccagttttagcatggcaatttcctttttcaacatgcaattttcatgaaagagatcattttcactttcatgagtgtgagaaacctgattcaaattacttgttacacttttc

SEQ ID NO: 161442 - DNA, 1000 bp, Homo Sapiens
gcatttaacattttattgagattctcaacagctgccatttggtttgtatagcaaattttttacaaagtaacttttttccatttttgatatttttatgaaaattattttcttcagttttaaagccctgtccctcccccaaagaaggattaataactaccaagtaatgattaggggaaaaaaagcaaaaacagctttataaacacttgtgaaacaggggtaagtgtccgaagtcaagaccttctgggcccagtggaggtgctgggctgctccgggacaccatcaccacttcaccatccacaacatcctcaagagctgagcagccctgcacagaccctggggggcttcctgttccacaagctccactccctttttcctctccatctttgctgttgggcctcccctccaaatctgcctaacaaaggcagcacgatctttaatgcctgtgcagctttgtaagtggagccaggttactctgttttgaaagctgagattccctgtccagtctgggggaggaaaaattatccaatgtagcatggatggtttcactttcttgtccactcagacacatgctcatacttattaaatggatttattggatgcttcaaaagtcctgatgtgtagtagcacaaaagttccttgtaaaaaaagaagttgcaaaattataaaaatttctgcagcagttctggctctggatgacaaagctcattctgattagtagtttttttgacatgcacagcagcttcccctataagtcctacgttcggagggttccgtttagacaacaggaagttggaatccaagtttaaaaggctctctgctgacaaaatgtggtacatccatcaacagaattctactcagcaataaaaggaacaaactaccaagacgttatctgtcatggacaaacctcaaaaacattagctaagtaaaaaagccagacccaagggaccacatattgtatgattccattgatttgaactgtccagaaagggcaaatttatag

SEQ ID NO: 161443 - DNA, 1000 bp, Homo Sapiens
agtccacagacaatttttatttcaagccctcattttgccagtttgcagaaacttaaactcagccagttttgggggaggcgggtaggagtggttatggagaagcacctttgtgttggggtagacacaggagcacgtggccctcccctgccacattggtgcctgctgcgccatacattacctggctgtgcctgctggccaggccacactggaatgttaccacgttcctcttgttcctgtcggaaaggcacctgcaggcctagagatgtgggtactacatgtccttcacagcctactccccctgtgcacccctagctcatcctctgatatggtttggctgtgtccccaccccaaatcttatattgaattatagttcctataatccctacatgtggtgggaaggagctggtgggaggtaatgtaatcatgggagcatttaccctcatgctgttctcgtgatagtgagttctcatgagatctgatggttttataaggggcttttcctccttttgcttggcacttcttgctgccaccgtgtgaagaaagacctgtttgcttccacttccaccatgatgtaactttcctgaggcctcccaagccattctgaactgtgagtcaattcaacttctttcctttataaattacccagtcttaggtatgtcttaatagtgtgagaacagactaatacatgtgggccatacaagtctgctactgctgcctcgggggcaagaggccttcgttctcaaatgcctctagtttatgtaggtatctgttctggtggatcttggagaggatgggggtatagttgtggggctcctccgagcacccacaaaccccttttcttcttgcttcctttcaccactcaggctcaaagttgggaagctctgcccttgttcttcacactttttcccgattgccttcagggactggatttttgaaacagaagttttgtttttggtgtgtcaactctcctctaggcagacttacgtccctgagggccgat

SEQ ID NO: 161444 - DNA, 1000 bp, Homo Sapiens
tattttgtgtgtgtgtgtgtgtgtgtgtgagacggagtctcacactgtcaccaggctggagtgcagtaatgcaatcttggctcactgcaacctccgcctcccggattcaaatgattctcctgcttcagcctcccgagtagctgggactacaggcacccgccaccatgcctggctgattttttgtattttagtagagacggggggtggtttcaccatgttggccaggatggtcttgatctcctgacctcatgatccaccctcctcggcctcccaaagtgctgggattataggcatgagccaccacaactggcccaattttaattttttaaattgcaaatttcatcactaccatgctggtcataatactgctataaatctttagaagctgttaatgtattttcattgttcaaatttcacctacttctctggatcccagattaactgatttttttttaaggccacatctgcgtgttaatctgcaggtctagctcatagcccctttgatgaatagaaggtatactaacacaaatgtcatacatgagtaggtagtataagtaacctggtattttagaatactattgaatgatactaagctacttaaaaattaattcatagaatcctgacccttatatttccatggcaagtaacatgcattatctcaggggagagtgccattttcaatttacagatgagaaaatgattcaacaactaattgacttatacaaaaatccccttaccataaccagtggtgccaggactagatttttaatattttgctcattccactatcctaggctgcatgtacacaaggaaagagccaacttgtattccaaaaattcaatttccttgtttcttctctgaaaattcacaggttacccattctttccatcctctggcatagtgttaagcactgaaaacatacatcaaatagtgctataaacattttttttttgagatggagtctcactctgttgccagatcggagtgcagtggtgcgatc

SEQ ID NO: 161445 - DNA, 1000 bp, Homo Sapiens
atctctattagtgggtttattgacataactggacataacaatgtataacatttattcatctcccactgaaagacttcccagtgaaactaaagtagaacacagatccaggcattaggcattttcagtgatgttctatggctgaaaaggtgggtggtgaggagaaccagaggccttgtccatacttgcaatgggactcaatattaccctgctgggcaaaagaaatagctaggagatgcaatagtgctatgattgaaaaaagccaggagcacaaaaggtgccagatagctccctggttgaaaataagagcaaacaacactactgctctcatgtaccagtatgctctcaatctaaaataagccctggcagcaaactaagaatgacagtctatttcctgtggtttattaagttttggccccgcagacgagactgccagaaaagcagctgtagttttaagtggtctggacatttactcatttgaacataaacaacgatcagctcattcagatggctggttccctactcagctgttgagaagagggcaggcatgggtcaatctaggccaaacataaaaggagtgaactggggtgaaagacccggggctgtgatggattccctgagtcaccaggaccctcaggggcttaaggccctaaacagaagattccactgtcagccttagcaccattgcagtgacctccatggtactccactgccaataaatccataaccactgtgaccataaccacagtgtacattctcttagtgactgcatttttagaccacacataaaattattaatgtaaaccaaaccactacacttagtgataaacatgtacttcataaatagcagggaatgaaagtatcccaaatagttggaaacaactgaacaaataaaggatcctacccctaagtttaaaacaaaaacatttaaaagaaatactgcaactattaactaaaagataagatttaataacacagtaagacactcagttggggagggatt

SEQ ID NO: 161446 - DNA, 1000 bp, Homo Sapiens
ggatatagaattcagattctttttctttcaaggacgcattttatacaattttcaacatttatactttcaaacaaaatgagcaaaaaatacactaagtgctaaaaaaatcaaaacagaagtaatacaattttaatttcaatattttaaaatacagaaattggaaagaatactaaatacaactttaaacaagtcacttgtcctcccctataataatcaatgtaagctacttaaagacttacaaatttaaagtaaaacagaaacaaaataaatactgtacactttccctgcctgcaggcaaaagatgggaaatactgttatgaatcagcaaagaaatgctcttcaagcttcagcaccccacctcccagccacaccccacgccattgtcacacagtgggcttccggactgaaaggacacacatgtcacacacattgactgcctatacaaacaagacgagacgctattccgcagacacccccaacaagaagaacagtcccctcggaccgtgggcataaaaaccagtaagaaaagtcagtcaggctagcaaaacgttactacaaaactagtaaataccagagccaacaactgtcccctctccaaagttcacagatttgaaacctctaaaaccaatactacccctccccatcaccccccaaaaaaacttgctgaagcactggcaaagttagacatttcacagtaaatgtgaaagttcatattatataatctcttaaaatgaaccttttcaccctctttccacagcatgaaactgttatggcttaatttatattaaaagtagaaaagtcttttctgaaggaaataccatctgcgaagatgcatttcctgatcagtgctatttcatacctaacaactgtatgacttgcttttgcagtcagaagctgtttttggaaaaattgaggttatagcttttgattcagtctaaccataaactgtaaggcccttagtttggtttaggtttcttttgcaagataaaataaccttggg

SEQ ID NO: 161447 - DNA, 1000 bp, Homo Sapiens
ctgaacaagggaaggaggcttggccagggggagggaggggcactacttgtacagtggccttgactcggggctcaatgtgtgacaggtaaggaaagggcagcaggtgaagtccccagggctgaggttcttagcctggagtccagggatgggtttcattcagggagtccagtggctcctgaaattgcttggggtttttgagtctacgtcagttatctgttttcctagggaaggtccgtaaccttcatcagattttccaagggcttcgtgtctccaaagagctaagaagcactgctcagaaaggaaaatgaagcctgcaggtttcattcacatctggaagaaggttttgcctctagaaccaggtctgccaccaacttgctgtgttagcttagaccaatcacttcctgtctctgaactctagccaagtggtggaccaggcgggagcagagaagccagctctccacacaggcatcgtcctaccaccagtggcagagagtgggggcctgtggccaggcagccaggatgaggtctgccccagctgtgattcccaccaggcctggagagtttgtccaccagagcttggaatctgcttccaattccaggctccaaccagtcacctccactggtcaccgcagtgcacctcttgaggcaggtcttcttactggatgtgtcctcatgcccgggtgcagtgccagccaggcctccatggaactccattcctggtctccgtgtccagatgggttctgcacctatcgggtcttaagatcctgcccactctgcaactgctctaggccggatgggccagagaaggagaaccatggcaggagccggaagcagctgtgcgcagccagccagagggtcccgagggaggaacgcgagcgggcggccggagcctggcggcggcccacaccttcaagagcccaagccagcgctgatgggtcttgagcgagccctcgcgcgcgaagctcttgccgcagcgggggcagaagtagggccgccgctc

SEQ ID NO: 161448 - DNA, 1000 bp, Homo Sapiens
gggataagtgatttaatatccacaaacgtccccactcccaaaagtaactatattctggatttcaacttttcttctaattgtgaatccttctgttttttcttcttaaggaggaaagttaaaggacactacaggtcatcaaaaacaagttggccaaggactcattacttgtcttatatttttactgccactaaactgcctgtatttctgtatgtccttctatccaaacagacgttcactgccacttgtaaagtgaaggatgtaaacgaggatatataactgtttcagtgaacagattttgtgaagtgccttctgttttagcactttaagtttatcacattttgttgacttctgacattccactttcctaggttataggaaagatctgtttatgtagtttgtttttaaaatgtgccaatgcctgtacattaacaagatttttaaaaataaaattgtataaaacattcaatttattggtctttgtggagaattagatgcatcaccagtatattacaacagagccattaatcttgtagcttcatcaactggtttgctttcatgacgctgctgaggaatcagttctttctgcagaggttcaagtgaaatgctttttgcgaaatgtgcaagttccttttgtacatttacaaaagctttatttactctgttaactttttcctcattcataatgtttatcttcttaagattagtggtaactggttttgctttgtttttagccttaaagtttttttggctggctatgtgaaatacattcctggacttcggccctcttaatttgttcttggccattgtctttgctcagtcgtagtcttgactgaaatttatatcttccttcaatgtagccttactacattgtaagtaattaaggaactacttaactgaaacagcaatgcttttgaacgccaacagtattcctcctacagaagtttaacacttgcgtgcagctttttaagctccaggtaacaccatctggcacgtacggcgt

SEQ ID NO: 161449 - DNA, 1000 bp, Homo Sapiens
aagagttcaaagatttttatgaagtgggctgaaagtaaatgatccttggcatgtatttgaagacatgaaacaactctgaccacacaaaaaagtaaacaacaaatctacaataggtacaaattatatacatttatttttaataattttaaataacactcttgtataaattctttcatatattcaaatcatacacaaatttagaaatgcatgatgaagcctagtacagcatatgtatgagacacattttttaagtttgtgttagaattttagtgacataaatacaagtttaatgtttcagaaacattccctaattgctcggcctataatttaatgtattatagagtgcttatgcctagcattacaacttgactttaaatcatttagcttttggactaacttagatctgaagccctgggcttactttctagggctgctgctgcagtaacaagtaacaattcctacccacatagcccaaaatataggaaccagggatgttcattataagtggtgttatgttcaccaagcatcctaaaaagtgtaggaccaaggtgaatgatctaataaccccattccaatcaaagctgtcaagaggaagtattgttgctttagttttctactcccaaaacagcacttaaagggttaaatatcctgatggtactcagctgaccaaaataaactagtaggtcagtgagtattgctttaatggtcaatttacctgggaatattggcgctagagaacagtgatataatttgaggtgtctacaaatgttgtctaaaaaacctctctcctctcatcccatgtttcctctgttctctactcttaaaatctaggtatcactgggaagagtaacgcactaggcccacaggaccttagtattaatataaatgagctttagttttcaaatgtcatttttttctctataactggagaaattccattaataaaagaaccctaggggatagagggtagagggagcgagaggggagtaagggaggacac

SEQ ID NO: 161450 - DNA, 1000 bp, Homo Sapiens
ttagtgaacctcctctccgggatatttttattaatatttggagaacaacataaaacacatttccaagtggttcatgagatgccatggccatccaaaagagggaggcaatgcgccggagcttggtcttgacaagagatattttccatagcaaaatttaccactaactcgagggcaataccaggtgggctgggaatctcacatctcccaaattagcctcttgattctgtcacaaactttcagaactcaaaggcttgtggttctgggaatggaaactaaccaaacatcatctggactgagacagccaaacctggagacagcgccatcccaaaagtgaaccgtctgcttcatgggaagaacatttatctcagagcagggagggatgtagcagctgcagtcgcaggggaccgagacccaagacggtgatgcccagagcacaaacacgaccctccactggcctgtggggctctgggaaagagcttcggcctcacactgggtcacctccccacagggtccccatctggcaaataagggaaggaactagcataaggaaaaggctggataccttcctagtgttatgaagtattgatatgccagtgaaaaagctcacggatgtctttaaataaagcgtcttacatcaggaactctgggctacaatatagtttcagggaaaagttccaatctgagcctctttgcacctgcaataagcaaataccttttctttcctgaggatcatttgcttaaagcactgaagagtgagctgctagctgcagcagtggtggtaaagaatgacgatttctcggtagcgcagtggctcatgcctgtaatcccagcattttggaaggctgaggtgggtggatcccttgagctcaggagttacagaccagcctgggcaacatggcaagaccctgtctccacaaaaaatacaaaaattagccaggtgtggtggtgcacacccatagtctcagctactcagggggctgaggtgggaggattgcttgag

SEQ ID NO: 161451 - DNA, 1000 bp, Homo Sapiens
ttttttttttttttttttgctattcaattgtttgaattccttatatattctgattattcactcctggtcagatggataatttgtgaatattttctcccattctgttggttgttaccttgtcatttgtttcctgtgctgtgcagagcaattttagattgatatatgcccatttgtccatttttgctttcattaccagtgcttctgaagttttgttcataaaatctttgcccaaaccaatgtcctgactcatttcccctatattttcttctggtagtattatagtttggatcttacatttaagtctttaatccattttgagttgatttttatatggtgaaagatagaggcctagttttattttctgcatatgaatatccagttttcccagcaccatttattgaagagggtgtactttccccaagtgtgttcttggcacttttgtcaaaagtcagttagggctaatgtggatttgtttatgggttctgcattttgttcaactgccctgtgtgtctgttttcataccagtaccatgctgttttggttactatagctttgtagtatgttttgaacccaggtagtgtgattcctccaactttgctctttttggtcaggattgctttagctattcagagtctttgtggtttcataggaattttaggaatcttttttctatttcagtgaagaatgtaatttatattttgataggaattgcattgaatctacagattgtgtggataatatggttatttggacaatattaattcttccaattcatgaacataggatgtcttttctttcttttgtgtcatgttcaatttcttacatcagtgttttgtagttttcattgtagagatcctttacctccttggttaaatttattcctgggggtggaggtttgtagctattgtgaatgggaatgctttcttaatttcttttttaggtagtttgttattgttgcatagaaatgctatggatttgtgtttgttgattttgtattctg

SEQ ID NO: 161452 - DNA, 1000 bp, Homo Sapiens
aaaacaacagaaatttattttctcacagttctggagctagatgtccaaaatcgaggtgtcagccaggccatgctccctctgaaccctgaggggaaagctccttttttgcttcttcttagcttcgggggtttccggcaccccttgacgttccttggtttgtggatgaatctctccagtctctgaccctctcatcacatggccttcttcgccatgtgtctctgttttctcgtcttctaaggacatccgtcattgggttagggctccctctactccagcgtggcatcaccttgattaattatgcctgcaaagactatctccaaataaggccacattccgaggttctgggtggacttgaattttggggggacactattcaatctagtatggggcatttgggtgaaataaatttgggggagactgcctgtcataacctccccctttgagtttcaccatgcacattagcctattaaaagcactgaacaaagaactatagaatttcccaaaattgcacacagaatctattaacatctgaagaaagtaccatttctcaggacccagccttggagagcctggtctgcatcatagggcagttggggattctgtgaatgtagcacacaatagcagtcacactataggagcttcatcaatttccctttctccccagtagccacgagtccagacttggggccatgcccttgactgctacccatctcttactaatggcttctaccacatgttgcatgctctggcttcaggaagatggaaagggcaacactactccatggctgagtgggaaaattccagccttatggttgagacccagagataacactgctgaggaagtaagcttctctttttttaggaagagaactctccactgagctcttggaaggaaaagtagggcaggaaatgaagtctctgggatccaaaagcaaggacctgatggaagaagcagacggcttggaggcaggtatttggcaagtgcgctaggaagccattg

SEQ ID NO: 161453 - DNA, 1000 bp, Homo Sapiens
tgtcagagtgaggaagaggaagaaataagctggcattatttacaaatgatatagttacatacatagaaaatccaaaagaatctacagataaattattagaattaaaaagtgaatttaagaaggttgctggataaaggaccagtatgcaaatcagatatatttctacataccaacaataaacagttagaaaacttttttaaaaacatacaatttccacagcatctgaagtttcaaataggaataagttcacacaaagaaaaagtacacaacctgtacatagaaaactataaatcttactgagagaaattaaggaagaactcaagttgtctctgaagcctgttcccagaagtgctgctgcttgtcgtgagcatatggctttgaggttatgccacagagttggagtgctgcccttgcagactctgagggcccatggttccagtgggtggccttgatgtgctccatggcatctgaaggtggtgttcctactgatggtgatgtgtctggactggagatgtaggtcataatggctgcatgaaagggactggacccatagaatacactactccaaaaggaagcttctggcaccaaagaagaccctaatttagtctcctccatcaccaacaagtgaatagtgggctgcatctgtgaagagtacaacagtgctgtcctctagtttttggctgcacaaaggtgagacccagcaatgccctaactgtgaaatccattactatctggtgccccgccagttgacccactgagactctgcactaaattgctcaaaatgcgctgtaaagtttcttctttccagtaaagactagacattgaattggctccttctcccccaacccacctggccaatatcccctttgaacatctgctttcgctggttggtaaaaaagtgtcattttaaatttagtgttactccttcaggctattccctctctcttcttacttgcagggccaaagcaacgtctctttccaccttggtcaccttccaaca

SEQ ID NO: 161454 - DNA, 1000 bp, Homo Sapiens
ctgtttatagcagctttattcataattgccaaaaatctcaaatgtacatcaacaggtgaatggataggcaaattgcagtacatccatacaatgaaatactactcagcagaaaaagaaatgaactcctgatgcctgagacatggattaatttcaaatgcatcacgctaaacaaaaggagctagactcagaagaccccctaccataggatttcgtacatctgattccattcacatctggaaaagataaaacaccttggaatcacatctgattccattcacatccatacagtctggaaaagataaaaccactggaacataaagcagacagcaatctccaggggctggggctggggctgtggaatggggcatgaccatcaagggacacagcaaactttttgatagtgggaatattctacatcttgatcgtggtggtgattaaatgcctacacatatttggcaaacctcaggcctgcacacttaaaaggggaaagtttactatgtaaagtatacattaataaccctgactctaaaaatttagcccatctgcttccctgcactctgcacttgggggaaaaatgtgaaatggagagtctgtcatttcagtaaatgacacccttgctcctggagtgactttgggaaagatggagagtggcagcctcctgttttctgctctattccagcttctcatcttcgtccacagactggtggcaccccctcctctgatctcaccaggtccgactgcgggcccagctgcacaacctccttcacagcacccatcctcactcctccaggcttgttccttgtgtcagcttttgggcagctgtcacctgatcctcacacggctcgtgttggtttgtgttgcccaaaaaatccttgagtcattcagcacacacccttgcctggacagaaacatttttcagcctttttcaaacgtgcctcactcttctctgcaacttctgctgcctcctgtcacatgttcatgaccacgttgactcagccca

SEQ ID NO: 161455 - DNA, 1000 bp, Homo Sapiens
cactgttattggtaattttttaataggaacactttccattaatgcttgaaaactacgaactacattttattttatatcttgtcaaattagttggagaatatctattgtaaagctgtcagcacatctctaacattactttgtcaggatccacctgctctatgctgcccactataggaaatgcaatatggtaataagaaatgtaatagaaggttactttagtacaatctcataaaaaacatactctgactctacttggatgctaaatgtggtgtttttgcaagagatacagactgattagtggcaatcaaatttattaactgtaaaggacatcaataagaacagacaggaccagaaattgtatcttggtgatccacatgccaggagtagcgcggcagaggatggagagtggaacttagcgattgaggcgcagcctgcagaaagctgcacttctccgttcccactcttgccccatcagctccatcagcatcgtcatccccggctcggatcccggccgcgacccgccagggccgccggagtccgcgaataccgcccgctcccagcaacgaagctccccggctcccggccgaccgcgagttcctggagcagcagcctccaaggttcccaaagcccacgattcaggcgagcggtgccgaccgggccgtggactgtggcattttaaaactacagaagtctcactgcacgactggcgcggccgaggtggcccaggagaccctccaagagattctggtcagctgccgggagcgtggaagagcaaccaaagccaccaaggcgccgcgccaagtccccggagcagtcacctcagctttccgttctccctctagttacaattactccacaggcttctggcgcttccttcgagaaaatgaaaaactaaaaacgcgtagaggtggtagaagtcgttggcattttccgtttaatgtgatcccccaggctccatcccttaagtggggtttccaaactcggatgcatcctcagcaga

SEQ ID NO: 161456 - DNA, 1000 bp, Homo Sapiens
ggtcattatattgttttattaaataaggaagaagattttgtctgtgaacatgtgggagggatggagagaggaagagattgaaggtgcagcggtaagtggaactttagtgatggctcttgtggagggtcagagcccggctctggagcaggctgcgtgggtcccaatcctggccctgcacaagacgcttgacttctctgtgcctcagtttcatcctctgtaaactgaaggttgtgagaatgaggagagttaggatttgtaaggcacttagagcagagccagccatctaacacatgctgtaaacatgtttgatcactagaaaataagacacgtgatccaggggcagaaaagatggagaaaagggacagcatgggacaggaccgacaggacttgggaagacagtagaagtgagagaaaggcagaaggggcatcaaaaagggcaaaggtgtgaagactgagtccctgggagaatgataccattatgaaaagggaaaggagctgaggtgcttgggcgggggtcaggttgagtttgagggcctgtaggacatccaggtggagatgtcctgtaggcagttggccagaggttcctggtgcccaggagagaggtccgggcaaggcctcctccctgcgcagccccaggaggcaccatgcactgtgttcagggggaggaccacatcccttcccgccctggggcccagccctggggcccatggagttgagtgctgggctggtggtggaggtgtgggactccttagctcattagcatgcagacagtggctgaaccctggagtcagtgagcacccccactgcagagtgaggccaaggagagaagaaggggatgagtggatcccaggcagcagctatgagcaggagaagatggaaggaagtcctgtcctctctgtagaattccccctgccatcttcatcacgaggctgctgtgaccgtggagaggcaaagaccagccgggaatattttcagggctgctctgaggggagcgaaggtc

SEQ ID NO: 161457 - DNA, 1000 bp, Homo Sapiens
agatatgttaactgactttattttggtcttttcacaatatatacatacatcaaatcatcacattgtacaccttaaattcataccattttatttgtcaactatatctcaatagagctgaaacaaaaataaatcccaagacagtaatgtacatgttatttaaatagttttagagtctttgtctcatttaatttttaaaaaatgatggaaattgtcattttggagtgtgtctgtatgtgctgtttaaaagagacatatcttgcctgtatattagaaggcacaacctgttctctccactcctcattatgcatgcaaatgcaggcaagtttcttaacctttctgtacatcagttttctcatacaatggaaaatggtatgtcagttagaatgactttgctacacatagtaaagcgtctcccacagaaagattaaacaatgagaatgtttatactcttgcacaaaaattcagtgacaggtggtacttcagtgtatctgctttgtcctcacgctggctcctcttctgaccccacggttactccttttcaggcatcctgtgcaggtacaaccatgaacagcagcagaaggcctgtctctttccagggtatttgttaaagaataaagaaacctttctcagaaacttctcagcaaccttctcatcacctttcattggctagaatcttatctgttgttatgtccaagaatttcctttcaagggcaattgcaaaacaatgacctttcagaattacccctattgctgaaggatggagacatggagacataagttttgtatgggaagtaaacactaaaaaaaaaaaagcgccatcagcaagaaaaaaatgaagaaaaatagctgttatatgttatataggcacccaacaatgtctgttacaaatgaggatagtataatcatacatttcccacagagttgatgtaagcacaatatgtgaaagttcctaaaaaaatatctggcccaaagaagacatttcatgaatattattcttact

SEQ ID NO: 161458 - DNA, 1000 bp, Homo Sapiens
tcttgcaggatccaagtctttattttttaatgggaaaatagatcagggagaagcagctgatgataactgcactttcagttgcttggcaggcagtggaattcaggatcttacacacttcgatttttggtcttatacccctcctgtctcagccagcagaatggggaggcactgtctgtctggagtcagaagctttgagaagattgagtcctgaagcaacacggccaatccatctctttgattctgcgtgacagccacaatccgttcccgagtttcatggcctgagaacagtgggggccactgccatagaaaataatatgcagttggccaagttgcctccatcctttaaaggagggctccagcgtccagccagtcatagagcccccggctttgaaattctcgtgcaggtgtggtttctttccaatgctttcagtgcacatgatttagtacttaggaaaattctcgaagctgactttttcgaaacctcagttgtgccattagaaaattcttctttagcagagaaagcacccaacacagatttgtaacctctggggatcgcagagttctgagaaagactgtgaaagaaaatcgaaaaccagctctgagaagctgctcggagcagccaatggtgattgaagggatgtcagcagttattcataaaataggcagatgaaacagacagaacagtaattttccgcaaactcatgtatttcctttcatcaccgtttctcattgttccttcagaactgagagttgttttgcctggactttgcatctttatgctagtaactgccggagagggggcagggctggggcggggccgagtgcagtcgtgaggcctggagtggaacagggcaggctggaacggtgaaggagtatcttggaattcctttccctctgtttttcatataccccaggaatgggacaatatactgtgatttcattcatgttgtcattcatgtgctcattcaatagatgtttctgaacagggctgggagttgga

SEQ ID NO: 161459 - DNA, 906 bp, Homo Sapiens
taggtttgtgttcatttgaaccagtttcttttaattcaactagtttgtgagttgttcatcaaaataaccacattcttgtatctcttgagttttcatttggtttttaaaggctgaaccaaaaagcgtcagggttttcacacagccttttgccatttcatagctccatgtttccttggtgattctagtgttcatagtctgccaggtccacttggagctgttgccactctgcattcctcttccattgttggtaatatccttttttttcttcttatttctgggaggctgaggcagaaggatcacatgagcccagaagttcaaggctgtagtgtgcaccatgattgcattatcgacctgtgaatagccactgcactccggcctgggcaacaaaggaggccctcaatgcctcgctgtcgccgccgccggcaattccagactctgctagggttagcagagcagccggtaacgttgctggaccgggacgcacgctcagctgaggaggacccccaaaggcaggcagtcggggatccagggagcggggacacctccgggcgcgagggggctgtgtctgggctgcctgttggctgggaaggagaacgcaccagggccgctgtatgagttgagcgctcggggatcccgagggtggtcgcggcagcaatgtgatcgcgaaagaagccggtgggagaaccggtcgaggggctaggtgtcttgaccctaagggctggagtccgccgagaaggggctgactggggcacagggtcggctgataaacagcgtggtccgttcttcctcctggactacgggaaagtctggcttcacctgtgcacaacaggtaggcgtggactctgcccgccagcgggagccggggttgccgggcgtgtggggaaggtcagcaagtcggagcccgcc

SEQ ID NO: 161460 - DNA, 1000 bp, Homo Sapiens
tatttttactagagatggaatttcgccatgttggccaggctggtcttgaactcctggcttcaagtgatccacccaccttggcctcccaaagtactgggattaattataggcatgagccactgtgccccacaatcattcgtgaacaacaaaattttaatgtctttgcactaatgctcttccctcaagatatgctgtaatttactgagccttacacatatttgtcaatgtttaagctgattctaatatttcgccattataaaaacacagacataggcagccttgtatacaaatctcattctacaactctgattattcctgtgatgtttattcccagaaagggaaatgaataatatttcggattgtgatgtcaactgagtgaccataggacagagaacagggtggtttcgagcagggtttggcagtgcgcactggaggggaagggtgggggagaaacgttctctgaagagggggtacttgaccagaagacctacatgatgggaaggaaccaggcatgcataatgctgagcaatcagcctctctggcaaaagacatagcatgtgcaaaggccctgactcaggaaagctccaaagccttaggaagcctggaaaactctcaagaggtagtcagcactctgtcaaaacggaccaatcagctctctgtaaaacagaccaattggctctctgtaaaatggaccaatcagcaggatgtgggtggggccagataagggaataaaagcaggctgcaagccggcagtggcaacccgctcgggtcaccttccacactgtggaagctttgttcttttgctctttgcaataaatcttgctgctgctcactctttgggtccacactgcctttatgagctgtaacactcaccgcaaaggtctgcagcttcactcctgaagccagcgagaccacgaacccaccgagaggaaggaacaactccagacgcaccaccttaagagctgtaacactcactgcgaaggtctgcagcttcactcct

SEQ ID NO: 161461 - DNA, 1000 bp, Homo Sapiens
caggaggctccaaagacaggtttaatttaaaacaaaacaaaacaacaacaacaaaataactctcttgtttcatgtaagtcggaccaacagaggtttaataaacctgtctgcccagttagtttgctcagggaggatcagatggctacctggtgtcttaagagaacagcagcaacctcacagggctcctaggggataccatcgtctttggccatggagctaagtctcacggcactgtgcaacagggccatcactgaaaaccaatcagcagctccaaacgtgatctcacagtcttcagacacagctcaggactccagtcactgctatgtgattcgaatgcacataccttttctatgcccgtttggtttcatatttcagtttcatgctaggaatcgggatttttgtggagctgactctttagttctttggggaccccttagctttgtagtaatgccctgggattgccttggccttgtctgtaatcagagttacacaatcaaggaaaaagcgagctcggggctgtcatttcaaatggaggagcagcagggaagaaaaagttatttggttgtgtctgcagaatgacattgaacccttcgagagggcagtggctcctccaccacctcctcttctgctgtgttccctttgggtttcctatagaggcagtggctgccatttacaactcccccagaatttctgtccccatcatcatctatccagctctctggcaggggtacattctgctcccccgaggtaaccttgaagctagtgtcaatgatggatttgcacaacttcacttctgagttctgaatacattttttctgcatgacactgagggaggggtgaggtgtagcgctgggctgcagccacctagctgtctgtcttcatttaaaggattgtagcctggctccacaggagaatcttaatgcttggcggtcttgtgtgtgcttcgtgagtgaagatgacatgcctggaagcccatgccttcacgaatgtatgccagctt

SEQ ID NO: 161462 - DNA, 1000 bp, Homo Sapiens
ttctttttatgaatggatttcattgaggcataatttatacaataaaatacatccgttttaagtgagtttggcacaggtgtccaccctcctccccaccactgcaatcgaaataatcaatacatttcccctttccctgccagttcccactccagtccctgaatgccacttgtggatactctgtcccatatttttgcttttcctggaagttcgtaccgctggagtcacacagagtcacagcttacagttgcagtcccgtgcctggcttccttcattggcatcttgtttttgagactcttccaagctgctgcgtgcatgggtcattctttcctctttcctgatgaggagcgtcccactccaggatgacaccacggtttgtttacccagctcctgtggatggatatttggatcgttgccagctcgaagttattacagagaaagatgctgtgaacatttgtgcacaggtctttgtgtggacatgtgttctcatttctcctagataaataccgaaaagtggaactgctgggtcacagggcaggtgttgaccctgagtggagcggtttagcctcagtttacatttatttatttgtttgtttatttatttatttagagacagagtctctgtctcccaggctgaagcgcagtggcgcgatctcagctcactgcaaccttcgcctcccaggttcaagtgattctcatgcctcagccttctgagtagctgggattacaggctcacaccaccacgcccagctgattttttgtatttttagtagagacggggtttcgctgtgtgggtcagactggtctcaaactcccgacctcaggtgatgcacccgccttggcctcccaaagtgctgggattacaggcttgagccaccgcacctggccagtttccttatctttataatgggaattaaaaagttggaaacaaccatctggcatgcatcagcaggtgaacggataaacaaaatacgatgtgtccacaacatggagcattatttgg

SEQ ID NO: 161463 - DNA, 1000 bp, Homo Sapiens
gccggggaggctgggccaagcatttatagaaactgcccaaagagcagagcagggcgggcgtttcggcccattttacagaccaggaaaacgggcggagaggctgagtgactgcccgaggcgacacacagctctcccgccctgtttgcttacacacattcttggccatgcagtgaagggagttcccagcagtgtcccccgcccactcgcatcctattgcccagctgagcccctcccttggctctcccacccatgggcctgatggccacagctgggatccaccggacactgcagtcccccaggcttcgggtctttgcctccttagtcacctgcgaagcacctcctatgtgccagctctgcccgtccagggagaagcagcacagcccggccacccgaggcctcctgtgcgcttccccgtctgaggtccgtgatcagaactgcgggcctctccccagaggtcggggcagcgacaggacagccgcgggcttctccgcagaggtcggggcagcgacaggacagcctcagcctcttcagatgctgccttcagggagcagtgaaagagggagggagagacagagagcacccgggcgggtctcccagccacaccaggctggtgggtgggatttatgtgccaggtactgtgctggctatcaccggggcctggtggtctcttggagtcacaagcagccgcctgagatgaggtttatcattttgagctagaataggactgaagctcattcccgaggggctggccgggccggctctccctgcctgccggcatctccactgcctctgctgtcctgaagctcttatgagggttcacattactaggacgccaatgtgggttctcctctgggcactggccccaaggcaccccaacctcagacatgtcacctcctgggcctactagaaatggagactgcagttctatgatgggaaaatctctacaccatcggtcatttgggctatagaagaaaaagaaattattttcagctgcagcttc

SEQ ID NO: 161464 - DNA, 1000 bp, Homo Sapiens
tgacatttcaatgcagaggaagggacattttaatttaaatgctttcacagttttgccatactttcacatttcaattccactcctgtttgcaactaaaaaacccaaacactcaaaaaaaaaaaaaaatcacattaatcagaatttaaggagtcacttagtaaaactatgttttaggaatctgtacaataaacatgaaatcagtcacctgaccactccccaccctcagcccattccacaaacccatcttcccaccccttctcctacgcattgagccttcagaaataccctttctcagtgcggttccttctaaaaaggagaggcgggagagtcagggtggagaaggcggctccaaccagattttgcgtccacaaagccaaaagcttctaggcctggcatgtacggcgggtttgtgcccgaggagcacagctggtctacacgggcccgccccgtagacaccctactcctcggtgagctgcggtttaacttccttatagcaggttgagagtgcaggccccaacgtttggaggggaaggcggcgccccaactggtgtttttccaggaagtgctccaagaatggagaggagaggggaaaggggaaaggggaaggccaggcgatgggcgtttcattcattgcttctttctccccgtcccctccttcgctccccccagactttccccttttcccagtccgagtttgacgtcggtctcctggataccaggcagccaatcgcctcgttgcgaagggaccagcgcagccaatcaggcgtcgttgctacgcagtttggcctcgtgtcgccacactctgggcacggcgtgggctgggacatttggaataaacggatccgagtcgcagccggggtcgcaccgggaggcctgaggctgcggaagcagttaaactgccggcggggcgggagctgtggcggcctcccttccccacccccagcccggctccacgtctttgggttctgcagctgccactctctgggtggcggttggccta

SEQ ID NO: 161465 - DNA, 1000 bp, Homo Sapiens
ggcttccaagaacttaattcaaagaattgtaacaggtccccttccataagctggtttctttgtgaacaccatccattcattgttgacctcactgggttcacgtgtgatgcagcgcaatgggatctggacatgaatgtgggagatgaaagacaaagacagactgttccatcggtgacaagaactctgtgtgtgtgtgtgtgtgtgtatgtgtgtaagaatagtctccattatagtatttttctctgcgacacacagatggaggctgtggtgtaagagttacacctctgtcattcctccactttgttccggggagcccagccatctgcactcaggtcctcaggtggatttgccctttggtcgtcaggctgcactgtgagttctgaatccctggctccccagccggactcttcagtgcacagctgccacaggcaacctggacgaatccagccaggcggatagagcagggctcacctcgtcaaggactttgcagccgccttaactttgagtctccttgcttctgtcaggaggtgccacaaccttagacgtagctcttgttggtgttaattatttccttttcatttccagctggcacagagctttagcaccttaagttgctcaatttgatctctgcactcaggaacaaggtaattaagtcagccacaatataagaaaactcatctgcctcgacttgttgcccgtcttcagacagtgctccatcctaaatcatttgataatgtaagaggcttggtgcagttttctacttgactgagggttagttcattaggtcacaatcagtaattgattctcagtgtgtctctgctggttttattacagtaatgaggactgtcggttttttcatctcctctaatatgttacccaaaccatcagcttctcagtttggtgtcaggatgactttgacaggttgttagcaactatatgatatacagaacatcacagaaatatctcaaactgtgttgctgtataccacacagagccttag

SEQ ID NO: 161466 - DNA, 1000 bp, Homo Sapiens
gatttgcaagtacatttattacatatttgtcaagtcattttatatagctgttcttttatagtggaaacattcgaaaaaaaatgttttggagcgatgtgtctcttatttattccacagtcttgggaggaaggctattgtcccctcaccttcgagatgaagaaaatggaaacaaaaataaggtagattttctggttccaaatgagtagcagaaggaagtcagcgattcatgtgttcagcaagcatgcatggagtgccagtaaacacagggagtaccaggtcttggggatggaaatccaagggtcatactctcaaggagcttccggtttcagcggcaaaagggacaaatgaaacactggccaggccgccccttgccaagcaccacaggagccacatgccaccagggtaccatgcccagactctttacccacggagcatgggggctgcgcctccacggaaggctttttgaaggatgctaaccataatctgagatttgtaggacaggcaggatttagagaaagcctttgcagggaggtgaatggggaagggaacagagaggagagacgtgtctccacagccctgctcggggagtgagccgtgtgggtaattaccctttaatgctggtttgtgtccctgttattgtgtcactactggatatctggcaaaggcggggaagaatgcattaagccggagaaaaacacagattatgaaacaggcctagaaaacaaatgaagttagggacatttgtgtgggggttggtttggccagcaaaaggcagccaggtctcgatttaggggtttcttctcaccccgaccctatcccctggcagcaagactcatggagtctgaggaatcttgatgccagttgctgctggggcgtctttcggctgcggccctgccgtgtgcagctcctgcttgttgtatcttcttctcagttatcctttccctacacgccccgttgtctccatttgtgatgctagtgatgacacagctaagatcctttc

SEQ ID NO: 161467 - DNA, 1000 bp, Homo Sapiens
cagaactcttgagatttattcactaccatgagaacagcatgggaaagacccgtccccatgatttaattacctcccactgcatccctcccatgacaggcgggaattatgggagctacaattcaagatgagatttgggtagggacacagccaaaccatatcattctgcccccaacccctcccaaatttcatgttctcacattttaaaaccaatcataccttccccacagtcccccaaattcttaactcatttcagcataaacttaaaagtccatagtccaaagtctcatttaagacaaggtgagttccttccacctaggagcctgtaaaatcaaaagcaacttagttacttcccagatacaatgggggtacaggtatcgggtaaatacacccattccaaatgtgacagactggccaagatggaggggctacaggccccatgcaagttagaaatccagcagggcagccaaatcttaaagctctgaaattatctccatggacaccatttctcacatccaagttatgctgcaagaggtgggttcccatggtcttgggcagctctgcctctgtgtctttgtggctgctttcactcctggtgttgagtgtctatggctcttccaggtgcacagtgtaagctgttggtggatctaccattctggggtctggaggacgctggccctctcctcacagccccactaggcggtgcctcagtggggactctgtgtggggtttcaagcccacatttcccttcttcattgccctagcaaaggttctccatgagggcgctgttcctgaagcaaacttctgactggacatccaggcatttctctacatcctctgaaatctaggcggaggttcccaaacctcaattcttgacctctgtgcacccgcaggctcaacaccatgtggatgctgcctaggcttggagcttgcaccctttcaagccatggccccagctgtaccttggccccttttatccatggctagagcaactgggatgcag

SEQ ID NO: 161468 - DNA, 758 bp, Homo Sapiens
aaatgttgcagatcagttacaacaaacagaacggcgaccgtcaaggaaaactgtcactctgggctcctttttgaccacagcagctatgcggaagcagctgcagcttcgataagggccaaggggcaattcagatcccagggcggccgcctaaagcctcacctgtccatcattactacctgcttaagtacgccgggatctctgtagactaagtcagtcatcctgtaggccccactgcccacgctgtgccaatagctggtgtgctttttctcagtcttgatgggaccgttttatccgcctgtcagcccagagcgcagcgttgcgcagtccgaagcgagagaagggcgcggcccccgcgggctcccgcccctctcactgccgagggggcctttcggagctcgggcccaccgggttggaaggcccggctcctccgtgccacattcaccaccatctcgaggccgtgggaggaaaaacccggcgagtgcgcgccagcagcagcgactagcggggaacggcgcgcaggaaggcaggcagaggcttgcagctagtaagtcgacaccgggaatgcggcggggagaaagggcggcgcgtgtccatcccgagcccgcgaagcgagaaccgccagaggctttcctccgagcggaagaagcgccttcacctttcagtgcccggcgctgggcccacgcaggaagccgacccgccttggcctctggagttgtctctgggatgtctttcagttttagcaggtcgtgggggcgcat

SEQ ID NO: 161469 - DNA, 401 bp, Homo Sapiens
taaacactcaataaaaagctttattaaccttaatatgtttcttcatagcccttgtaaaaccctagccactcttttgcaataaagcattttcaaaaagtaccatcgatccggggttatctctgtgttcttttcctggaggatcctgagtgcgggctgtgtcgacatcacgtcattaatgtcttctgctccctgcactgtggtcaaaggcttttcaacgtagccttggatcccctgggtttgctgcagttcagtgcacctcaaagcacgataacaggaactgaaatggcagaaaatcgtttcatgcttggagttctgagagcacaaggggccccctttacttccttgtttatgtgacaacaggggaaatctcatcatcctcccctcgccaggctaactttttg

SEQ ID NO: 161470 - DNA, 1000 bp, Homo Sapiens
ccatcttaatgagttttattgatagctagaccaaaccaggattcaaaaccaaataagcattttttcatttcctttaatcctcataactaccttgtgagatacattttataatcccattttatagataagaaactgaggttaagagaagttaaataatttttcttatgtcagcttttaagtaacaaatgcaggatgaaaactcaaggctctggtttcacatcaggctctgttttgattatacttcagcgagattactgtgctttttgcttttagagagacaaggaggaaaaaaagcataattctcaagtccttcagaggaacatgcctacaagatgtctttgtgatatagagaaatagggttatactagtttgagaattctttctgtgctctataatctagaatagtcactatttctcttttatacatgtgtaaaatctcttttctgaaggtgacagtaattaacattcacactctgcaaatttatttttcaaggggtctatacaatactctgaagactgtgaaaaaataagaacttttggactcagagtcatgtttttcgcaatttaattgtgtgccatgtatcttggatcagtatcctcattgtatgttttatgtttctcagacaattcatgaaatgacatgacaaatattggccatgaattccttaaatgtgcacttgtgccttgtgtttgacaactgacttttgactaaaggaatgaatgaatgttggaggagatgaatactgttgaattcaaagggtaacagagatgctatgcagtacgtagggaatacccttggaggatgacagcctttgagagctagagtctgacagggaaagggagcctgagaagggaagggaggtgtcctcatctccccagggcctgatgacaatgttttttgctgtaagtgctggatgcctttactcatcttaatttcaaattgattcttcattttgcatcagttagacattgcgctgtagcagtccacacaatatcactt

SEQ ID NO: 161471 - DNA, 1000 bp, Homo Sapiens
tttgcagtttgtttgatttatacttttgtttatctacaacccaataacagacatgagggatggccctgtctctctgggacagagcctcacagatgatgtccatgttttgtgtgaatgaaactcaaacactcttcagtttttagagtcattttctggtatcgagcgaccacaccgaggagcacaccctgcttccaaggctgctgccttctgcacacagtgggggatccccacccaccctggctcccctcaagggctgcgtgcacagtgcccgctttccagttacctgacccaccctgagtccctattccattttgctcggggctgacctcagacatgccctgtggctcagctctgccactactcagaacaccagcctcagcttccctatgtcccccagattcagcagcccagcagggattgggggaaatgctcccacatcaggtgggtggtggcctggtccctgcagactggactggcttttcagccatctccaggaagcaacacctagcagacaactgtcccttaaccccaagggtgatgcacacttctcccctggtctttctgccccccgatgcccctacatttacacagcagtgcgcagacccttgccgcaacctgcttgtcttgctgaccctgctgtaggagcgcctaaactgagtgcccgtctcccctccaaaggcagctggcttgaatcctgtgggaacgtgcccttcaccctttgccagcagttgctggggagtctttccggcccctttctcagactcaccacctacctccaacctgcgcagaacaatcagcgtcctgaccacttgctagagatggcttcaggccgaccactccatcctcactgcaggccttcattccttctggcttccatcactgcatggccccctaagaggtccccctcctggcccttgtcactgtgcctcatgacagccactacgccctaagcctttggaggccagggacaaagtctcgttcactgtcctttccgctgcat

SEQ ID NO: 161472 - DNA, 1000 bp, Homo Sapiens
aaagtagttttatgaaagtataatattcatacaaagtcataaatgtaccagtcataaatgtacagctcattgaattttcacaaaatgtttacacccagatcaagaagaggaaattaccagaacctaccagcaccatcacccccatgcaaggatcccactgtcctggcttccagcaccacagcctagctctgcccatatttaaacatagtgtagctggaatcacagaatgtgaatgcccttcctcctggcttcttccacccaatattacactggtgagctcacgggtgctggggctcactcatcgccgttgctgtgcagcatccatttatccatgctgccccattggcgggcgtttgccatctctcccatttgggactattacaaatagcactgccctggagggcttggtggccacacatccccatgcctgttgtgtgactgcccagccaaggacttgctgggcacagggggcacctgtggtcagctcttgtggatatcaccaggcaggtgcccagagtggttgcctcatggttctatttagtgatccttttgacttcacatttaaataaaattacctcccaggagggaaaacatactactatagagcacctcatgtatcctggcatgagacacggctgtcaccaaaggacggcattgagtaaaggaaaggaaagcagccatgcagtcacaggtgcccttgaatttcccctgggaagccactccagggggcagggggcaggggagactgaaacttcagctttcaatagacacagctgtgaagacgatcccatgtccaagaatcctggagtgcccccagaacatctctcatcattaagaagtcaacgacaggcttccatgcggaggctgccaatagccaggagggaaggctctctgggctcacccttgccaggctgggcgttggtctacaccccactgttgtttaaattgtttatcattcattctctctctctctctctctcatttctctttccccaactct

SEQ ID NO: 161473 - DNA, 1000 bp, Homo Sapiens
ttgcaaagcactttattagctcacacctgtccactcacatgaaactcgtgttaggccctgggaggccgacggtaactctcaccgtgccctcagatgaagcacagagaggttgttacttgcccgggccatccagtgggctggctgggtcttgtgtccccatctgtggacccctctagggtctgagatgagatgagaagtgtctcctgtatccacctcttcctggcctcccttcccccacttcctggtccctgtccactcctcaggttggtgctctcacttcttgaaagctctaggcacccccgcctcccgccaggctccccattggctcctggcaggccagctgagaatgaacaggagatggaggcaggcagcccaggctgcagaggtgagggatgtggggccaggcccagagggctcagcctagaggcttccaatctcagattctcctgcctgtggtcatctgtttgtccatcaccccaggacagggcagacagaggggcaaagcactgggggccccagagcctagcttcccctcagcctgggggacatcacagcatttcagtgtcagtcacattttaaactgatcagcctttgtataatgttttttaaatcatttctaaataaaacagaaatacagagtgtgtcatttccctgggatgagggaacaaagatcaggttccaagagtaaccttaggacgctctgggaagagaaccgggtcctttggggtgtctgggagctgcccacccatctcctctgccagaccggcggtcagatagcctccctctacaacaggctggccctgggggcccagggttattggggttccaggaacacagcctgatgatgcctccttacgatccaggatggagagcagcccccccaggagtatggggagggtcactgtggcacgggcttctccatgacctgggacatgacctgggacacatagtcaagagcacggttatcagcaatacagatattaataaaaggcagacgaag

SEQ ID NO: 161474 - DNA, 1000 bp, Homo Sapiens
aaagaaggaagaggtttacttggctgagagcatcggcagacttgcatcttaagagctgagctccctgcaaactgaattcttggcctttttaaaggcttacaactctaaaggggtccacatgaaaaggtcgtgataaatccagcaagcgtggggaacgtgactggaggctacatgcatcagctaacagaacagaaagttttgcaatgctttttcatacaatgtctggaatttacagataacacaagtagtttaggtctggggttgatgttattattattacctttttaactcctagggccaggtggtggtgccaaggttgtctggctatttatcttacttttgcttctttccagctttttgctttctctctttcctcctgtcttgtgaactaggcaaggtggtgggaggagggcagcaggagttgtagcggtctccttccttagtgtgacacaacacccgacaagaataagcacacctatgatggctgcgatggaagtaagaattggggctactattcttttccatttactgaaccacttttccagccatcctgtaaaggggtcatttacccccgagttattggctaactcaggatagagcagtcagaccttgcaatgcctttgttatacttccattaggggcggtgttgtttgggatgaagttacaacattgatttttaattatgatgcaaattcttcctttttctgctaatatcatgtctaaggctatcctatttttcccaagccatctggctagtagcccctaattgctcagctattcctttaacagcatctctagtgtagttaatggatggctgttggttgtaatagatgtagtttatccaatttacattttattgtcacccaccaaaatattgactcaaatcctgcagctatttgatttcaggctttaaattgatctggtattccctgtgggactgtaattatgtctaaatagatgtgagagtcaaaagacccataaggggcttcttttgctttat

SEQ ID NO: 161475 - DNA, 1000 bp, Homo Sapiens
ttttttttttttttttttttttttttttaacagggtctcattatgtcacccgggcaagatcatagctcactgcagccttgagctcctgggctcatatgatcttcctgcctcagcctcctcttgagtagttgggactacaggcatgagtcaccatgcccagctaactttttaatttttccttggtagagagggagtctcactatgttgactaggctggttttgaactcctggcctcaagcaagcctcccacctcggcctcacaaagttctggccttataagcatgagccactagcctgggcaacagagtgagactgtctctaaagaaacaataaaataaataaagtatggaataataaaattttagtgaaaactgtcttgttagaaataatggctatgaaagtaaattcgcaatggaagaacctataattgggaacatttattatggacaaaatacggattgataaagtcatcattaaaatatttgagtggaaactattcccagtgaaaattgtttcaatgacatgaaagtgaacatggaaaaaatggaaaatgttttaaccctcctgtatggaaaattgatcaatgaattaaattggcttgcttgagtttattgcagaaaacgttttccaaccaaaaatgatgtgttgttagtatagggaccgtacaactggtttaagccaatatggatacattattatgaactaaagtccttacttttttcaaggtttccttagtttttacctaatgtcttttttttggttccaggatcccatccagatacatttagcccccttgcctcctcaggctccttgaggctgtgacattctgttagacttaccttgttgtcgatgacgttggcagttttaaggagtactttgaggtcaagtactttgtagaatgctccccaattgggatttgtctgatatttttgttatgataagactgggataatggggtattggaaggaagaccacagaggtgaagtgctgctcttgtcac

SEQ ID NO: 161476 - DNA, 1000 bp, Homo Sapiens
taggtacttaaaaaatgtttattgaatgaataaaccaatatacagaaatgtcacgtagagtgacggctccttttttctagcataatgtaaaactgaagaattttaaaatggttaacagttagttattaggtaacataaatcaactatattctatagagaataggatattcttaggatccctgtgaaaagattagcaagtgctgatctgcgtgtggtaggattacaggtgattttgttttacttttatgtgcacgaaggcattgcctaaatttttagaaagaacatgggttgtttttattataatataaacaagagtatgaatcctcaaaaaatgaagtatctccttaacatgcttcatagttttacaaggaaacagaatacacaggacacgttgctgctgtttttgtggcctctgctctcttctgcattccttgcttctctgtttctctcctctccccccgcttttttttttcttttccaaaacgtcaccggtggcagccttggcctgaacttggtgagatgtggttcgcatttgcacaaaggtggaatgcttcctattggatatttcaagtatttaggcatcggtgtccttattaccacatctctgctaatctggactcctgtccatcattgaccagctcctcctcatggtcaatgtgtcccaaagtcgtggtggcaagaatgctggagaggatttctagggaagcagtttatcctccatgctgtccatggactgggtgggccactctgaccattaagtttttccaagaggtgaaatggttcagtggcccaggcttgggagacccagttgggttcagatcctggtcctcccctcgccagctgcatggcctcaatcaagtcacttagttttgacagctcagttccctcgtccactggatcccagtcatgctgtaaacagggcttgctttggagtctgtcagacctggcttagacccaggctctgaccaaatgggtgagttatgcagctacttggtggcat

SEQ ID NO: 161477 - DNA, 1000 bp, Homo Sapiens
tagtagcatagtcatttgttattatgttcaagtattacgcactgtacataattgtatggcctagacatttgtacaactggcagcacagtaggtttgtttccaccggcatcaccacaaacacataaggaatgtcttgcaccatgatgttatggtggcctcagtgtcattaggcagcaggaactgttcagttccattattatctaatgggaccaccgttacatatgtggtccatcattgacaaaacgtcattaggcagtgcatgactgtccatgcaaaaattcatacttcttccttcaagagatagagtctaattgcccttccgggactggacttagtgatttacttctacagaataggatacaatggatgacttcagagaccagattataaaagggtgtgtggctcccatttggtggcttgctctctcttttttatctcagctcactgcaacctctgccccccaggatcaagcaattctcttgcctcagcctccagagtagctgggatcacaggcgcccaccatcacatcatgcctggctaatttttgtatttttcccagagacagggtttcgctctgttggccaggctggtctcacactcctgacctcaggtgatccatccacctccgcctcccaaagtgctgggattacaggtgtgagccaccgcacccagccttggtggcttgctctcttgaatcacttactctgggggaagccagctgctgtgttataagctttctatggagaggcccatgtggcagggagctgagttgtcctgaaaacagccgcaccagtgaggtgagcttggaagtgaatcgtcagccccgtcagattctgcacctccactgcagccccatgagagactgagccagaaccaccgacgtgaaccactccttgacttctgatctcagaaactctgtaaactgataagtgtttgctgactgaaagtgctaggttttgaggtagtttgctgcacagcaatggataagtgatacagagag

SEQ ID NO: 161478 - DNA, 752 bp, Homo Sapiens
tgtgaagaggactggcaggaagaggagtgccgcttcagaaagagaacaggcctcatatgcttcagacagtctttgtattgaggctgtggaccttggccattctcccagaaatgatgcaatcctgatgaacaagatctgctgccagagaaacaattgttaacagcctatgcagacagcaactcagccaaggagcaatctctgatcaactctctccataaaccaacagaacgccaaaatctctcttcctcaatttcagtgtcttgtcccaggcgctgccggggcctgggcccgggctgcggcgcacggcactcccgggaggcggcaggactcgagttaggcccaacgcggcgccacggcgtttcctggccgggaatggcccgtacccgtgaggtgggggtggggggcagaaaggcggagcgagccaaaggcggggagggggggcagggccagggaaagaggggggccggcactactgtgttggcggactggcgggactggggctgcgtgagtctggggattcccagcgccggcgccaggggcacccgggacacgccccctcccgccgcgccattggcctctccgcccaccgccccgcacccattggcccactcgccgccaatcagcggaagccgccggggccgcgttgggagggaaaggggtggctggatgcaggcgggagggaggcccgccctgcggcaaccggagggggagggagaagggagcggaaaatgctcgaaaccggacggagccat

SEQ ID NO: 161479 - DNA, 1000 bp, Homo Sapiens
tagtaggaaaaggaataattattttaataatgtcaaagataaaattaaatttgagacaaaattagtaaatgctacttattcctgatcatgcagccttaaaggaaactatctgtggccatgctcttttcagcaggattcaaaggtatttgaaggaagttttggttttatagaggaaaaggagtaagtcctgagatagatagactctgattagcaagttttcttaacactcttacgggatttttgaaagtggtggagactttctaattgttcttcaggtacatttttgtgtccttgtgtcgtaggactttttccttagttcagctaagagccagtttcttgtcacatggccatgagatattagactcgcagacactttgaaggttgaaaaaaatggaatttttgagcaaaaatggacagaaagggaaacaggactctctgcaaagctagggtcctgcaagtgtgcgtcctgcctcacagattgaattccaggttccacccaggaagaggaggggccaagctcctccccactgcaaatgaacaaacttcccgaggctccatcccagtgtgcactcatcccagggacaggtgggttgggggttctctggtgacccctttatactcagctctctcacttggttggctgcaattgggtagataagcgatttggggagatttcaaaagaggaaaaacttgcttaatcttcagtgacaaactctctgtagctagccattttggggaacaagaggaggctgatggaattacttttctcactcaaactcatgctgtttttatggcaggcaatctctcaataatatatttaggtaatattgcatattcttcttttatactataccaaaactccacaaagtgtagtctattaaaagttagttgcaatgtgttaactgaaaccgtatcagtaaactttttatcatctggtacattaaaatccattggtgtattttgaatttgactggatcttttcccagcctatgattttata

SEQ ID NO: 161480 - DNA, 1000 bp, Homo Sapiens
agcattaaatcttttattttgaaacatttttaggtttacaggagagttgcagaaatagtagagagatttcccacatatctttcatccagcttacataaccatggtacatttatcaaaacacagaaattaacattggtataatactattaaccaaactacagacattatttgaattttaccagtttttccactaatatcttttttcttttccagggctaagtccaggatagtacattgcatttagagctgtatcattgctttaaaattcttcacagattcacaatccctcattgcctgccctgggggctgaccactcccagctcccctactccacctgccttggtatacccctgattccactaaacttttgtggtattgggggtaagaagatctaatggcttcaagttagcaatggtgtgttaaaatttttttttttaataaaaacaaaataaaagaagatctaatggttgtgaagtctcatcctttggtgaaaggtgctgttgagcctgatacaatatattcaactgccagagcacagacacttctactttgtctagctggagattctttagccaggtactccttgacagtgactgttaggtaagcgacatttgcaaggtttaagtgcctagtgcacagaaatcagaaagcaaggcttgttttaggcaaacgtgccacatatcttgtaaggtaaagagacaaaaatataaccggtgaaacgcactgaaaaaaaatcctggcatagacactccgggtgcctgctccacatacattctccatttttcatcagaattcttgttttgttcaggtgaaaggtagccaggctcttcaaaggaggctggactttttctcagcctctctgaggatgcattcttggtaaagttaatctaatcacgtcaattccactcactttgccaatgattggtttagaaatgggcatgggatacaatctggccaataaggcatggggagaagtttgaggtttctaggaaagttttct

SEQ ID NO: 161481 - DNA, 1000 bp, Homo Sapiens
tttctccaataatcttattattttttcacactttgttgattaaaatctgaatccaaataacattctgtgatggttaattttatgtgtcaacttgactgggttaagggatagccagatagctggtaaaacatttctgggtgggtctgtgagagaattttcagaagagactagcatttgaagcagtaaactgagtacagaagaaccaccctcatcaatatggacaggcatcatccaatctgttaagggttccaatagaataaaaagagaagggcaaattctctccctcttggggctgggacatccatcttctcgtgacttcattgagctttcagactccaagattacaccaatggccccagtttctctggccttcggactcagactgaattacaacattggcttccttggttgtacagcttgcagatgggatgttgtggaacttctcaccctccataatcatgtgagctggcttccataacaaattccctcttatatacccatatatatcctcttggttctgtttctctggagaacgctaatacacatccataaattgcatctggtaagcatatctccgaagtgtctttaaccatgtctttatttttcccttgcaatttatttctgcaagaaactaaattgtttgttctgtagtttccatggtatgaattttgcttgattgtacctcatgctgtagtttagtacattcctttgtcttttctgtgtctcttgtgttttatataaattgatgaatagatctagaggcttgatcagattcaggttcaaaagatgaaatcatagataattgtgtatatttcaaccaggaggcacataatatttagttgtttcttttctgtgttctattcaaagccattgctttttgcttagattcattaattaaatcaggattgccacatcttgttattgtaattatcattcctttctcatttatctactgagttacttttttttttaactgctccttgtggagcagggctaccca

SEQ ID NO: 161482 - DNA, 1000 bp, Homo Sapiens
atcatgatcaagtgagatttattccaagaatgcaaagttggttcaatatttgaaaagtcattagtatcctgtatgtatttatagatccagggaaacaatacatagttatcccacagatgctgtaaaagccttgaacaaaattcaaaacccattcctgataaaaattactcaactgaaattgacaggtgctttattaataaaatgaactatgtcttattagtatacatgggcacacttcattttattgctttctgctttaccgtctttcacagatactgctctttttacaagttgaaagtttgtggcaaccctgcattgggcaaatctatcagtgccattcttccaacagcatttgttcatgttgtatctgtcacattttggtaattttcacaatatttcaagactttccattattataatatcagttatggtgatctgtgatcagtgatctttgatgttagtactgtaattgttttggagtgccaagaactgtgctcatataagataggaaagttaatcaatatatgttgtgtgtattctgactgctccactgaccggccattctcctgtctctctctccctctcctcaagcctccccataacttaaataacaatattgaaattaggctaattaataaccctgcatggcctctcggcattcaagtgaaaggaagagtcacatgtgtctcactttaaatcaaaaactagaaattattaagcatattgaggaaggcatgtcaaaaactagccctcttccactgaatagttagctacattgtaaatgcaaaggaaaattttcaggaaattaaaagtaagtgtcactccagtgaacaaatgatcaaaaaatgaaagtgccttatttttgatatggggaaagttgtagtagtctggatagaagattaaaccagccacaatcctcccataagcaaaaacctaatccatagcaaagccctaactctattaaattctatgaagcctgagggaggtgaggaagctgcag

SEQ ID NO: 161483 - DNA, 1000 bp, Homo Sapiens
ttacaaacctttataaatataatttttaaagtaaaaaaaaatacattgcatggcaatacaattgccatgcagatacatgcaatacaattgcatagcagatacaatacatgatcaatataaagtaatgtggcagaatggagacccaatatatcagttgtatcagtaaatatgagaggactcataaaaagaaaacatttttaatttgactcatcctcatcagccttcttggctagaactccccattctctcttgaacccatccagtcaggctccagttctcaccacccccacagaaacaactcttatcaagataaccaatggctttcaaagtttctattgctctcttcccagtccttatttttccaagtctcgcagcagcagttgacaaaggtgatcctgttctccccatcaaaaactgtttctttactaatttctgggatagcacctctcctggtacaggggaaggaaggaagacttccttcccagagacttctcagagttttttactggattcttctcctcttcctgatctaatcgaaggttggattctcccaggtctccttccatggacctcttctctttcctctcttcactttttctcatagtatcttccatcattcccttggctttcatggacagggtgatgatctccagatttgtatcccagaccctgaggtcttccctgagctttagactcacagacccaactgtctactcagcttggcatcagcatccatcctgctggattctgcagatcctgctgcccagatgccacagtgtggtctgtttgggtacagactagccatctcaaacctaatgtattcaaagctaaattactgatttgtcgttcctggtttgtttcctctacagtcttccccatctcaggaagcagcagcaccattcacctcgttgcttggttgaacagggggagtcttccttgacccctctctctcagataatttctcagtaagtcctgttggctctggcctagcacagtggct

SEQ ID NO: 161484 - DNA, 1000 bp, Homo Sapiens
ccttagcaaccagcatcactttcatgttacccagattgtttctctcccatgttcctatctccgcaacatggcctctaaaagtattccccaatgaaggacagaaatgatgactattcacaggtagtttcttaacccaagtggctctcatcaggcagacaaacgttcttgattaaatgttgatgaagacagggcaatagcattttggctccaccattagctcaactgcaaccaattaaagagattcacgcagaatatgcaggtgctaaatcagtccccaaaagcatattttggggtgagcctatcaatgtctccactccttctggcccagttctctactcaacctcccggcccaccccaccccccaggggtcccggcgccatttagctcctccgaagccgccgccattttccgcccccgccggatcgccgctgtgcctcggcagccgctcgcttccctactctgcagcctgagccacgggcaccgcccggccctaagagggaggccctggccggaacgtgcggggacggcagctgcaacgtcaggaaggccaggctccgaccccgcccgcagtgccccggcgccgacagcttgcgccagccggcgggagctagcgggcagcaagggggccggacaggctccactgggcggagcggcccaggatggaggaagcagccacgggcgagagtggctgcagctggagtgagcgagcgcgacgagccaccggaaacggagctgcggccgcgccccgcccccagctccccgcacgctgcccctcccgctcgtctgtcccgctggcggcccagcgtgctggctgtacgcgtcacttccggctgtgtcggcgcgcgaaaaaaggtcctgggttggaatgtttgtactggtctgtggcggtggttgtcggctgtcctggagtttgctgggggagggcgcggaagatgaaggctgagagcggttcctgtttatttctgtttgccatccccttttcctttgcttggagaacagg

SEQ ID NO: 161485 - DNA, 1000 bp, Homo Sapiens
caagacagggtctccctatgtcacccaggctggagtaatggcatgatctcggctcactgcagcctcgacctcacaggctcaagcaatcctcccatctcagcctcctgtcataggccaccacacgcagctaatttgtgtatttttttgtagagctggggttttgccatgttccctaggctacacttgaattcctgggctcaagcaatctgctgcctcggcctcccaaagtgctgtgattacaagtgtgcagcaccatgcctggccctgcataattatctgatgtgtatctcaaggcactctaaaagttgcttgagtagaatggggcatctgtctgtagttggttaccctgggacatgggcacattcccctgggatatcgttgattctttccaaagagaaagacagcagatgaaagaaattagggttttgtctcctggagactgggaaagtctcaggtttaccttgtatctccaaacctagcacacacctggtacacggcaatggcatatgctcaatagaaatgtgatgaagggaaggagagggagaaaggtagcggggaaaaaaggaggggataaagctcccatatgctctacagtgtatattcctacaaccttcctaactccaaaggggagaagcagactcactgtatcctaaaacattgataaaacacccacttcagaaaaaagtaataacaatcaagtaactattgaagatctatttgacctaacagcatagaaacagaagaattacacactggccagctgtagcgtagggcctgatcttaatgttttagagctggagaggcctggagtcactcaagaggcatccaaatggaatgtgaaatgacttacccacagtcacatagcttgttagtattagaacacaaactaaaacccaggtctcaaaattcccagcccagcatttttcacgctgcagtttcctatatagaacagaagcaatagctgttcttgaatcctatcccttcctgtttcctaacccaa

SEQ ID NO: 161486 - DNA, 1000 bp, Homo Sapiens
ccatgcatagatcatcagcacgaggcaggtaagggctgcagctgagtcaggatccactcaggcttacgtggtctggtcctcagcagacccttcctagaagacacgaaaacacattccgccttccaagtttctaaaccagaaacacctgcgttttgaaacaggtggtcaggtactaaacggagagggtgtaccacgtgggaggggccttggcatgtctaggcaccaggaagactgtgctccaaattattttttttgagacagagtcttgctctgttacccaggctggagtgcagtggcgtgatctcggctcactgcaacctccgcctcccgggttcacgccattctcctgcctctgcctcccgagcagctgggattacaggcgtgtgtcactacgcccggctaatttttgtatttttagtagagacagggtttcaccatgtgggccaggctggtctcgaactcctgatctcaggcgatccgcccacctctgcctcccaaagtgctgggattacagatgtgagccaccacacctggtctggagccctctgttcttaaatactcttcaaaatcaggctaaacctccagaaaccgaatttctaggctgcaatggcattcctcatcgcccatgctgcccttcaaggcgtttctgcagctccaacaacagctcaccctccgtctccccacaggctctggggtgaccctgaggtttcctctcccggccaccatggccctaccaatggtcactgctattcccacagcaatggtttgcctcatgcctcgaaactagaaaggctggagctgggagaacgagaaccctaggagaaagagaacaagaaattccaagactgtcatcctcctaatcagagggctagacttggatgtggctccgtccccacccatgtgccaccatcactgggcacttaatacctgcctggatgctgccaggccaagagctctgcctggggaccaggtacagtaactggcccccagatggcactgg

SEQ ID NO: 161487 - DNA, 1000 bp, Homo Sapiens
ttataacataatgggtttatatttaatatagtacttctcatcaggaggatgttactcagttaatataaagttttttttcaaaacattaaatctcttttccatgtcaatgtctatagtttttttttaacattaaatttttttccgcatttcagtattagatacactgaatacatttttctaaatgttttttccctagagataaaagttttcctttttgcctgactctctgatatctaaatataatattaacttgggagacaacaaaacaaaaatctaatttaaaagactcctcaacgattcaggaggcagtgattataaccgaacagtggtgatttcctaagattctgggcaagaacttccttcttcctatttcacatgctttgagagaattctaagattatgaaatattacttatgtaaatttcagccatcttacttctttgactacctaactagcaaattataggctgcatttttctgtgcattatttgttgtaaagaaaacatttttttttcaatttataaatgtatgtttgttgccatttcatggaaacaatgaaaaatgtgaaactcccttatttactgattcttggaacctttcacacaccaaatctcaggtttagcctctaaagcgcaaaggttttcagggtgaggtttgactcagtaggcctttcaaagtcacatctgtccatttctttttcgtgcatatacccccaagcaggcacaaatgcctgtaatgctgagaaccacacctaacaaaagggcgattgcatcaccggcttctactgcttccacaacaggcagcaccaaaagcagtgacatgaggactaaggacaactgtgttgaaactgaggtcatgatgttggaatcttgagggctgaaggttccaaagaaatggtatatatagaattctatctgacttgaaattttcccttcctggagctccggatgctgagattaagaggttccacgtgacacgactttggcccggcaaggtccaaa

SEQ ID NO: 161488 - DNA, 1000 bp, Homo Sapiens
aagtgtaaatatatagtttaatagatagtgataaaaattatagagcaaagaaagaatataaagctttggatggtcatcaggtaagactccatttagaaggtgaaattttaataacgaccaaaagaaaagtaaggaaattggtcatacaattgctatatatggatgaagagcaattcagtagaaagaatagcaagtgcaaaaattctgagatgagaaaatgcctggcacgttcagagaacaaaaagggaggcagtatgcccagggcaagagaataacgatgagcagagttgaagatgaaattagagaaataacaaaggttcaagtactgtagagacatttagaccagtttaagagctttatttagatttgatgttgagtaaaatggagagctatttaaaggctttgagtagagtgaggagtgggaaagaacagtaagcgatgaggtcagagataaacagaggcccatattcttccattttatgtcatatttcctctctccacaatacataagaaaaatggatgtatcaatttactaagaaatattgctgagtaaatgatattttatgatgatattaatctgtttattacttaatatgcaggaacagtgactaaaaccaatacataattatcaaaatattgcaatataccaaagtataataatgtactgaacatcaagacagaccaagcatttaatgtagcaacaaatctttaacagacaattgataatactaaatatttaacaaataaatcagttataaatgtatagctttataaatgttactacatttatttggatttgctgaaatatcacaaaataaatacaagtaaaaacatttccttattgtaaaactgccttccataagaaaaacctatgcttggaacccaggttcattgccagaaaaaaacaacccaaagcaataagtacaaagtgaaagaaaacaaaccacaaatcaaaacaccttttgcaaaatgttaaatcaaataaacacaccttgcgttg

SEQ ID NO: 161489 - DNA, 1000 bp, Homo Sapiens
cccaggctttctggccacctgttacaaaagcaatggaactgggagcaaccccgcaaaactggtcagggagtattgccactaagacttaaggaacagtcagagcctatgcctgtcgtatctgatttggggaggcaggagtagggctatgatttttaagagagttaggctaggcagtgtcacttacaccccttccagctgtggtacttcatgatcctctgaactttaaactcgagaaagcaatagatcacctggaaccacgcagcatcctgaaccccctctctgggcaaggcttggaggcatggccggtcccttcaagcccagggtggccttgacattcccgggatccagttgtcagcctttcttttctcggtgcaccctcaggtccatgcgggttcagacctagagctcagacttgcgtaggccaatgaatttacctgttccaagaatccagaacaggtggtgaaagatgaaaatcttcttagccagaatccataatgtggaagggagcaaagattcatggaactgtggccagggtctcctcctcctcatgctgagcgcagcacccgttcgcaccccaggactcaggctggcctcctctgcaggctttgcttctccttttgagatggccttgacaggactcttcaaccagaaccagagctccgtgcccaccctctgaaggattttaaagcagtttccacagagcacccctccaggtcctcgatcttggctagttgacacatcctcattgatccacaaattgtcatttagatgtaaaggaagagggctcaaagttagcacccaaaagcacaagatccaatttcgttccccacatcttcagaaaaaaaggaaaagcagattgtagcttctttctgaacttgaagagagagcattttctgtagatttgaatagtgcatttttacagtgtttactaagacctatggttccaattccatgcaccagttctgattgtaccttcacctttaactcatgaagattttga

SEQ ID NO: 161490 - DNA, 1000 bp, Homo Sapiens
tttttatgattccatttgatctcctttgttagtttaatagctgtaatcttttggtttgttatcttagtggtggctccagggtttacagtgtacacctttaactgatcacggctgaccttcaggtgacagtagatcacatcatgtacagtttaagaatctgagaatagtaaacttccccccttttagtctttaagctcttattgtcatccattttacttttacatatattataaactgcatattactttatttcctaaacaattatcttttagagaagtttaaataatataaagtatatatccatgttgttactatttctggtatagatacacgatgttactatttctggtgtagaccatttctttgtgtggatccagatttccatctggtattgctacgggatccttgaggtattacttcatcagccaaaagcctctatggccagtggcgccttttccagagttttgctctggatctctggtcttgttccacccactcggcctggcaggctgtgctcagttcccactatgagcctggatcgcttgtctgccaagggtaagccaggcacggaggagcaaggggtgtgtgagcaagcatggggtccggccactgcacacagccaggcatgccggctgaggggggataggcgatgggcaggcagcttcaggcactggcacgggtgccagctccatgcaaggctgcagctagaccaggcataccataagcagcttccacggctgacaccagggaatgtggtggtgcccagaaccctgaagatgccaggaacccacagagccctaaagagggtgtcacagccctggctcggagttcctaggtctgggctccctgaagagccacagctcttctcttctctcttctcattgcttgcaatgtgacaaacaaggggcatgtttcagcgctgtttgtgttatagctattttagctccgccattcagcaggtctccagttcttgtcctgagaccaggaagaatgatatatg

SEQ ID NO: 161491 - DNA, 1000 bp, Homo Sapiens
acacatgcatactttatgtttattgcagcactgttcacaatagcaaagactttgaaccagcccaaatgcccatcaatgatagactcgataaagaaaatgtagcacatatacacaatggaatactgtgcagccataaaaaaggatgagttcatgtctttgcagggacatggacaaagctggaaacaataattctcagcaaactaacacaggtacaaacactgcatgttctcactcataagtgggagttcaacaatgcaaacacatggacacagacagggaggggaacatcacacactggggcctgtcagggagtgggggctaggggagggatagcattaggagaaatacctaatgtagatgatgggttggtgggtgcagcaaaccaccatggcacgtatataccaatgcaacaaaactgcacgttccgcacatgtatcccagaacgtaaagcataatacaaatatatattttctgagttaaaagcaaaaaaatagctatttactagaactgtacaatagggtatgattctatatttagacacatacaccctatgaatattttaaccaagaatttatacaagtgcatatacattggtattactgtaggaaagtatgaaaaatcctcttgaaaatgatctaacaaaaaggttctatttcagaatattgtggttacaaacaattttcactttttacatttttatttgtttttcaaaggtgtgaatttcttctgcagttagacacagattatgactaaaaaacaagtggcttttatgtagattcatagtcaatatcatagtcatttattttaaaaagctgcccagggcttgttaagttgctgtcaagatgaagcactaggggatcagcatgttcaggtgaaaaggtgctgctcagggaagaggtgagaggaggctgcaggtgctgtgtgctgacttacctgagctagcacagatgcagcacacggctcacacactacctcttatggcattatcactacccaatct

SEQ ID NO: 161492 - DNA, 1000 bp, Homo Sapiens
ttatcatcaaaccagtcattatttattgtccagggatcaaaaatgacatgctaaatattaatgcaaatatatttccatttttatacaatatgaatctatttcaaacattaataatttcaaacaaaagaaactcaattttttattccacacaattcttcattttgttaaaaaaaagttcttttgtacaaatgcaagtgaataaaatgtattactaaatataaccattgaaatgtattaaaatggatcccttatacctacttagtaagtatggtgggatctgcagcagtcaaactcagttatgagtccaaagcttcagatttggcatggatggaaaggttaggctggatgaattcatctttacttgattaaccttaatatttcctacttaatacataatacataatacataagccttttacaatatacttcattttgtacaacccatgattctgaaatatatgcaaaatatattttaaaaaattggattctttttaaacatattaggagaatttactatttacagaattaatgtggtgagtctttgtattaggttgaattttatgaagttggtgatatttgagcattttttggcctatcaaatggcaatttcatatggttcagctaataaaaagtgaagaattgttcttttcatcttaaaacagagtacacatatatataaataacctacctgtttatatactggctaatgtgcaattttggagggagtgggggtgggggaaggcaatccaagtcagcatttcgaatagaaggataaattcaaattgtgccgtctggttactctggctgcctttttgagcagtaatatatgttaatacattggggaataaatataatgtaaaaattcttttctttacagtaagtttgctacaataaaaacattcagtttattttcctaaagattaaataccatgtgagtcattataatgacacatctgcttaaaagcatttccatttatattgtcactggaaattgggtggg

SEQ ID NO: 161493 - DNA, 1000 bp, Homo Sapiens
atactttttaagcttttttattcttgaaaagttcaaagatatacaaagatagactatgcaggataatgagcccccacatactccgcatctcttgtctgtaattatcagctcgtggctacctctacctctcccctctacctcttgtctcatctctacctctccccctgacccctgactctgggtcattttgcagcaaatcccaaatgcgtatatcatttatcctaaatattccataaacattccactatgtagctctgaaagataaggacgcttacaacacaactgcaatatcttttttgtttgtttgtttgtttttgtaaagacggggatttcgccacattgcccaggctggtctcgaactcctgagctcaagcgattctcccacctcagcctgccaagtagctgggattacaggcatgtgccactgtgcccagccaagtgcagtatcttatcacacctttacaaaattaataattccaatcatcctatagttgatcagtgttcaaatttccaattgcctcataaaaagatcatttcttaacattttgttttgttgcaattggttgctgtaagtcacctaaatatcttgcctcttttttatactttttattgtagtaaaataggtataacatacaatttgccattttaaccattttaagtgtttaactcagtggtgttaattacattcacaatgtatagccatcaccactatttagttcaaaaatttcaagtctcctttattttcctttttttttttttttttttaattttagggactaggttttgctatgttgcccaggctggccttaaactcctggcctcaaggtgatccttctgccttggcctcccgagtagctgggactagaggtgtgcaccgtcacacccagcttcaagtctcttttaattattataaagttctggccatgcacagtggctcgcaactgtaatctcagcactttcggaagccaaggcggtcagatcacctgaggtcaggagttcg

SEQ ID NO: 161494 - DNA, 445 bp, Homo Sapiens
tcatggccactcacccggggtcagcggccgctccgcagccccgccacgtggcaggtgctcgtcctcagagaagctcgagtcttggttgggttcaaagtcctcctcggctgccatgctctccatcagcttgctcacagcgccccccttgctgaggttctccttcttcacctccttccctttggccttggctttgctccttctggcagcagtcagggagatgccgtgaggagccctggcctcagagggcaaggcgggagcttggggtggcagcagcccagctcctggcatggcctctttccctttcttcttctgaaggaggaagcagcagagaggatccatgaaatagcagggaaagtgcaggcagcactcctgtccccctgactcactcactcccaagttctgtgccaccccaagtgtgccctcccaggaggaacaaaacgcccct

SEQ ID NO: 161495 - DNA, 1000 bp, Homo Sapiens
tcatttcttggctctacttgcattcagcacttgttcttgagcagctttctttgcttttaccatctcgacaagttcgcttaagtctgcaaccttgtatcgtttcatgcagtccttctttgtcctgccaggcaccgcttctgctattttttcccatctttcaggtgtatttactgggtatgttttcaaagcttgttccaaaagcttctgttcttctgttgtccaaggggtgaagtctgtatatggaccttcaaatcgttctgaaggcgttgcgttgtctgcttgaggtaccactccatgttcttttttgaacttatcaaatgcctttttatttatgtcatctttttgatgagggtcaagtttttggagactctttgctttgccaataacatctttggcagttcttttgactccagaggaagaatgtatgttcatgtaattagcaataacttcccatcttgaatttgttccagcagggaacagattcacagctttaattagtaattgtagatcatcttctgaccaatttttacttccatttccacctccaccagttgatttctctgtgttcttagatgcttgtcgcatacgagcctcagcttcctctttctcttttctgatttgctcatttatttcttctatctgtttttccaaagcagcctttcctacttcttttgtgcatgatgtgagtgtttcattcaagcactgtaagcttgccagttcaagccgatcacaaagtttttccacttcttccatcattttaacccgctctgcctcattatcagaaaaatgattccaggtcttgcatgagtttcgaagtttttgcctttccttcttaatggcttttttctggatatctttttccttctttgccagcaatgcttgctgtctgacttcctcctcttctttctccttagctaaccgagcagcttctaattcagcttgtctttgtaatgttcttattctgttcatttcttctttttttctttgtgctcttgttgct

SEQ ID NO: 161496 - DNA, 1000 bp, Homo Sapiens
tcacactaaatgtacttgttcaagccagtcacttgaggtttgaggtgtttgacttgaaacatctgaaccatctcctctgttggctgcctcgttaccactgtcaccagcttgagatgctgcttcccccgccagaatattttcttccaaaggattttcttctatctgggttcctctaccttcactgacactggcatcttcaaacattgaatcttctggcagcaccagttccacatccttcacaccttctgacccatctttgatacaggggagctgggaatctgcactgatttctgtagttgctggaggaatcagggcaatactctgagggttcatgtcatgaaaccaagccatgatgttgccgagaagattgtcattgatgttggggtcctggccagctgagtcaggatcactagatgagggacagaaatcacttcttgcctcactgagagggtgtgagctcagggtgtcagttgaaaatgggtcattctctgctcctagtctcatgaggctgtcaccaagttccaaaagctcagagctgctcaatgcagcccgagggctatctgtatttctggggacagagtccagcctggaaggtaaagaagtgcctatcgcacctaaggatgcttcattactgaggaagtctctagtttcttcatcgagggccagcccagactcttgcagtgataactgtattgcaagaagtatattgggatcgtcttcatccaaggaactcagagcctgaagagagtcctggttttcagagcgactggcaggggtgtagtcacgcagggaagagctgtgcagcacactcatagatgcagaacttaccacggatgtgccaggcctgcggctgctgctgccgccttctggaatatctaaagtgctttcacttggctcatcagggtctggaggattactgagtagactgtgaacatctcctcgacgacgttgtctgtgcctcctccgatactgaaattcagcatattcctctggtgatgca

SEQ ID NO: 161497 - DNA, 1000 bp, Homo Sapiens
aaagaaggaagaggttttttattcggccgggagcgtcggcagactcgtgtcttaagagcggagctccccgaaaaagaaattcctaggccttttaagggcttacaactctaaggggtctacgtgaaaaagtcataatagatcaagtaagcgtgaaaaacgtgactgggggctacatacatcagctaacagaacaaaaagttttacagtactttctcatacagtgtctggaatttacacataacaccaatagttttggtcaggggttaataatattattattattttagccaccagggccaggtggtggtgccaaggtcctccagctatttatcttacttctgtttctttctaactttttgctttctcccttttctcctgtcttataaaatagggaataggagaggttggggagaaactgagaaggacaataggagaagtggtgacctcataccataaattaacgtgtaaccttttggttaaaatgtcaaagctaagactaaactcgaagaaaagaattaaatcacgggaagttcttcagacttagtcgccagcaaggttatggcccgaagtggtgcaggggcggcacgcggggaagcgactggcagagctgtgcgcactgggggtgctgcaggcgctggggagagtgtggagaggctgcgtggagctgcgcgctcggggtgggggctgcactcccagtgaagcgcgtgaagggcgagcggtgatgggttctgcgccagtggggctgggagcgtgtggggggctgtacgtgcagctgccgcaaggtggagagtgcacgtgtgggcttggggactacgcgcaccgggggctgaaggcgttggggagggtgtggggggctgtgcgtggggctgccctcactggaagctgcacgctcagggaagctcggaggcgggggtcctgcgagtgctggggagcacgtggggggacacgcagggactgcccgcgcaaatggcttcgaacgcatgctccccaccccacattt

SEQ ID NO: 161498 - DNA, 1000 bp, Homo Sapiens
gcatatttatgaacttttttttcaaatatattttcacacattttatctaaatacataatacagaagcctgtgtgacttgggcaatgtggccaggagggcctgagactaacacatccaccttggcaaaaggacataaaatatgtcttatggtcagaaaaatcaacattttgtgtatttacttagtttatgaaaagtactgaaaatgctattactagctgaatttgtgatttccttttgaaattctgagttatccttatttttcccattttgtttttgcaccaaggagactgcagtcaaataaaacagatactacacgcactcgtcggggcagccgtactgcagaagcacgttgatgcactcctggctggaggcctgccgggcgtaggtcagcgctgtgttcccgtgggcatctcgggccatgacgtccaccccgtaccagatcaggagctgtgccaggaccacattccccttgcggcaggccagatggagcgccgtgcagccgtctccctccccacaggtctcgttcacctcctcacgggagccatgtgccagcagcaggatggctgtctgcaggtcctcatcagcggtggcccgcagcaggtgctggcccagggacagctcagtgcagggtagtggggccagaaagagcttctcctcatatttggaacggatccaccgttccttctcttccctcgtggactttactgagggttttgtctgcccctggctgctcccttcccagatgctgttggctaggtcattgccaatagatgacataaccttcctgagctcaactggccagtcatccagctccagagatcgcacacgggaaaggcgggtgccaagactgcggtggattcctgagcattcaatacacatgaggactcccaagttcaaactggcccacttaggattctgggtctcatagtccacacagtgggcgttcccacgcatgttttggatcgactgcagggccatggcctcgctctggctggtcagc

SEQ ID NO: 161499 - DNA, 1000 bp, Homo Sapiens
ttagttggtgcaagtgattgataagagccaatcgtttattttcactgtcccagtcacaagctctccctctgtccccactcctgcctgctcctacctgctgtggagagcaccctcgcgctgcctccccaccctccccacaccacctcatcactctcctttacttggctgccagtccagctgcctcagaatgtcagaagggtgccattttcagttcttttcctgtctgactgtagggtatagaacaggcagccctaagtgctgctttctgcgcaaatgttttttgattacaaatctctaactaggtttgaaatgttttatagaataagacaatattcttttcaacaaactttaaaaaaaatgtacagttttgttgtttgtttccacctcccccctcccccacccctgcttgagcaccctccccccccaccacccctccccggcagctcagccccaccccgacagcccctgttttccttggttgtgttttgcgggggtgcctggcacccccagagattcagcttcatggctgacaggtgaccatggcaggggcttcaccgatacccttggtacccgtagtaattcctgtagtatcggtctctgtcctgggggtggtggtagtagtaactctgccaatcccgattgtattgtctgtaatagtctctgtatctgttgtactcataatctcgcccgtaaaatcgatcatagtctcccctgtatcgatcatagaaattacggtaaccccctctgtttccaggctgcccccagtactgctgcccgtaggcccggttgtcgtagcctcggcgctgcccgcccacatagccttggccccggcttcggttctgccggttacgcttgtttcggttgtttcggcgatttgtccgcttctcggaggggggcagaagcttccttgcctcctccttgtacttagtgacaatgggctgagcttcctccttctccagctccccatatgtcacctcatccatatagtcgcatttttcag

SEQ ID NO: 161500 - DNA, 839 bp, Homo Sapiens
gtaaatagagacaaggtctcgctatgttgcccagcctgggctcgagcagtgctcctgcctcaccctcccaaagtgctgggattacaacaggtgtgaaccaacacacctggctccccaaggttcagtttttatcctcctcttggagaggtgagtgacttgaggtcatttcttcacaagctccggtaggcacccacagtattgtcaaagagttttgtgttagggaagtgtccagttttgtccaagaggaaatagaagcgtcggcctttgactttcagaggtagcatggcagggacttcaccccggtgggccatgcaagatacctgcttcaaaggaactgtgaaatgggcccccaagccaaagggggcatgagtggtgagggtcacctgctgccctccagctcgaagcaccactgagcgcacagaccggagagagaagagaagaccagcaccgagtacgagggctccgatggcgccgcagccgacggccagaccgtagcgccagagcgcggagcgcaggtcgaaggggccacgatttgggacctccgcatccagaggctgcaccggaaccgggggccgggacacggctgccacagccatggaagcccagaagacgccctggcccgcgcagaacagcccgaggatggtgaagaagcggccccgatcatgctcaaagagcagcacatcccgttgcagcgtcgtgccttgcaggggccggcaggtgagcaggggccgcagcacggctagcagccccgtgggccatcgcctccaaggcgccgccatggccagccgacttccggggtggggcttccaatccagcacgcagaacacgaaatacaacat

SEQ ID NO: 161501 - DNA, 1000 bp, Homo Sapiens
taatatttaagacacttgatgaaatatattctattagtaaatgatagagacagaattcaaacactccacaaacttcacacagcattcaacaagaaataaatagtaccaaccttccagggaacagttgtatggtctctacaacatctttgtatatgttttagaaattaatctatcaaatttttaagttagttagcatttcagaatattccccactcctctctttaagtcaaagtccacagaagtagcttggaacagtcagtcttagcatgaacaacaatgacaataacaaaaagacctggaagcttagtgtggcttgtatttcaagttcaagtggagccctgtcaggttatattgcaaggattctggtgttgaaaaactctggtaactttttcatagtaatcgtagaccatggctggggctggctgaatgttgaacacaaggttgctctgctcaacagaaaaagggaaactgtctgctcgaccaaaaccattttccaagtagaaaagaacatggtcattcttgacttcagtcttcatcacttggcccttgttttcaagctcttcaatggatgacatggttggagtaaatcctgatagcatttttacatctataaccaccatactggatttattgcgaattccagtgtatttgagggtcactgtgaggtcaaaagcagtcgaagagtagttctttactatttccaaggaaagagaaaatccagatgccttcttaggtaggagaacattgtacttaagggtggcctggataaatgtacaaccgtgtccttccacatctactgtgtattgtccaggtgcctgtgttacttctgaacgttggaccagtaggcgattatgaccgttaacctggaaaatctcactggatccttcactgctaaaggtgacagtgttttgatcagccagcaactcttccgccccgggctcttgggacccccatcgcaggtgggggaggcacacctcgcgaggcggggactgagagccag

SEQ ID NO: 161502 - DNA, 1000 bp, Homo Sapiens
catccaaatcaaggctgtatttatcgtcactgattgacatgggaacagaatatttaaaacaaacagggtccaccgtggaaatgtggctgaaacacagaactgagcaaagcaagtggctcgacggctgaccccgaaggctgggaatcccggcagggacacagcccagacatcggggaacacaaaaggccgcaaggggggcagggcatgggggggctcatgtgggtgagggcaaaacccaaactgagaggaggccaggccaagggcctgggaggcgacgaccacaccgaggtgacgctgatgcctcaggcggaagaaaacacacagcagtgattttgtgtgtgtgtgtgtgtgtgtgtgtgtgtgtgtaaaatcagcctttagactcttgcacttctatacctccaccgatctggtctacagattccaagaacactgcaccatccacacaaacgtccacagcatcgcccttgcggctggagccggccagtcctgaagcccacaggagccgcccaggagtgctgttctgctggcccaggggctctgctgggggacccaacccctccacggacccaggggctgggaggtcgctggcggaaccttcctcccccaaccagcagagccgccgggaagcgcttgcatagttgaaggaaagttgctgccattaaacttctgataatgtttacagccagcagcgcctgggtttttgtgaccatgttagacaaacaaccagaggggtttctggaaacggtttttataaagtctatctagattaagaatttagtaacgtcatatatttatatcaacagactatttacacgtttcgtttgcttttaaaaaaacaaaccaaaaaagaaattacacttctgcataataaggcaaaaaaacaaagttttgtacattattattttaatataatctgtaacttcggttccaagtaccaagggggggccagggctggcctgagtgggggcctcacagtgcgctggacaaagtgaccggt

SEQ ID NO: 161503 - DNA, 1000 bp, Homo Sapiens
acaaattgaacaaagtttatttcatcaacaatgaaaaatgcccagaaggaaatgaagcacaagattcagttacacaaagatgaaagctattgaccacttggccacttctcatactaaaagagaaggaaataacacgaagtactggaagtgacattatattgtcctcatggtgacaaccaggatgggcctgacataagccagtccaggctgtatgtgtggcccgagtgcacacatgcggtttctctggccaccgaatcagaaccagctgggccccacaagtcagtctctgggggctgtgattctgcattgcaaacaagtccttgggtagctctcagggttcaccaagatttgagaaccactagtgtggctgactccagtgaaacagtcccacttttactgctttcaactgtcatttatatagattcaggcaaagaatggtttttagaatgatgcccgatgtagcaaataaaatgatctcaacatatagtttatctttgctgcagtcttttctcagatgggaagaacagattatccctctctgccacataatttgttcccttgaggtttcatagcatccagaaagttcaggtgttcccatgtccacttcccattgccttgccaggttcccatggaggaaggctgcccagctcttgggccagtcttagatgggcattttcattctccaggtatacacagcacatttcatatcagtgtggactgcctacttcaggccatgccaaggattataacttcttctataaccaggaacttcttacactcacctccagctcagtgaaattatactaagaggtgatcacttaaagggcacgcagctcagcccttcctagacagtctgggtgtcatccctggattaagccagacttcaaagaaccacagttatagaccatttgccttacttagccccagagcctctttcttgaaatgtgccttatcataaccatctcaccatctcctgagggaggccttaatcagttatcat

SEQ ID NO: 161504 - DNA, 631 bp, Homo Sapiens
ggtgtgatggatgtcagatgtttcctatcaatggatccagattcaaatgcagaaactgtgatgactttgatttttgtgaaacgtgtttcaagaccaaaaaacacaataccaggcatacatttggcagaataaatgaaccaggcttcagcagaagaaacacttcctataaatctcgcccaaacaggaaaggacaaagatgcatgcataagtaaaaatatgacaggtcacaatcacgccggggtggtcctggggcgaggcccaagttccctgcacgcgccggcacaagcacacacactgtgacggggaggacgtttacgtaccatgtccacaccactccagacttggtgagcgccagtaggaactgagctccacactcaatctggcacaccccctgtccatttagtctctcaatgttctggggaatgttgcagccttcacttccgccccggcccaattttccaaagtcaccatcaccccaggaaaataccaaacctaggtttaaaaatagggaagggaagggaagggaagggaagggagagaagaaaggaaagataaagaaagcccaacctccttccaaaatgtcatgagaatcttgagcacatatggtccttggcatgaccacatgacctgc

SEQ ID NO: 161505 - DNA, 1000 bp, Homo Sapiens
ctaaaacgcgctcttcgttctacttggaggacttgttccagccagcgtgagtgcgcgagtgtaaggagagacgggaaggatcggctccatccagccctgaggatcccaaagaaagggtggaaacaccctggatgtgctaagctgtggccaggtacactcaagtgttaattttttggagtcaaagcctccctcagtcagatcgaagaaactgaagcacttgtgactgacccagatcttcacggaggaaaggggattcgaacccggctgacccaggagcctgggctctatactcagtgcagcattctcacagacacccaagataacgttatcctcatggaaacgagctcgacgaagtgacctaccccagagcctcaaggctgtgatgatgaggagggcaccaagaagcttcgaaggctgtgccaatgtacacttccagcaatatcttcttaagcttgagtgcagctccttattttcccaaagcacagctaagactaagggctcggcaggtgtcttgatattatcatctgctgagggtggagctgagggtggaaggggagtgagctgacgctcggaaggtgtcttgagattatcatccgctgagggtggaagcggcccccgcagacgctcggcaggtgtcttgatattatcatctgctgagggtggagctgagggtggaaggggagtgagctgacgctcggaaggtgtcttgagattatcatccgctgagggtggaagcggcccccgcagacgctcggcaggtgtcttgatattatcatctgctgagggtggagctgagggtggaaggggagtgagctgacgctcggaaggtgtcttgagattatcatccgctgagggtggaagcggcccccgcagacgctcggcaggtgtcttgatattatcatctgctgagggtggagctgagggtggaaggggagtgagctgacgctcggaaggtgtcttgagattatcatccgctgagggtggaagcggcccccgcaga

SEQ ID NO: 161506 - DNA, 1000 bp, Homo Sapiens
ttagctgaggtccaaaggctgtgggtcctgcatgagcctgaagtggtgcacgtccctcaggtcatccccctgtctgttgacagagtagtctccgttcctgaatgtgctggtcaccagcaacagcagctgctcctcctccgggaagctcagcctatacttactggcctgtgccctgtcctcagggtcacatccgtctcccagaagccgtgcaaccctggaaaacccaggtctaacagtcaggttcctcctccgtgcattaacaatggcgttgacgcctgctttgcggcacgagggtaggtgtcttcccggacagccccaccaggacagggtgtggaagaacgaggtgcccgtggcggggaagctgaccaaatgggccgcgggaaccgggctggtgggcctggaggggcctgcctgtcccccttgcagagggtcttcccgccacgtgaagccggcacaggcctggatgccgacgacccttgctcgggtttggcgttcccacttctggctgaactcttggctctggctctgggcccggggtcccgcctgtgccctctccctgaatgctctgtgggtcagggacacggattcccttgtctccctggctccaggcttcttgtcctggcaacaaatgggtctgggctcgtctagtaacttggagggccctgggggtggcaggtccccctgctttcttgttagtttcttcatagaggccctaagatgcttgagcacagtgtcctcatccctggcccaggtatcaacgaaccggttgcaaaaacgtgcccacgggccacacctggacgtcttcgtgaggcgcttctgctgaaccttaaaggcgattcttgttatcggcatcaacgcctgttcgccttctaccagatacacgtcccacaggcgcagggtgagcccgagagagatcccgtcaatcaatatccggatgaggcagcctaacggggaacactgcccacatagatctttcttgtcctgatgccccatggtcttg

SEQ ID NO: 161507 - DNA, 822 bp, Homo Sapiens
ttatgtctgtagctgcaggaaaccatcctcagactccctcctggggaccaagacagccaccgacggagctctgcccagggctgtggacaggcaccaagcttttctcttggttagctcccccacgtcacagtgcctgaaccagtgaccccagcttcccttgtttagaggagccaaactcctcaggtgcttggtgaggtcccagctgtggatgatcctggccagaatcactgaggcatcatcttggtggcagatgtcacagtaatagaggccagagaaggcacagagcttgggtcgtacaaagaagccgatctgctggaagcagcattggaaacttgaaatcctagaaatgcttccaaaattatgccggctgatttcattttcaaatgctgcacacagaggggctctcatctgtaaggaacggagcaccctcttcaactcctcatcatccttctctgttagtggtgtgagcactgtcatggcatcctctgttgactggcactgtggacagacatactcatcaatgagctctgcctcactttgcaagatgccaatgcagcacccatggtaccaattctgacaccgatcacggccaataaaaaattgtgactcatcataaggtgttctgcagatacagtacaattcctcactgctgccctcttgtgcctgtttacaatcattacagatgtacacatccattttcttagcctccttttctgcgatgccaacacattctccataataccagttagtacaaagatcacagccaatatagaacctagaggaatggaagtcgtcctcaagcttcaaattgacctgcttcat

SEQ ID NO: 161508 - DNA, 1000 bp, Homo Sapiens
gctgcttatgtctcagattttatttcttttgattaatcatcctagaataacttaataataaatagcggtttaaattaaagacactacagtcacatatttctgtataactaaaagcaacaggaaacacatttttaaatgccattttgtatattctgtactgaaacacttctggtaaggactggccataaaaagaagtggtaatcttcacatttatgaagttcaagttatatatgtacttaaaatttgcttattagtaaaatgtttggtcttaaactatacttcatttccagcaagcagaagccataatttgttaatgggaacctcagtattttacaaagggtttaacaaaaaccatttattcatatttctgaaaattaggaattttttaaatgattgaagtctttttttttttttttgactggccaatttcatttcaatgacctgggttggatgttgttttattcaagatagtagtttattctgacaagaccatacgaagaaagaaaagaaagaaagaaaatcatttatcccatgtgaaagcttttaaaaccactttgccagttcgtgtcactattttaatattggaatgtgaaccaaagagtctttctacatatcttttgtattgctactgaatacagccagatttatatatggaagagtgcttggttgttttttgttttggctttaaaaacaagcaaaaaggaaaacttaaaacaaaagcgatgttggtagtgctcttcacatacacattccctttaaaatgtagttttgaaagtggagtagaggggttagctcctctacctccttgtgtctccgttgggcccaccccatccctctccagccaacacagtggctgttgttgtaagaaagtgtgtcataccggctccatttgcacgtgaactctgtgctcattttttgcaagatccatttccagaaagtcttcaggtatgtcctgtaaagtcttcccacgatggctcactacctttgtttcacctgagtg

SEQ ID NO: 161509 - DNA, 1000 bp, Homo Sapiens
ttcgttttaaagtagtattttatttctctgggctgtgcacacttaaggcattagatccacagatgggctcatccgctgggatgctacttgtggtgatcatctcctaagccccacgttttagccttgtacagagtgatgtcactgcagaccctgaagtgattcagcctgcggtcatggcgttctgggttgatattgctgctgtgtttcctcgtatttcctgaggaaggagccacgcttaccaagggctctaagtcccatccaacttcctggttttcagtctgtgtctctgggtacttcttccttggtccctgggcagcatggtgaatgagattcagaaacctggcatctgcaggttcctccaggttatcatgccaagacatgggcttcctggtgactgtatgaatcttgcggaggggattcacgtgatactgcgtgtagagtttctgggttcgtagctccttgaggtacagttcccgcaagatctggttctgatggacctcatctggaatcaccttctcttttgggtgtcccgccatggccttgggctgccacgcgccctcttgcctgggccttccacagtctccaggcaacgcgtccccgctgtctccaggcaacggcgtcccgtggtctccaggcaacagcgctcgggtagtgcaaggctgaaggtgggtttgctgttgtcttgcattccgtgtgtccaccaggccaagctgctgggaatccacagtcctggcaattctgaactgccccagaactgtcccagcatgagggaaaccatctctccaggatgagagctgtgaattgtcatggttggttgggggtggctcgattgggagtgggagctgtctggcggggggccggggccccaaaggggagggcagcgggggctgctgggcacagtaggccgcggcctgcgctctgccgagccttcccctgccgcagcctccccagcggagccgcagcccgagaaaagcgacacagtcggttttgcagaccaggt

SEQ ID NO: 161510 - DNA, 1000 bp, Homo Sapiens
cgtctcaggaaactttttaatgaaagtgtcggccacggtggtgtgtaggtggctgagctcagattgcagctgctaagacaccagccacttaccaagagaaagccaggctgcttcaaacccagggcccgcggcaaaaaagcatcacttccggccggggagtctggaagccacgccttgtgggaggtcacactggcatctaggccttcgcctgcactgcagaaggagagccgggtcccctcctggagaacgctgcgttccccagccccacaccggctttgccaccacacaggctgttgaggcaggaggcgggtaagacgtagctgtagacccaaagcaaccaccagccctgggaccctgtgggagaggagcacttttagaacatggaaaagtgtggtcatcccatcattagacagcacacatcctacataaataaaaagtcgtatggggaaggaggttggggagggaataaaaaattggcacagacattgatagactggtttccagtttcaaggtaacagatgcacatcatgagaccagaggaggcagagacaagggctggatttggcttttctaagcaacatgtgttcctgtgcagggctgaatggtcgctgagacagagatggaagccaggacaagggagcccaccgggcccagataggtacagagagcagaggctcctgttctgtcctcgccacccacgagggtgacactgcttgtaaatggtggctgtgctctcccagcaagtaaaaagcacaactaaatccacactgcacacagacgcagacagaaagccttcaagtagctctgttttctgctccctgccttgccaggtccacaagcagagaggagtgtcaggcacatggccccactgtcaggctccccagtgagctgtgggttcagcaggagctgcccactgacacacaggggacacccactcctgccaccttgggagcggttgccagacagagccgcactgggtgctggtgtcatccagggaccc

SEQ ID NO: 161511 - DNA, 1000 bp, Homo Sapiens
aatgttcatttactcagcaaatatttattgaatgtctgctcttttcaacgactgttctgggtgctgggcaggcagtagttaaaataaaaagataaatttattgctattgtggaaattacattttggagtaattacattttagtgaggagacagacaataaaccaacagatgaataaacaaatgcatgtgtatggggggcgaattatggctaaatatcataaagaaaaggagaaggtgagagagaaagtcaggatagacctcttgagggggtgatatttgaatacagagataatttaagaaaatgagaaagcaagtcttctgggtatctgggaagagtggtttaagcaattgcaaagacttggggagatagccagatgtgtgtgttcaaagaacatcaagtgggccaaagtgacggggatgagaaaggaaggcaagagtggtagggaggaggtgagtcagaggggcagcatggggaccaagagtctgtagggccttgagggactctgtgaagtctttagatttaattctcagtgcaacaggaagcaatgggagagttttgagctagggaatgctcaaactaactctgtgaaagatggctcagagtactggtagagtacgtactgtagtagagggatgagggaggcaggatggctgtcaggtggctggtatagcagtccagaggagacattggagacctccacagagctgttgcagaggaagtggagagaagtagcaataatttgggtatgttttgaaagtagaattatagggattttctgatggattaaaagtggggtatgaaagaaagaggatttttgtggagatggtgatgttgtacattgagatggagagcattaggaaaagagggtgttgaagtgaaaatcaagaattcggttttggatacagtaagtttgaggtgcatactagatatttaagtaaagatattgagcagacactggttacatgaattacaattaaaaggagaggttgagcctgacat

SEQ ID NO: 161512 - DNA, 1000 bp, Homo Sapiens
atatttctataacatttattttagtgaacttatgtttctttgtattaaattattagattatatctttagataatattgttactaaattagtaggtaatacatatatttattcaaaaataaattgtgcatctaatgtctaccaattaatgtacttgtctatgtatcttatcttaacttgagcctctgctgcccctaatgaggcgtgaagaactcttctcccctggagaagtttttctttttcaggagggaggagggctttcccaggtaatgtctctagagcgttgggcagaagaatctgggaccacaccacaccagttctctccttaatccacgtcatttgccttctatcccagctatgtttccagtgtcctctgggtgtttccaagagcaacaagaaacgaataaatctctggtgagttgcttacttgttcttcactttgttttacactgtattttctgagtttatgggtgtttggtttagaaacccactgggaaatagaccagtgagatttgaaaaggtggaacaaggacttgagtagaaggtgtcttcttatgctggaacatcctgtgttttgctcgggcccactgggttcgttccgtccactcggctcatgctagtggtgtggatcccacacctgccaagggtgagctgggtacagagcagtgaagggtgtgtgagcaagcaagcatgggatctggccactgcacacagccaagcatgccagctgcagtgaggtgggcagctccaggtacaggcacaggtgccagctccctgtgaggctgcagctggaccagaccgactgcaaacagcttccactgtgtgtatcagggaatgcagtggcgcccagaaacttggagatgcaggaactgcagagccccaaagaaggcatcacagccctggcttggggagctcctaggtctgggctccctgaagggccacagctcttgtctccttctctcttctcttcttcttgcctgcaatttggcaagcaaggggggc

SEQ ID NO: 161513 - DNA, 721 bp, Homo Sapiens
agctttcgttaagcgtcggatgtgtagagtgctgagttaggggctggactagagacgttgggacatctcccgggaacagcagcctggaggggaaaaatctcctgacctaagtggtcattcggccttggcgcttggacacgggagtgcggcgacagccatatgtccatccatcttggcacttttccgtcctctgcctttgaagatgggtgtgcccggcaggctgtgaaagataaacattagagggttgtttagaagacttttttgacctgagcccatgaggtgcataccctttgtttggcggagaaaccagtggcttctgaagatcagggacgggccacaagtgcgaggcattgcagacatttcgaacccagacttccagcctggagacatccacacgcttccagtttcttgcactgtaaatcctgctgctgctcactctttgggtctgcactgcctttatgagctgtaacactcaccggaaggtctgcagcttcactcctgaagccagcgagaccatgaacccaccgggagaagagaacagtgctgtctttatgagctgtaacactgtaacactcactgcaaaggtcgaaggtctgcggcttcactcctgaagtcagcgagaacatgaacccaccagaaggaagaaactccggatacacctgaacatcagaaagaataaactccggacacaccatctttaaaaactgtaacactcaccgcg

SEQ ID NO: 161514 - DNA, 1000 bp, Homo Sapiens
cggggtacaaaaggtttattgcttataaaaataagttaccaaaccccaagccccacaaaacacaagaaccccgcatgacgatacccatgaacacaagggctcattctagtaatagctcgcggaaacgacaagacaccagcactgccgacacacacggacgaggagcatgctgcacagcttccttctatcaggttctagaaaagtcttctttgccttcagtccactggctagtgggaataattagtctcatcagccacagggggggtctgctcctcaagagtggcctcagcacacatggcgctgaaagggaggagcggctgtacacatctgggcagtgaggaaccagctgagccttctgtgggcttcctgagtgtctgggaagttgccgggtggggtctcacgctggggccagcgtgggggcttactgccggcaggtgtcatggaaggcttcgagggttcggaaatccctccatgtcgggggaaggccgtcctgcagaaacttcccgcagtgctggcatggggcctggaacagctttatgtaacttcttaaccaggtcatgaaggatcggactacgacatccggcatctggggcagctgatagtggagcagggccgtggtggcgtggtctgtcaccttctggaatacttgatagttggatttggaccatatatcaagcagaagcattgctgatgttccattgggtctggataagtggatggacatttcaggaaacatcctgtcaatgcggctgatcacatcatcaacatattgaggtggtaggacaagagttgtgggctgagcctttggtctacttttggcagatactcccatctgattagcggaacgcttcaacgactactgatttaaaaggccagatgctagtcctgcatggtactgcaacttgtttgaccacttatatgcttgaaggagttgactatagagaggagttttgtcctgcacaggatccaggcttaacagcccactgttatgaagaggatg

SEQ ID NO: 161515 - DNA, 804 bp, Homo Sapiens
atctataggtttttattagaaaagaaattaagtgtcgtcactagagactgcaaaaggaaattaacaatcttacaattctagaacaggcaaacttcatgataagggattcttaagttttcaaagtgtgggggctccttcacagatacacagttggtatagtgggctgtaagttttctcagatgttttacatttcatgctttaatctttgctggtagtctaaatcaaataaatacatcgtgttcaggattatctggatagccatcttaaatagcagagtgttccgcatgaccacagcctctgcgcttgtgcctctgatccgtgtgacaccaagaccaaccatgcttttcatatgatttctccaattgggtcctgcgacctttcacagaatttttgaacatttcctacgagatctgtggttactgcagagctccaatctgctttagccgcgtcagcagttccccaatctgttgcatagagactagatcactgcatccgcctatacaatctttaccgataaagactcgaggcaccattctcgctcctgtgagctgttgcaagtaatcttgaatcttgttagtgtggttggaggctgtgatatcgacaaattccagaagcctttgtttggtggacaattgactgaggatctcttgggccctcctgcagtatggacaggtgggcttgatgaacacaaccagcttcccaggctggattttgcagttcacgaactcttgagccatgcagatgggctgcgatctccccgggaagaatcctcagttgcaggtactgcttggggtattgagccac

SEQ ID NO: 161516 - DNA, 1000 bp, Homo Sapiens
cgagcctataaaaagagctaatggtcttgcttctcttaactgtggcctcctacactgtgttttggatgattggtgatgtcttggatattctgtttctttggaactttgaatatacaacactttactagggaagtagcaatggaagcagagcaaagatgtacagaggaaacaatgcataactctgatggaattgaagtcatgaggcagcagaaagcttaaattgcagctttaaaaatttttattttttagagggaatttaattgggagtaacagcagtaatagttaacggagccagaatgcttgagtcatataattgcaaagcagagttgggagcaacagatgctaaagagtagttgctgtagttcctctttgggtcgtaggagcagttgtcatattaccatatagctactgaatgaagaagagttcttagtgaggcctgggtgaacagctcttcttagtattctgtgtgaccccatttgaccttttaacaaatctctaagtaaataaatagcccctaaggtaaactaagtttttctctgctatttttttgcttgagagagctataactgtaatagacttatatttctgaacattttagtgcttgccaatatttggtaatatttatgtttcctatatttgtaatgaacattcttcttccagtacattttttgttaaattattgtttcatgcataaaagttcaccttttattgtataaaattgactcagattaatttatacacattgacaatgggtaaatagaatttttcagattattaaaagctgaaggatgcccatgtaagcaaaaaaaaaaacaaaaaaaaacccaacaaaaataaacccaaaccgctcaaacaatttcgaacacaaaacattcttctcatgccggcatccctgcttgcagctgggaagggggcaggaatcagcgaggtgacctgggctgagtcccgggagtgggaagaggtggcaggaaagggatctgaggaggagaacaggggtcct

SEQ ID NO: 161517 - DNA, 744 bp, Homo Sapiens
ttaggttaattcaactaagaggagataaaaatcttcaacatgagactggaaaaaagggtatgggatcatcaccggacctttggcttttacagctcgagcagagttgaactccctcattttccgttccccagcattggcaggttctgggactggtggctgtggtggctcgttggtctttgtctcaatgaagaacaccaaattaacacgacccccgtgctgccctgaggaagttgaagctcctcgctgcttctggcacttcagcgggaagttggttggggcgggatcgcgcgccctctggtggcgccatggttcagcacagacgctcttgctcacagtttctcggcggatgtgcgccccctcctggctgtcctgaaatacctttcctcgggcagcctcggggaccatgaagccacagcttccccagtcgttcctgaggagccagatgcgcttcatggcaaacgcgagcagatgaaggtcatgtaggagacgaaagaactcgctccccaagcccataggcctttgtcctccacccatggaccgaagcatcttgttagatgagggccgcccgcagccagggccggcggagaaccggctcaacgggacagacatgggacaagtgtgcctgatcatggtggcgttgccaagaagcagctgtcgcactgccatgggttctacgtgtttcttgggcagaggacgcatgggaccagaatgggcaccaggaatggtggtgaacaaaggccccat

SEQ ID NO: 161518 - DNA, 710 bp, Homo Sapiens
agagggaggagatggcccaaggagatgataaaggaaaaggaggtgcagagctaaggaaagccccaaggagctgagagaggaaaagagacagcagagagacttccacggagatggggaggccttaagtagggcagcagcacatgtgggagagaaaccgagagggtggtgttaaagaaacgtaaaaggagccccactcacttccagtacagaaattcacccacagcagaggccaggcctcaattagaggcctacacaatggggtagacgctctcacagtccacgtccatcagcaccccttccatgttcttaaggataagtatcagtaatctgacggcctccactgccacactgtactctctgtccacgatcatggaaaccatccagtccttgaagcggccagtgaagagctccaggcgtgcggtcaggtcccggttaccgtacagccctttcagagccttcacgcacttcacgcggacttctcggtgctgcatgtcacttttggcagctttcgcagcattgaaaagatcattggctggtggctctgactgtttccggctatgacgatgtaccgcttgggaccctttctttggatattttgccaccggcgttgttttcagtggtcgttttgctgctttcttcttcacaccgcgattgaagctgtcctgcaagtggccagtgccaagtgctgggccgccgctcctgccgtgcat

SEQ ID NO: 161519 - DNA, 1000 bp, Homo Sapiens
ttatttcaaattatttttattcagggattgcttaagcttccaaatagcaaaaactgacccttacatatgtcaatgttaaaacaagtggatttcaaatattttgaaaataacattggttgctctacattgtttttcacttcgatgtttgtcttgtgtgaaaacagtcttgctaccattgacatattctcattatagacagcatatggagagcagtgttgccatagacatcggtaatatttggatcagcaccaaggtctagcagaatagtttcacatcttcttggcacattatagccttcgttagaggtgtcttgttttcactgtcacagatgttaagctggcattttctgtgcaccagaaaagttaccacttctgggcagccattggcacaggccaaatgtggaaccatccaccaaattgtctttttgaaaagtcatcagcaacttaactttaagcagaagtgtaaatatcactgctcctcatcttcacaaacttaggacagaaaacggcattttattccttttttaaattaaagtccttctcttatcggacacattaagtatttttttcctatgtgcataggtgacttgcagagctggaaaaagtactttgcccagttttagaggtattttcatgttgatttggaagaattctctgttcttgtagatttcagactggtcttttctcttcagcgggagcctcagctgcagctcccacgcgttcccctggacgcagctttgtgtatcatcccgacatcctcatctggagtctggtaccaggggtcagagaagatgcagttactactccaggagctcaggcgcacctggcccttctggctctccacagccaagatcatcttcatggcccagctattggcttcagagacgccacaactcgccctcgcccttcccccagcccagcccccacccggcccccatccggcccagcaccagaaagcaaggcagtctggcccagacctcagacagggaccctccaacttc

SEQ ID NO: 161520 - DNA, 1000 bp, Homo Sapiens
cctcgagggccgcctcctcggccaccttcttagtttctgggtatccaggtgggaaccagcagggagctgtggctcgcaacatcttgctgccttcgggagcaccggcctggctctgctcctctcccaactggcggcttcaatgagtgctgcggccgccacgcgtcgcctttatatacgcacagggcagactgggtgggacttctccttgataggttggtgcttcagtccaatcaccctgagcctcatcttccaccagactccagcttgggaatgcctcagggggtgcgctaatggaatcaactggagctcccggttgctaaacttggagctaggttgcttttcctgagttaagtaactgtccctgcagggcagtcctataatggctactggaattgggctacctaggattaaattaaggttcagggaggttggtcaacttgcttgggcccacacagcacccaatggagccaggactgggccagcagtctgctgcatgctggagggcaggatctctctggggttgcctttccttgctctgtgcactcctccgctgcggacaaattgaggacaggaagtggaccgcacccacttctctcccaggagttgggcaatgttcaacacagggggtcttccaaaggttcatagaaaatgcacatggtgaagaaactatgcatggatttccactggtttgcactaaaataaacttgtcctaacttcttataaactttctgaactagatctagtttgaggcactaagaaggatgagacatccactgaaaaggactcccgtcagagcaatatgaattccacgaaaattgcagcaagaggaaacatcaaatttatggtgaagcttgggtggaagaatgaagaaatcattgatgtattaagaaaagcttataaggacactaccccaaggaaatgaactctttacgaatgtatagcttgtttcaagaagaggtgagaagatgtggaagatgaatcctgcagtggctgtgaaaac

SEQ ID NO: 161521 - DNA, 1000 bp, Homo Sapiens
tttttaaactttttttatttaaataaggagaattctttcatatggaaagagctagtacaatcacatatttgaaaggagaaacaataggtactgaaccggagggaaagggcgagggtgagtgtgccagcaccggcctggtgaatccacgattcgatttcccatccaaggtaagtttcccaaaataccgtataaacaagctgcacattacacctctagccatcgtctgccctttcaaatatctggtctacatggaaagacaaagaggaaaggccaaaacataaacaaaaggaaacaaaaacaaaacacaaccctctcaggaaccaaacaaaacccccaaatccttttttactacacaaggcatgaggtcaaaagcttgagtacagtgtcccctttagatcacgggagaaaggcgtccacacagagccttagcaggaatttccactctgaggcttcagaacatgctgaagatggggctctgagggtgccactaccatcctggaggccaccaagtggggtggaaacagtgaagagcaggtctcacatgcccgaagaccaccagccaactacacattggtggccctggtggagcatggctgggcgacagcgtccatccccaacactgagccactcctgtcctggatgacttcctgcttaggtccgtcacatttcagaagagagctggctttctggaagcctacgtttcccattcatcacagaacacgacagagtgcacacatcctggtatccttggtcttcaaaggccatttccagcagaccctctaacccaggcttgttctgcaggaagtgaaaagggacaaatgaagatttgaggggcagcctgcagctacttggcacaggggaaccaaatggcaagggagaaggctccaccagagctgccatgctgccgtagcaggccagaccacagcatggctgtgcacctgtgtgtgctcagcttccagaagctgtcactgaccatcgcgaaggcagatccagaagatag

SEQ ID NO: 161522 - DNA, 525 bp, Homo Sapiens
tcagctgagcagccacagcagcattagggccaggttgagcaggagaggccaggctgcccagggcccagccccactcagagctgcagcatagaaccttgccacctcctcattggggttgccctgggccaggtcgaaccacatctggatgcagcggctgctccctcggttgtagttgctgaccctgtaggagtgagtccagatttcactgcacagagcagtgggtgtgagaaagtagagatggaaaggtagtcaggcagctgccacctggcacttgttagaccctgaggtccagttccagcccttgtgcccattgctcttgcaggtgtaggaggtgcgacaatcttcccaccattgctcacagtcctctttgcacaggggcacattcagcacccactctttgcgccagctctgatccacctgctggatccagggccccaagttggggggtcactcgtaaaggcaggtgtcctggataaagtgccgtttgcaggcaggtaccatctctgaggcaggcccctgggccat

SEQ ID NO: 161523 - DNA, 813 bp, Homo Sapiens
tcactggctcttgctgtagtttgtactgccctgacctccacctccaccaccacctccgctgcctcggttccctcggttgtggtttccacggtccccagaaccataccgctgctgccaataaacttctttgggctaggccaccgtgatctcacgcttacttccactgatagtatggaactttttctccagaactttcttcacaggttcttttttaaaggtgataaacacaaaaccttgtcttttgttcaactttggatccactggaatttcaatggcctcgatctccccaaactcgccaaagtactccctgatcttttcctcagtggcttcaggattcagaccctcggcgaagattttcttcaccgggtccttcttcatagccatggcctttttagggtcaatgacacggacatccagcctgtactccttctggtctaggaccttctccacattggttgcatctttgaacaggataaacccaaaccctcttgcccgtccaatgttgggatccatttttattgtacagtcaatgacctctccaaatttagggaaatagtcttttaaatcttttttgctggtatcccagctcaggccaccaacgagcatttttgctgcgtcctcctcgttcttgctggcgttgatctgttcgtcctcggcgatttttgattttgattcccgctcgagggcgctgcggtcgctccgacgactcgccctcggggcggcctgggttctcgttggcgccaggcgtctaaaacattttcttctcagtttaggagatttaggcacaaatgaactggcttccccaaaccacat

SEQ ID NO: 161524 - DNA, 1000 bp, Homo Sapiens
ctagagggcgtgtctgcggaaagactcgctgcgctggcccaggctccacgaggggccgacagggggcgctctgcacagggaccggagggagcgggagccgaacttgcgtgagaggcgcggggccacccgtgcaggtgtaggtggagccactctgccaacccctgggcactgggcagggctggagggaggattgccttggtcatctccagaaggagctgaagtgaagaagccggcagccagcagtccctccatggggccaaaggctcttgcagctccaccccggttgccagtgccctgctcaggcagaacacttggtgtggaatcctgtgtgtttttctgctccaaagcgcacctgaagtgaggtgggtgaagaagcacctggctcagtgagtccccatctctgaccctcaccaggtcctcttcgtggtcacgagcctgggacttaatgacatcttcattggcagacttgcattccacagactcagacacatagaccacagaaccatcctcctggaccctcacgactttgacaggaactgaaacaggctttccagtgagaatggcagtgttcaaaacctcagtgtcctctataagtgctcccactggtttattatccctataatgcccctcctccacagcccaaagtgcaccattctttttaggttctacaaccttgtctctgaccctgttctcagatttggccccaatcctggtcatgcatagagcttcagctaagatcagaaaatgaagtccagtcacctccaggccagtaaaacagaaacacaggcagttttgtagatgccggggctctaccagcttaaggtggtcagttcccagcaaggctctttcagtccatctgcattttagaattttccagtccacaaggtacctggtgactctcatggcaagagggatgatgcccacaaaggttgtctggctgatgaagatctcagagacgaccagctcactcgtggagtcctcagtcagggactccccagcc

SEQ ID NO: 161525 - DNA, 651 bp, Homo Sapiens
tcagagactgtcctttgcaaaggaaatgaccagcatttcaactgtatgtcttcctggaagggtagattctgctatatcttctttgtctgcatcaaaagattgcctcctaacttgataagtagaccacaattggaccttgggattcttgtgcatcaaaaaatatattgtagccaaaatgtcttcaaaatcttctggttcaaagaacacatcagatgcaaggataatatcttgtggtggtagagccagaagatcccaagatatatgaccccatgttagtcctaccacctgcagatgtggcaggttattcatttggcagctttgccgacagacttccagacagtgaggcagttctgagctgtctgacagtattacttctgcaccacatttggcagccaaaattcctggaaggctcactccagctccaatctgcgggacgtggacctccaggacagccccgtcggcccccggacccggctcctccgagaatcgaaagcgctgggcccggaccccctgtcctcggaaatcgtgctcgcccagtagggcgtcgttgggccccgggcgggcgggggaccgcggaaggctccgggctgccagactgcgcgagcgggaagccgcgggccacgtggccgtagcacgtgaccttcccaacat

SEQ ID NO: 161526 - DNA, 1000 bp, Homo Sapiens
ctagttaaagcttttgccatatttttcacaggctttaccacatccttcacatttctaagatttttctccagtatgagttatcttatgtttagtaaggtttgaggattgattaaaagctttgccacatgggtgggatttccctccagcattaattatcttatgtgtagtaagggttgaggattagttaaaaggtttgctacatttttcacatttgtaaggcttctccacagtataaattatcttatgtgtagtaagggttgagtaccggttaaaagctttgccacattcttgacatttgtagagtttctctccagtatgaattatcttatgtgcagtaaggcatgagtaccagttaaaagctttctcacattctttacatttgtagggtttccttccagtatgatttctcttatgtgcagtaaggtgtgaggactggttaagagctttctcacattcacattcttcacatttgtagggtgtctctccagtatgaattttcttatgtttagtaaggtttgaggaccagttataagctttgccacattcttcacatttgtagggtttctctccagtatgaactctcttatgtctagtaagagttgaggactggttaaaagcttttccacattcttcacatttgtagggtttctctccagtatgagttatcttatgattagtaaggtttgaggatttttaaaaagctttgccacattcttcacatttgtagggtttctctccagtatgaattatcttatgtctagtaatttgtgaggaacagttaaaagctttgccactttcttcatgtttgtagggtctctctccagtatgaatcatcttatgtgtagtaaggtatgagaattggtagaaatctttgccacattctaaacatttgtagggtttctctccattatgaattctcttatgtttagtaagggttgagaatacattaaaggctttgccacattcttcacacttgtagggtctctctccagtatgaatt

SEQ ID NO: 161527 - DNA, 840 bp, Homo Sapiens
ctagcgcatgctacccttggcagctgtgtggtctggagacacattccggctgtaccaggcctccaccaggaaagctcccatgataaccacaattacggcagccagacccagtcgtacgaagttacccagggagtagttgctcgatgtggtacctgggggaactgtcaccaatatctcaagctgatcactgggttctgaggcccagaagggagactttgtctggtagtacatgcagctgtagttcccagcatcgccggctgtcacgtccaccagagagaagtctatctccttccccgctggactctgcagctggatgggtgatggcgtccctgccttcagtagagcgaacatgataggcacaaacaattggtctcgcttctggcactgcagagtcacccttccacctgcggtcactgtacccctttggtaggttcggaggaaaggtttagataaatgtcctgtcaccaacagtagaaggacgtcactgcgctgtgaaaggatgtggggggatgcttttctgtagtattcacaggtgtactctccagcatttctgacttttagattattgaggtgaaattcggccgcgccctctgtagaatcaaggggcttcggggactccagaataattcctcccttcctgagaacaaagctcacacctctggcaggagtccaacatcgcagcgtcacattgctgttggcagggaccaccgagctgggccaggcactgagggacggcttgggcagtgaccgctcaggagttctcattctccccacactggactgtggcttctgctcgacttccagctcctccatcctttcccagcgattctccttgaccat

SEQ ID NO: 161528 - DNA, 594 bp, Homo Sapiens
tcactgaatccccataggtctcagtccaatgtgtcaactctggtttcgattacactcgtagggcttctcaccagtatgagtcctctggtgccagatgaggcccgcgatgttcatgtgaattctcagatggacaataaggttggagacatcagaaaaggatttttcacattcattacattcgaatagtttttccacagtatgacttctgaaatgcaaaacaagggaagagtggcagctgaaggtcttcccataccaattcctttcacagggcttctttcctatgtgggttttctcatgcttggtaaaggtggagccagcactgaaggctttcccacttcttgcatttataggatttctctcccgagaggccgcgagaggacggaactcacttcccgccgccgtagcgtcctcgtcagctcgccctccgactctccgcatgggcgcgcagagttcccggatgcgatattccggtgacaccggacgaggggtgtggaacgcgccaatggacgctgacaccttcatgcggtcgtttaacgctccgtgcacaataaccattttactcagttgtgtgatgctccatcgaaaataacccat

SEQ ID NO: 161529 - DNA, 1000 bp, Homo Sapiens
tcaggatggacacaaagcttctgtcgactcctgaacagggaccgaggagtccctggaattggtgtggggagcctcagcatggttgggaatctgggccagtgtgggagcagtggaacgagtcaggaagggccgtgtgcgggtggatgggccgggggaggagaccccccccccaaccatctggggctgttgttgcttttcttcgctgttgtgtcctccctggcagatgtggtctccagggttctcctctgcttcattcaggctgcatccccggggcctggcccgcagccggcgcttaaggactggatgaacgtgggaccccaggcggcctggaaggaactgtggggagggcactgccctgcccagcagtgggatgtgctctctccaccaaaggctaagccaccaacagaaacttaagccttccatcgtcgcatccagaccaggacaaggctctgcactcagcaagtggtagaccacttggtagacccgtggaggaagccctcttctttcacatcccttctgatgtggcatcatcagggtgtcctgactcttagaagcagcggccacatctgtcagcagaagtgtagggaacaccagcagtgaaacaaacatgcgaggggctcgcctggagagtgggaccacgggacgggctttggcgtttggttgtaacccatctccatggtaaaccatgactttaaaggcgttttccagttcctcatcacagccactgacgctatggcctttttctgggttagcagacactgggatgactaggaggctcatcatcagcagctgggccccacctccacctctcatctgtgacccattgctcaccacgtgctccagcatctccccacacagaccaacgccccgttccttttgcaaaacgatgggcgaaaaggacaaggaggcaggttccagggcatgggacggtggctggagccatgggaagaagagctgggcagggagtgaggtatctccggtgagcacagcacagatgggg

SEQ ID NO: 161530 - DNA, 1000 bp, Homo Sapiens
ttacagccttggctgcttgtcatggggtacagcctctctaggggctgagttggacttgcatgctgctcacatccaaattcccatgaagatgaattggctgcacagcacccaggccacatacatgagaaagaagtcacggtcaacagtctcagcccagcttctctttgaccactttattcttctgggtgccccaggaaggtgcctcaacctccatccactttcaggattagaccctggatcctcataatcttgcttttcctctctcaggactagtctggggctgctcatagccccaaagttgccccaggccagcagcccagccagcagcacaatctctgtggcactgaggaagagcagcagcagcaggacgctgatgtagtaaactggaggtgggagggcaggtgggatggttaggggccaggtcctgtgccttgaggagcgggttgcaggagatgctgggcagggcctgcaccagggaggagcgtaagagaggtagcccagcagcagtgtcatcttggaaacaatgcgcttgatggcctggaggggcagcagcccccctacacatgacggccaatataagtgcccctcaggcgccaatagagctatgatggactttagcgctgtgttattcaggctcaatggcacctggaagcagggcaccagctgaactacatactccctcttgacactcacgatctcattcaccacgtgggcctggaactccagctccatcgtaaaagggtctgacatctgacataatggttgctggcctatgaggtcctgcttgggtgtggcactatttcccctgagcacctgtgggaagtcatacctgatctctgcttctacagtgatactagagagattgaaaaggaagaacagattgctgcacataaaagagccagactccggctgctgccagagtgctggccgcacagtgacaaagcgcgtcacaccttccagatttggaagttcataaatagatccacaatgttgatacttc

SEQ ID NO: 161531 - DNA, 897 bp, Homo Sapiens
ttactgaatccaggaactgaagacagaatttgagggcattgaaaaatgctcccttttgatttccaagtgttcgctgcttattctggcattaatcttgattgtgaccacgatgtttctcttagtcatctttcctggtacaccactgattgtgcatccccccaactgcccgtaatctacccagaattgaaggctgatccttccagttcctaagaagacaaacttgacgcacacggaattctcatttaggcttgtttcccacttctgccttccagtaatgtctgccagccctacacttctggggtgaatacggttaacatgtgtcagccatttcaagtttgactggatagacttgtgcactacttctctcacagtgtgaattgtcttatgactagtaaggtctgagaagcacttaaaggttttgccacattctttgtatttgtaaggtctctcttccatacgaattctcttgtggttaataagggttgaggagcgggtaaaggctttgccacattcttcatggatgtggggtttctctccagtatgaactattttatgtttactaaggacaaagaactacataatagctctataggctttgttacattcttcacatttgtaggatttctcagcagtatgaattctcttataattagtaaggtctgagaagcacttaaaggatttgccacattcttcacatctgtagggtctgttcaaatttatgttcggcaaggtttgagaaatattgaaggctttgacacattcttcacatttgtaccatctctctgccgtaggaattctcttttttatagtaaaatctgagaacaacctacggtctttgccacattcttcacattttcagcacttgtctccaccaaaaccacgaaagccattcttcat

SEQ ID NO: 161532 - DNA, 428 bp, Homo Sapiens
ttccaagaaaaaccaattatatcatgattaggttaaaccttaaatagcagtggctgaaatacacaagggtgtgcttctctttctaaaaggacatctagaagtaggcattcggagctattcaggtagatccttgtttcccaaggactcaggattccttcttcctgcttcattagcctcaatgaatggcttgttctcagggtcacaggatggctgctggagctccagccatcatatccacattgaagcagttccctgctgaaagaattccaaaagctccgtttctctgggagaaggcacaggaagtgagaagcaaagaggagcagagactggtaaatattaaatacaaaggcaaatctaaacaggcattgatcccaaaacaatataatggtgactagtttggggttataaaaatgaggtatcactaacat

SEQ ID NO: 161533 - DNA, 1000 bp, Homo Sapiens
ttgaagcatcttttttttattcagatttttccagtcaagtaaattgtctcaaggcccctggcccaggtctgagtgtcactaccagaaggatccaccagatggcactccttcgctacttcctgtactcccaacttgccagagatgtcgcctctttccgctaaggcacaaaacttgcagagccaggtgttccccaggcgcttccccgcacgccaccgcccgcgccatccccccagcccccaccagcgtggtgagggtgtcctcggtccccaaggtctgcagtcttggccctctctgagtcgggttcatctctcgggcttccaggcttctttttgaggggcgctctccagcttcgggctccagttctgcccagtccgcacatcgacccccccggtcaccagggcgccaggggctgggcttcgccaggacaccctcagttataccagcacggctgcgcaacacttctttggagccttcgcggtgacgagcagccgggcgaagcggccctcctcctcacgacagcccgaggagggggtcagggtcattttcagacagccccctctggcttcctcttcacaccctgctctagatggaggagagaggtacgcccagcccggctcagctaaaagcagggagaagagcccggccgagacctggaagcctcggcttgggaggagctggtccgacggacccttcctgccccggtttgtccggactccggatctccgggtaggagccagaagaaagcgcattccagggatttcaagcgaactatacttaaaatcttggaggtgggaaatgtagggtgcgactgagcctctcccgccttcaggcctggcaactctgggtcggcgctcctggaacctcacatctcgggtgtgagcaacccctctgattctgcttctgtgggcgccctggaatcggctcccggtatccagcccgcttgcgctgttgtgcgcggctcctagggccgcccgcttccagcctgggttcggcaataaaa

SEQ ID NO: 161534 - DNA, 1000 bp, Homo Sapiens
gggtttgccttaccatttattgaaggcatactatgtactaggtacatacatgatcacatttgatgttcacaacagccctgacaagtgggcttcttacccctatttccaaaagagttcattgaagttctgagagcttaatccccgctttaggctacacagtagtagctggatttcctggcatcagaaccctcacctaggctgcctctgagcatggcttctgtgtcccagtctcaatttccatgaagtttcaggtcctcctgttcccccgcatttgtagtcactcttggtgactgggaacaaagggctagagcgtgagctgaaactgagacagggagtggcaggcaggcagtggggagagaaacttttctcacatccacccatgtgaagaagatggacaaaagggtggtctttctggagggaggcttccaagccactttcccaagactgctgatcttgggatgaatggcagggacctgattggggtaggggatgggtggtcacattgttttctgggctgtagactttatttcccttcctttgggaagagaagaggaagaggacagctcgggtgtgggtttgagccctggattaagactgcccgttgtccactaaaatctcttctttccttgctgcacgagggtagagagacacccagctggacactccatttcccagctgctcttgttgccaggtgtagacacaggggaatgtgaggcaagcatgtcctcaaagcctgatgacattgggtaaattctcctttgtgttctctctttcatgagctgggcagatgtgcctgagacaggtttgaccaggcaactgaaaagacatccctaagggaagacaaagcaaaggtatgaaaggaacacacgtccctgactgactaggaggaacagagctgcctgctgtctggaaccgcttcctcccagactaagtgagaaataaacttctgttttctatatgctactgtgttttggggcctttgtgttatagcagttttgct

SEQ ID NO: 161535 - DNA, 1000 bp, Homo Sapiens
gctttcattggcagtccatcgtgttaactttattggatgaatatgataaagccacgaattgttcacggcggggcgtgggggagaagactcaggctgttcattctccataaatacttttttgtttgtttgtttttgaggcggagtctctctctgtcgcccaggctgcagtgtagtggctcgatctcggctcactgcaacctccgcctcccgggttcaagtgattctcctgcctcagcctcccgatagctgggattacaggagcgcaccacgacgcccggctaatttttgtatttttagcggagacggggtttcgccatgttggctaggctggtttcgaactcctgacctcaagtgattcgcccgcctctgcctctcaaagtgctgagattacaggcgtgagccactgcgcccggcccggcccatagacacttttttaaacctctgttccacaatattgacaggttttattctcatatttatcctaaatttctagtattaccatatattaatactgtgcccacattactgtaatttttagaaagaaaacatcgtgtgcaaaatgacccttttagaatggtatagtccctctcccccaattttgtttttcttaaacattcaacaaacccaagaatctctcctgcctgacttagttttaacttagtttcaacaggcccacgaccaacgtagaaaaatcttgcagcgcccgggtttgggctcagccggagtcggcagaggcgcttgcacctcccaactgggtgaaaactggaacctttccgggttcacgagcccaagccccatctcttcccagagcgcgcgcgccctctggcgcctgaaccggcgactggacgcggtggaggcgtgggattcggaggccgggaccccaagctctgcgctggaggcgtcaggagccgcgaggtcatccggtctcaacctcaggcgcccctgtgcaggcctccctacactcctcaagctgcgctccctactcgtgccacatcccttg

SEQ ID NO: 161536 - DNA, 611 bp, Homo Sapiens
gttttattgagtggtggaggtggctttcagcaggatggatggggaggcagaggaaggggatgaagtggaaaggtgatcctcccctggattctggctgcccagtggctggactcctctctgactgcccccagctgaactcattttggcattcagatgttcctcctcttctccctttctctgccacatcgttctgccatccttctgctggtctgcgggcttgctggtctgcttctggagtctggggttcgggattcatatgggtgcaggatagggggtgtggcaggccaaaagataacttttggagcatgaacacagaaatgcctgttttcgttttcgtttaagacagcaggtatccaggcttgagggtgaggctttgccagggaactgcccttttctacccagtatttccgtctcctgtccatatcactttttgaaagtagtacaaaatgcatcttttcattaagtattggaaagaaagccatttggcaaatagctctttcagactagctcattgaaataaatttctcctttgattctgtgattaggaatgagaattaggtcacagttcccgtggcagggaggggggaaaatcacttcttggctttgccctg

SEQ ID NO: 161537 - DNA, 1000 bp, Homo Sapiens
taatcccaggaggcaaacgtgcagtgagctgagattgtgccacagcactttaatctgagcaatagagtgagactcaagataaggaagagtggatactggggagtctaggccaccataagtttcaggtacagccaatgcaaagccttggaaatccacctgacagctccggttgtaccgtccgccctccgtatctggggtttccaaattccgggattcaatcaactctctttccatcccagtccggaatccaaaggctccttcttgccatgttgtcctcgggcgttggctgcttcctcccatttgttactttggaagtgtcttctttcctcagtgtttcttctgcgtgggccttaccggtctttactgcactcacttacctaagaggcaaaacaatggctgccattcaagaaaatctcacttcagcccagaatcgaagaactggggcttattttgtcttctttctactcgcattcggctctgcatcgaatctgaccggccgcgcctactctcggaacggccgaggaggatgggtctcccgtctccacacgcgcggtgtctgcgccgactgcagccctcctggacgggagcctctgggcccagcttagggtggcgtccagcgtgacctactcgggaatggcagccttcagtgtcctgcggcctcgggttccgggaagctcggggacctgggcagcggatccagatgcttccacagctgtgtctccgtcgctccgcttcgggggccgagaaccagcaagaccaacgcgaggaggcgccacggtacctgccaccccgctcccaggaggcccggacgaggcttcgtcggcgagcggtcggggcctgcttctcgaggtgcctgcgagcgcagcgcgaaacccggggtcccctccaagttggggagcggagtgggggcggaggctcgagtcgcgggcgctcaggcccgctggcggcgcgctcggcctgtgcgccccgttcggtgcccgactcgggccggcgcccaggc

SEQ ID NO: 161538 - DNA, 1000 bp, Homo Sapiens
tgatgtgcccaggcctctggccgcctgagtccagccccccacacaaccccctccaagctcccagcccctacaccataaaccatgagctctgtgccctctctgatggttccacatctgccaccttgggcatggagcctgttgtaagagcccccaggctcagccatggagaccttgagcagtggcactgagtcccgtggctcacagggagcaaagtgagacaaccagcagcacaaggacagaaagaggaaagagcaagtctgcagctccagaagggaggggcagggagcctggctctgagactccaggcatgccccctgtgtggagctggggcagcggggcgggcagaccattcatgcagcaggcagtgagacttgtacctaccatggctgacgctcctcaggggccactgatagtgattctgaaagacagcatcaaatcacatggcaggtcccatgcatgggtggggcaggcctgggggtggcagacacacgcacatgccagattgtgcacacacatgctgtgaggccccacggcccgcatgcacactctaacagatgcccacaaacaacacgcatacgtcgccctctccgccacctcccggtgcccagcaccctcaccggccggcacgtgccgcatggatctggggcgtgcagccacacggcacactgaagcacatgcgtgggcagagtcacaacacagatgctcacccgcacacagaggcatttgcaccagctccctgcacactcgtgcctggcgtgctcagaggaccacccatgctgctcagggagacagggcttgctcactaatgtccggctgtcatttctccacctaagagccttccatggctccctactgcctacagcgttgaatcccaacaagtcatactttttggactttgaaggttctccaccctgtgccccaccctccccacagagctcttcctcattctgtctctgttccctgctttggccagtggctatccgcgatgtgacccacacta

SEQ ID NO: 161539 - DNA, 852 bp, Homo Sapiens
ctgtcttggttgtatattatcacaggactcttgtattaatccatttttgctatataaaatactgactttcccaaagatttcctttatcctctaggataaaactccaacgtctcagtcttcaaaatggcatacctcaaataaaagaactcattatttgttcagaaccaacagcaaccaaattaattttaatctcttaagtcaccttcgcatgtatcactgcagccgtttcaaaatcggcggaaagaggttaaaaagctcctccgttggagaaccgggtccgagcgcggccaccggcacctcctggtcgcccaaacccgagtcccgggccggaccgcccgcccgagcctcccgcccgcgccgggtccagccgccggggcccgggggagcctccgaggcggcaaccgcagcggcgctttcggcgtcgtgggcccggccgccctgggcgcctctgccgcgggctgtgacgccgacgcgcgcggcccgcctcgcctcagccgcggcagccccactcccgcgggcctgctggccgtccgggcgtagctccccgccggccggcgggcctcgcggccgcggcggaacgcctgacagctcggggtgctgctgcctctccggccatcttgtgccgtgtgtgtggtgtctctctcccgtctcctctctaggctttactccctcctcctctgtccgtaggcgtttctggttttcttgagaagccccgggccacgattggctggtgatggaacctttggggttggagctgagctgttgcttttttccccgcagtgcggacccctccaggctagctggagggttcctggtatggtctaggccaggctccagggctgtgaacgtcat

SEQ ID NO: 161540 - DNA, 760 bp, Homo Sapiens
caatgcacaccctgtctctttattaaagcactttcattcctggtggtatccttgctggctgaggctggagggtcctgtgatgaatccagaacactttgaaggcttcgggatgatgctgctcatgaccaggaggtccccacaaacggaagtggttaacgagtggcaaaagagtagttttgaggcatgttcttttcaccaggagttggcaggaggtatgccttgctgcaggtacggtttctgtccgagcaggagatggtggaagagaggggagagggctctctcccaggacaaagagcatctcccttgaagcctcactcaccaggtgtctgtgcctcaggtcttggtgaagaatgcgcgtttggatatctgagtcgcttggtcttgtgactgcttttttttgatgggcacagggttcaagtggcagcaagcagtgcacaaagcctcctccatgagttctgcactgatctgggacaggtattcctcagaacgagataacgaagccggacctcctctcaaggagggtgcagcttgagatggccagctgctcttcttctccccctcattccccatcggagtggacgccatccccctggcagatgggtggaaaccttgggctactcggcaaaaggagagacgtggaggcctaaggacctctggtataggtcgtgggggatggagaatgggagatggggaggaaggctggaaaagggggagccggctccgtgtcgctaccggacgctataaaacccttggagtctgc

SEQ ID NO: 161541 - DNA, 1000 bp, Homo Sapiens
agtagagacggggtttcaccgtgttagccaggatggtgtcgatctcctggcctcgtgatccgcctgtctcggcctcccaaagtgctgggattacaggcgtgagccaccgtgcctggcctgtggtgtttatttttctatgccaggcttatttcacctaagataatgccctccagttgcattcatgttgccacaaatgacaggattttgttctttattataacttaatagtattccattatatatgtatgtcacattttctttatccattcatctgttgatggacacttatgttgattccatatcttggctattgtgaatagtgctgtaataaacatgggggtgcaggtaaggctttgatatattgattttctttcctttggatatatattgaaaaccatatgattaaatcaataaacacaatgaaagcatttggcaaaattaaacgttcttacatgacaaaagcctctaaacaatttagtgtggaaaacatatgcctcaacacaaaagggcgtaaagacaaccctacagctaagatcatactgaacgtggaaaaggtgaaaaatgttaccatgaaaactggagcaagaaaaggaggcccactttcaccaatcatatttcacatagtgaaagtcttagccagggcaattaggttagagaaagaaataaagggcatctgaattggaaaggagacagtcaaattatccttgtttgcagacaatgtgatctcatacacggaagaaactaaggtctctacctaaaacttcttagagtgataaatgaatttaataaagctgcaggatataaaatcaacatacaaaaaacagtagcatttctatatgttgatagtaaactagcagaaaaaaaattaaggaagctatttcttttacaatagctacaaaaatgtacttagaaataaacttaaccgaggaagtaaatgatttctataacaaaaattacaaacatcaatgaaagaaattaaagaaaacacaaaaaaggaaag

SEQ ID NO: 161542 - DNA, 855 bp, Homo Sapiens
tgcttttaacaatgatgatttattaaaagaaacaacccctcttccctgcctcccatatcccctgtagtctccatccacaggcttgctgttttcatccatcttcctagtcaaggaactccagacagtcacatcttggaagataggaactccaggaagggatgacgatcttagggaaagatgatccttaagataactcttcatctagactgaacaacgtttcagaaagcagggagggcctggtgtttttacctgtccttaccctgcaacacactcatggccacacccattgctgacacagtggtctccggggttgcagtcccagtcacctgtgcagagctcgacgcaggtacctgattatgtctctgggtctttctggaacttttctcatctgtaaaaaggggcccctggattcagcaggggtaatgagttttattctccattgtcaacttcagtcaatagaggtggctgtctgatgctgtgttgagaagggtcagacaccttgtccaggttcaaagagaaagagtgctaggactgattagcagtatccaaaagccggtctcctgcagcctgaagctcttgtacctctaggctgaagatgatgaggatcacaggaggaggaaggctgccaacttcatgttgctgttggaaggctttggaaaaacacagcagggctgagagcagctgaaatttataccttccacccgctgagctggaatgcaaggccaggggtgggactagggactgcagacacctaagccctgcccagaaactgacatttctggagaatagccacccaccctgtgtaccctgggtccttcctcttccctctccaatggcaaggatgcagggagacat

SEQ ID NO: 161543 - DNA, 1000 bp, Homo Sapiens
tgccataacaaaatacttcagattgggtggtttaaacaacagaaacttgtcttttcacagttctgttttctggaagtcccagatcaaggtgctggtccgtgtgatttctggggagggctctccttggcttgccgatggcctccttctctggtgcaggcacggaggggagagcaggcgagccccttgcgtctcttctcagaaagacgaatcctgttggatgagggccccaccctcaggaccgatgtaaccttaatgacttctgtagaggccccatctccaaatacagacatgctgcagttaggtcttcagcatttgttctttaatagaattttcaatgccagcttgcaccattaagtccttgacattcttctgtaagtcctcaatgcgatttcccatttcttccagtacagtgttaaggcgctctgcgtagagctggagtccagagccgccgaggcacagccaggatgtcctcagagactccgcctcccatggcacatgcaactactactaccagacaacaaaaagatactccatgataatctaccagtccgaaagaatcacagcatttgttaaaggtagaaaaggatatttctgaggtttaatgttgccgtcagagcttgaaaatgttcctgaagttcctgaaatagattttctgccgcgtcccgcagcgcgcgcccgccgggggcttcagggccccgcacgtccatgtggaccgctggccgggggcgtcagtggggggtcccgtgggccgcgcggacccggcgcgaggtggcgacagctaagctccgcgattcccgtatgggccgccgggaggcctcgggcggagcgcgctgcgttccagggcggaggcggggccggagcggagaggcgggcgctgcacctactcaccaagctggactccgcccagtcattctttggtctctcagcaactcccactttagggtaaggttttaaatgtgattctcggtttttctcattacaaccagtcatcaggaaaaca

SEQ ID NO: 161544 - DNA, 638 bp, Homo Sapiens
tcaggattctctgcaatccaaatgtatccattctggctgaagcccagccagaatcccgagtggaagaaacgggggaaaagtcatattttccttctgtttaaacttcaattccaaaggtgcacagatgtattcataaaggaagacattagatccagccattgtggccaccaggctctgtggacccatctcagtggagaattcgttttggacccgtggctccgtgcagctgtggactcgagtgccatccactggtgtgagtcttgcggggaggccacaggtacagctgctccccgtgaatcctggtctgtgggttgagaaggggctcgggcctctggaatgctctagcgtgtgacgtgttctcaggaaaacgttctgtgccaagtgccgcctcgctgtgtccggcatgggactgcgctggagggtccggcgtggaaggcagacctcctgtacctctatcgttcccatttgtggcatccaaaggcggaaggctcatggcttccccactagaggcggcgtcttgggctttcccattggattgtgaaaggcattaagactgtttggagatgttggctgtatttcctgtcacatcaggttgtatgatgacgaataaaaggtgctgtgacccgtgttttcaattg

SEQ ID NO: 161545 - DNA, 1000 bp, Homo Sapiens
tcaatctcaagatagtttgtaacattttattgcaaaaagaagggcagagaacagtcttcttcatacctgttcaccgcagtaatttttagcagctctcctgtgcaaagaagtctcatcaatcaatcagcatacgggccacaaataccttctcagtgcggtttcacctacaatacaagcactcagaagcacaaatttaactgaagtgagaaaccaggccattttgtagcttcagtttttctaccagtaatatattaatttcttgaaatagcctaataatttagttctactatcaaaacagaaggccaatctgggagaacaattattatacaagtcaaactaatttcaatcatattagtataggaattcatattagtataggctaataattcatattagtagaggcgggaggatcgcttgagcctaggagtttgagaccagcctgggcaagacagtgagactccatctctaatttttttttttaaataaagaacttcagagaggagaaggaagcggattgatatgtgtctatccaaggacaaattttgtgtgcctgtacatacaacacaactatgaaccttccttcacgcagctcacaatctagtagcgagaggaaagtacaaaaacatgagcccccacgatgaggaaaaaggcgcatatcagagaaaagaaaaatgctgcgatgatccaatggcaggagcagcgtgcatccactttctttgtttttttgagatggggtttcgctctgtctcccaggctggagtgccgtggcttgatctcagctcaatgcagcctcaacctcccaggctgaagtgatcttcccatctcagcctcccaagtagctagaactacaggcgtgcaccactacacgtttactttttgtagaaacagggtctcacaatgttgccaaggctggcatcctgaagggcgggtggggcttcatcccttggagagagcttgccgaagctgggtgtccgatatcactccactcctctctatcaac

SEQ ID NO: 161546 - DNA, 1000 bp, Homo Sapiens
catcaaacataacctgagtacctgttatgtagcagacatattctgctatctctcaggtcccttctatccttaaaaacttcatgtttacctgccctgctgcacaagctgagagatttaaaataggaatattgggacttaatctccttgaaactttgtcacccaactttcaaacaaaagcatttctgaagttagaaaatagtagaagataagctttaactgcccacccaaaaggttatcagtcttaaatactaatattaatcatgggaatgtcttatttacatatattctgtaagcataaatattgaataaaatgagccatatgtattcatttgaatcatgagtttcctttgtcttcaatttgtttgaaaatcaaggaattaatttgtttgaaaaatgcattattattatttgtgttctatccccatagtacctttaagcaggtggacaagccagcaacctcacccactcaaggaagcccagatggccaggtttcttggtcgccaacaggcagaccacaggctttcttgaggaggactttatgttcaagtgcagaaagcagccaagattagcacccaggggactgggccttctgtggccctggccagacttagaatttgacccaaggcaggacaagctgactcggtgcagagtgtcagtacctgggacctatgcatgccaggcaaggccaagctggctcagagcaactagccacatctgcaaggctgcacctgtagcaggcagacaagccagcaacctcagctactcaaggaaggagggatggccaggttcccacagcctgagtggttgctgcctgatgactgatagagcagaggcctgaggaaaagcatatggcactggggccctacctctagggtagaagaactgatgtaagctgaccggcagcaagtgaggttggtggctggtccaccggctcctggcacaaccttgcagaggtggccggttgctttttgagccagcttggccttgcccggcatgcaca

SEQ ID NO: 161547 - DNA, 897 bp, Homo Sapiens
tcattaacaactttcttttattaaaaatgtacataagtaaaaggaacatggtttaattgtgcaaagagtaagaaatacagatgagcaaataacacgtattaaagccacctacgatataccacccagaagtaaccaggctgttgaatttttagagactggggtgcaaacacattttttcactcccttgtgcatatatctgggagctctgccatatacagacacagacgcggtgtccacaggcgatgcctctgctgggaatgctgcaagcaggagtctatcctttcctggtactggctcgggggccctcctcagcgcccaggtcactctagcatccaggagtccaaaggcccggctgtgcaggctgcagaggtgatctgaattttccgtctgcatccatcgttctgtctgttcggatcacatctggatactactgttgcctctccagactggataaccagtctgctgagggccagaagatggtgagatggaaactagtcatgtttacttggagaagagaaatgaagaccgtctttaacacctgacaggttgctcttcccaagaggggccagagggcaacagccatggtcaacagctccaggcacccctgaggaagcctgctccagctggcagggctgtctggcaagggaccagtccctcctctggagaagtggtgagcccagtgggctgcctctccagcaggatcctgtagagaccttactctctacaatgcacactccacacacttgctcacttgacaaacacttattataactgtcaccctgggcccattccaggttagggacataaggatgaataaaacaaggtctgtaccagtagagaacatcagtcctctaggggagaaagtcaggaaagcctcatcctgagccttcgactcct

SEQ ID NO: 161548 - DNA, 1000 bp, Homo Sapiens
gaagagggctttagaggatttatttggacagggctgtgctgagagtcccaccctcaccccacaatgggcgggggcactggcatcgaacaccaagctgagtgagaagggctcctccaggcctcgcagggagcttgctggcttctcctggctcacagcagactgggcccgactcccatcggaggaaggccagcatcctagggcagccagtggagggctggcagagggctgtgcctgggaggtcactgtgctatcttccaaccacactgtgtgagtctcagataccatatgtggaatctgcatcaggaaggtcagcttgaggtcattttaaaagggattcttcggaaaaagtctcactgaagggttggcaggaccctgatggtaagagtcaagcccagcgtgggtgacccattccaccagaggtccagttcagtacatgccttactgccggcctccacccctctcttgcctgctagcaagtgggctgtgggagggtgacatcggggaggaacaaagctccttgcccgcacttctgtccataggagacccttatctctagccagtgcccaacacacaggcactcaactagtatttcttgagtaagcagcatgcttttataccgttcctgatgtttatccagtgcttcataaattgcaaagcatgttttttcacagcagccgttcctttgagcctcataacaaccctgtcgcgctgcgccggggacatcttcggcgagctcgagggccaggcggccgcgctgggccaccgcaccgccgcgctgcaccgccgcctcgacgccctgcaagccgccgctgcgcgcctggaccaccgccgagtgaaaatccgtgagtggccggcgggccgggggaggggaaccggcgggggaggcacccggagagctcgagagagtgggcgcggagggtgggaattggacagtccccttgtctgctccttctgtctgtctgtgtctgtctgtttgggagaccccggggcgagttttgga

SEQ ID NO: 161549 - DNA, 1000 bp, Homo Sapiens
attcaaaacactttttatttttaaatatagggtcttgctctgtggcccaggctggagtgcagtggtgtgatcatagctcatcgcagcctcaaaactcctgggctcaagcagtcctcccaccttggccttccaagtagctgggaccacaggcatgtggccaccacccgcacctggctaatttttaaattttgtatagagatggagtctcactgtgttgcccaggctggtgttgaactcttggcctcaagtgatcctcccacctcagccttcctgaagtgctgggattacaggcatgagtcgctgcacccagtctgggttcttaacaagcctatgcaaaatttaaaatctctgttgcatctgtcagtctcgaatctcaaaaaattaccttttgacctgtcaggcaaattggtttaaaacattcaaaatgtcctggctgggcacggtggctcacgcctgtaatcccagcacttggggaggctgaggcggatggatcacgaggtcaggagttcaagaccagcctggccagcacggtaaaaccccgtctctactaaaaaatacaaaaattagccaggcttggtggcaggcgcctgtagtcccagctacttgggaggctgagacaggagaatcgtttgaacccagaaggcggaggttgcagtgagccaagatcgcaccactggactccagcctgggcaacacagactctgtctcaataaataaaaattcaaaaaaataatgatcccctccagcccccaaaacacacactagtctttctctttttgtcacagcgcataaaaagtgttcaccctgacgtggggagacatggaaacggggagtgaacatttgtgaagtgactcttcatttgacaggtgttttaaaagcctccagcagtgactaagtgtttgtggatgggcgtccgcgtgggtagatgaaccggtccatgtcagcagaggagccgagtctcagaggggagccgcgctttgcacggaaagctctgcagcag

SEQ ID NO: 161550 - DNA, 432 bp, Homo Sapiens
aacatatcatttttttccctgccggaattttagcattgatatgaaccatggacaagtatattctgctgccacaaagactgtaaagtgcttcatttcaacagctgaggcaagccaagtgatcattaataaagcttttcttggttccttcagtggtgttggtagtaaaaggaaggtgtcttgctgcaggtaactaatgaagaagtggtcaaccacagagtcttcaagaaataagaaattctgtaccatctgaaagtagttcttgttggtgccttcatttaaaaagcactttttacgtttagcaatactggtggcattttgaaaatcatggattttaaaggttaaccggctggagtggtccagattaagtggctttgcagaagcactgaggtttacaatatgtgtaacagctttaaagttaatcctggttgtcat

SEQ ID NO: 161551 - DNA, 757 bp, Homo Sapiens
gattataagaaagcaagctatggaacaatggcaggttattatttaactatgcctacatcttagcagaattcagacccttcctataatctcaatttcgtggtctttcctgggtcttacaaaggtggtttcagtatcaggacaaggagggggtctgttttagaaagggacactcatccttgattcagagttaaactataaattaaatttctcccatggttaggttggtctatgtccaggattgaacaaaagcagcttggaggttagaagcaagatggaatgagttaggtgagatttctttccctgtcgtaatttttctatgtcatatttctctcacggtcataatttttgcaaaatttgtttcaatcaaaatgaagatacctaagctacgacatttccaagttttatcagcatttcttctagagattaaacaggtgctgcagagagttgacctacaaaccccataggtggaatgaacagaagcttgtgcctggcccacaaaatgagcccatgagaaaaggtgacacgtcctgtgggcttccacgaagtgtctctagcagtcatggtggcagcattccagaagggggtagctgagggttgcaggacagaaaattcccaaggcagtggtttcttccagttgtgcagtggaagctttttcctgtaatcccagctactcaggaggctgaggcaggagaatagcttgaacccgggaggcgaagatcgtgccattgcactccagcctgggcgacagagcaagact

SEQ ID NO: 161552 - DNA, 1000 bp, Homo Sapiens
tccagtggaaaagaggccttcagggcccacaggcgataacttttattttgcaacttaaaaaacccacccctcagtcggccctcggaggagtgcgccagccctgcggaggcagtgtctacacaggcctcgcagcttccgcctagcactccgcaaggtttccgttgcattgtggggcagggaccaccgcgttgtgggtgtggggaaggagatgtgtggacaaagggcggagtgatgggtcacaatgtgcagaaggatggtttaggtggagacgtcggaggaaggcgagcagtggcggattaggctcaggctgctgtgaatgggtgtcagcctgggaggcccggtccagtgcgcccccacatctgcccgctctcgatgggatgcgcacagtctcgatcctggcaccagtatcgacctcagctggcaccaaaggcctgaacagagggtaatcggtgtccccattccagcccaagccccgccttcctgggtgttctggagcaaaatgggggcctgcgcaggagccccgggttccagggagacctggctcagcagggcagcctgtgagatgtggtgagaaaggtgtggagcggccatcaagaactgtcttaatgaaacattgccatgagccgtgaatctatgtaaccatattactttgtggaaaacagccagcggagggcaagtttaacagctccacggggaagctccagggacagctgtgcaagagtgtactgttttcaagtacacatcgttctgtgtggaaggcagagcccagcggccatggtgctccgtggagaagagaatctgcatcaggccggcattaggaacttcccatggtctctaaggtgcttggggtcacctcctctgattatgctgagggggaagaaattcaacacgtctccagcacatgtgttcatggaagggcactcttcttcattcatcacctatgtaggtctggagtggcttttaaaattcagatattcactagtgcagatgtgtgaaaaga

SEQ ID NO: 161553 - DNA, 989 bp, Homo Sapiens
cctgatgagttgtttcaggttgaagtaatgatccaagagttcagagaaggagattgatggtggtggtgtagtcagaagaagtggaatataacctcagtctcaaagaagcagaaatttccaatgaactggagttagatggatggactctctcaaggttatttttcaatctctgcacatacatacttatggaagtaagaaagaagagggagaaaaggcagatcccccataacagcggttaaacacctgaacttgctccactatgacagggtttatcatccacctctcagtcctcaagtggctggaaatatggaaattggagtccaggtagacaggtgagtgtacaacctcttaagtgtggagccctcggaattcacaacactccccaaatcgcttcctgcgcaggcgcggagtcggaagggagtcggaaagcagaccccggtgccccctaataaagcccccagccggacgctgccgctaccggggtttggcaacttccggaagacctgtggcccaaaggagaatcctgttgggggaggcgggggccggtggtcgctaaccaatccgacacccgccagcaggctgaagagaggggctttcccaaaaggaaaactttcccaaacctgggggatgggaagagaagacaaaaggagcgcctctggctccctttcccacttcccagccgcccgtcccagccctcggcctccgctgcgcgacccgggcggaggatcccggccgcaggccgaggcgagagccaggcgggagggccgcgagcgggctgcccctctccccgccttgccgtccgccgctgacgtaacctgcgaagtttggggagggaggagctcgggcggccggagctggtcgctgcgcgcgccggggggagggccggggctgcgagagaggaagctctttcgcggcgctaccgcgttggcaccagtctctagaaaagaagtcagctctggttcggagaagcagcggctggcgtgggccat

SEQ ID NO: 161554 - DNA, 1000 bp, Homo Sapiens
tcaaacgccagccagacaggccgactcccctcctcctcctttctggcggtctgctgcccgccagcctcctacacagtggctccatctgctttctgtcttccaggaattcctcatcaatggcaacacagatttattgggagaaagacctgcggagagggggtaccagctagtgccagagcccccttcccgcttacaggctggaccagttacagtcccgggcaggagaggtctgggattgttgtgaaaatggggtgggggcggtgtgtttggctgctgataatgaaggaatttagtgcagccaggggttaggcctgggacctgcctgacaggatgtttctcacagctcaggccctggtggaattttccactctgaccagtttgtaaaatggtaggggtctgcaaaatagtgcagtttgggctaacattcttatttcttactttagtataaaaaggaaaaagggcgtcgttgatcatctggctgcttcctgctggataggggcgttgtgattagggcctgggttctggagcttccgaatggtttcctcgtaggctcaaagactgacagcgttaccctgggttccgaggtggtgatggcggtgggggcagcggaccctgggccccgtcagtcttcagcagccaggtctacaatgcttgccagactggaaccagggttgcaggacctgggagcaaaggaaagcatataatattagataggaacttttgctcatgctaacacttttcagtcggtatctgtgggggcacagaagctttcttcttccatttgcctttctctacagtctctttccaaaacaactcattttctagcaaatttcagctgaattttcttccataccacgcagtcaccgccatccaactgcatgtcactctccacttcgccacggtctgaactcttggccacaagatctaagccttccggatgccccagccagttcaggctgctggtctcttgtccctaagcctttgccgaggtagtcggctt

SEQ ID NO: 161555 - DNA, 1000 bp, Homo Sapiens
accttgggtaattttatttagagaattaacattgttctgataactttaaataatgcagaattgctgcatgctgcccagtctgccaaaacaaattgaccaagcatattagagaaatgtatgacaaagtaacctgttgaaaaaactaattctgacaaattctgttcatttttctttcagtgatgtcttttttctttgagacggagtctcgctctgtcgcccaggctggagtgcagtggtgcaatctccactcactccaacttctgcctcccaggttcaagcgattctcctgcctcagcctccagagtagctgggactacaggcgcacaccaccatgtccagctaaatttttatatttttagtagagacaggacttcaccatgttggccaggatggtctctatctctggacctcatgatccgcccacctcagccccacaaagtgctgggattacaggggtgagccaccgcgcctggcctcagtgatgtctttttctggaatgcagcttcttaggttatatggattgcaaaggtaactgtggccttaggaagacaaccaatgtaatacatttttatgactacaaacatgtatctatgcataattttagcaaacatcaaaggaaacattgttttcaaattgatgtaaaggcaatattccttcttgtttttactgtttttaagtttcatcccttctttttatacttgtcatataaggctatcagttaatataacatcattatatttgaaatctttttttaattgtagtaaaggggggaagtaaccaaaactgactttaatttttaatagaaaataacaaatgtgaaaggcaaacaatagtaaataagtaattttacttttcattgaagaaatagttcatataagcattacataaaataattacattttaatatgcagtcataatatgcgtgtggacaactcattaaaagaagagaattatgtacaaattcaggttatttccaagggtgagaggtgagttgtttcat

SEQ ID NO: 161556 - DNA, 1000 bp, Homo Sapiens
tcaaataaaaatttatttttacaagaatttaggggaactactacatagctataaatgtaatatatatgttaactaagtatcacagataaaaaccatgctcccttcagcagcacgtgtaataatagatacaaagattgaaaggtaaaagatttaggatgaaaagaatcctctcttaaaaaggaaaacaaaattatatgtatgtgtatataatagttataacacccatcacacagctttatagaaacagcatctattcaaaaataccagtatttccaaaatatttaaaataatatttaaagtaataataatatttaaataaataaatatatttaataaatatttcaataaataaaataatacttaaataattctatacccatgtttttcaaaataaaccaataaattagatagtatgtattagacgtgttagtatatatatctgagacatgttaaaaatcacaactgaattctcacaattcagtcacaaacctaaacagcaaataaaaatttctatcaccagaattatgtttttttctggtggggaactaccaatagctataaatagaagagatttttatggaagtatcatagataaaaagagtgctcgcttcaggagcacatataataatacagaaacaaatttaaagataataaaatatttaggataaaaagaattgtctcttaaaaatgaaaagaaaattatctttatgtatatataacaactataactctcatcaaaaaactacaggaacagcatgttttcaaaagtacaacaatttccaaactatttgaaataaatctatgaataattcaatggccaacatttccaaacaaaccaataaaatgcagagtgtgcatgaagctatctgttacaatctgtggcactgatatttcacaaaagaattctgtgccaatctgagcccctgcattgtgccttcaaatgctcctggactgtggcaaccaagtctgtaagaaacaggacctccaggttccggcccag

SEQ ID NO: 161557 - DNA, 1000 bp, Homo Sapiens
atagagatgggggtctcactatgttgcccaggctggtcttgaactcctgggatcaatccatcttcctaccttggcctcccaaagtgctgggattgcaggtataagccactgcacttggcctcaatttacctgtccttttatacctttaataatcataagaatttttgagctctggactattccaggtactttacagggtaccacgcccataaggccaatatggggagcaaggcatgggaaaatgggtgtcttgctctaggtcccctgattgaaccctgagttctcttctatatggatgtatacaggggtgggaggtagatatagggcggcccagcctctgtaactctcccggtggtagattctctgggatgggaatcacttcctttctttgtccataacaccaagcataaatcgtggcacctttaaaggagctcaagcagccgggtgcggtggctcacgcctgtaatcccagcactttgggaggccgaggcgagtggatcacttgaggccaggagtttgagaccagcctggccaacatggcaaaaacccgtctctactaaaaatacaaaagttagccgggcgtggcggcgcacatctgtaatcccagctactcaggaggctgaggcaggagaatcgcttgaactctggaggcggaggttgcggtgagctgagattgtgccactgcactccagcctgggtgagagtgagatcctgtctcaagaaataaaaataaaataaaaaggagctcaagcaatgtttgcagagctctcccagggctacatgcagagcagccccgatgctggcgagaggtcacacgctgagagctgcagtcctccgtgtggccacgaggggtctccacgctccaccgaatggctggagggtctctcctaaggctacgcgccaggccatggctaactcggagcccctggacactgggcacgagggtgacagggtgggacgccaggccctggcctcccagggtgctatccgtcctccctcc

SEQ ID NO: 161558 - DNA, 1000 bp, Homo Sapiens
cacctttgaaatattagattttatttgacattttctcagtggatctataacaatattgagaacatgaaaatgacaatattaaatcactttaaaatttttatttttaccaactataaattcctatttgaaatttaaaagataaaatgttaaaagaatacatttattgaaatggctgtacatgtaagcaggtaactacacagcagacgtggcaatatgtgtggagagaagggtgaaagtagaaacagtggctcaaggcatatctatgtacattagcttttactggaatgcttatcagaaaagttaagattctacttatttattaaggcacttgggcacaaaagatttaatattctttaatgaatgaatctctattttcaactaagataacttgctattatcacgcaccaaaaaaaattagaatgaacaaaatttaaataaattaaatccataggattgtatatttttgtaaactgactgtcttttttttttttacagcaaatgctggaaataagcaatttctactaagaaggcagattattgtgtaattaagccatagctataattcatctagacatctgatgttatgtcctattaactacttacatacatgaaagaactctgtttcctgatattatcttgaaagattatgtaagcattatcaaatattgttcaaatatttgaacagttttacagattagctttcctaaattaagatgtagactagattatccagaacaagatgtcaaggccaggcacacttaatacactttccagtcttgttgtctggtaaacctttttaacaactttctgcttctgatacatgttttggtaaatacttacctagtataagaatctatgtgaaactcatatgccaactctaattcattggctctctgaatcaagtatttaccaaaatacatgttattaaaaatggaaaagcacatttttaaaatatttactataggttttatataagatactttttatgaaccaaaatttt

SEQ ID NO: 161559 - DNA, 1000 bp, Homo Sapiens
attataattttcattgaaaaaatacagaaaatcaataaaaatgagcagaggtaaatagtcaatattaaaacacttcaagcaaaagtaaatatacagaaaacagtaaaagtgaatgtaagtccatagtcaatattaaacagttcaataaaaaaattaaactattgatccaacctaggcatttaggccacatacggaaaggaggtgcaactagacattcttgaagcagtcttttctttctcaaaggtgctgcttagatccaaggtgctgttttagactaacatcttttttggagcttgggagtagagaaatctggaccacatttccaagagggcaagtctgatttgtctatttcttctttgtttcagaagaaagacctcaacaggtggcgaaagaaggcatagaaggattgaatgctgcctacccgactggtgggctattaatagttcccctagagcatgttctcatgaagccattcctcaactagccccttggcacttgctggaattattcacagcacgagctctactttctcattttctgctgactccgtgtgggtaatttctttctcatgattaaaagtgagcttggcagatccttcaaagcatggctttaggtgtgttggggctccgagtgcattctttgtctaaggcaggtctccagtaattcattactggaccactggatgagcaggtcaggggaatattcctgcaccttggaaagaataggtaggcttttctcttgcaagtaatcactccaggctttctgaatgtcatcccaaagcgattctgcctccgtcgacttatccagcatctgaggttgtgagataaccctggtagcactggcctccttcccggccccttcattattagcctcctttggccgaacaagttcgcaatttctcatcttgcctacacagctctgtcgttccaccttgagcaaaagtcaactccgtgtcccttgtgatctctgtgacaaggccatcatatcactggcaaatttt

SEQ ID NO: 161560 - DNA, 1000 bp, Homo Sapiens
agaagaaaaccaacattgaattctcttccaaagcagcagagagttcagcagggaggcaaggagggggctgaggaacgtgcctcttcaggcaggaaactcacagatggcaatgaaggaggaggtgcaggagatgccattccagagcccgttgttcaggagaataacgcagtcctcccctgagccgtggtcatttggctcatccttcttccagttgctgtaggtcagcctcctgcccgtcaagtacatgaactggccttcagttgcctcatctgtgatgcccaggaaggcagtgtctttggccacatcctggatggccttattctcctcggcattcttgggggcagccactgtggcctggagcccagcacacagagccttcactttggagaaaggcatccgctcaccattggtcacgaaaagcttcttcccagacattttccccaaggagaaggcttacagcttcttcgtgtggtccagttctgatctcaggctctatagctttctctctaagttggccagcttagcctcagcaactgaattgtccccacgatctcctttttggcccctaggtcctggaattccagaagtccctgtgtttcctgggggccccatcttcccaggagggccctgcaaacctctgagcccttgacctgttgcaagacaaagggaagatgacccagtggctgtcactcttttttttttccccaaaagctcaatgctccattcctgttcacccccggcacagccaatgagccagtgatctgacccaaagaagaaagactctcctgcaacctagtggagggcctgcaccaaggccagctccccaaccaggcaggacacccctctgaagggacaaccacacacccccagttcctgtgtggaaatatgggatcccagagagtccacgaacagctttgttttggaggcaatggcattttacaggggttgttctgagtgtagcatgggtcctgatgaaaggggagcctccccaagtctgtgc

SEQ ID NO: 161561 - DNA, 1567 bp, Homo Sapiens
  misc_feature (385)..(444): n is a, c, g, or t
ctggaccggtccggaattccgggatatcgtcgacccacgcgtccggaagcggcaggcataccacctggcagtattctgatcaacccacaaacaggtcagcccttcataaacccagatgggagtccagttgtgtataatcctcctatgactcaacaaccagttagatcccaagtgcctggacctccacagccacctctgccagccccacctcaacaaccagcagctaatcacattttctcacaggataacctagggtctcagtttagccacatgagtcttgctcgccagccatctgctgatggttctgaccctcatgccgccatgttccagtccactgtggttcttcagtctccacagcagtctggttatatcatgacagcagccnnnnnnnnnnnnnnnnnnnnnnnnnnnnnnnnnnnnnnnnnnnnnnnnnnnnnnnnnnnngggcagccagtccctactgctggatatcctgcctctggtcatcctgtcagccagcctgtgctccagcagcagggatatattcagcagccatcaccacagatgccagcctgttattgcgctccaggccactatcactccagccaacctcagtatcgcccagtcccttctgttcattacaattcacatctaaaccaaccactgccacaacctgcgcagcagacaggttatcaagttatacccaaccagcagcaaaactaccaaggaatagttggagttcagcaaccccagagtcagagcctagtcagtggccaacccaacagcattggaaatcagattcaaggagtggtcatcccctatacttcagtgccaacatatcaggtttcactgcctcaaggttctcaaggaattcccccatcagacttatcaacagcctgttatgttccctaatcagtctaatcaaggatctatgcccacaacaggaatgcctgtttactatagtgtcattccacctggtcaacaaaacaatttaagctcttcagtaggttacctgcaacatccaggatcagaacaagtacaatttcctcgaaccacttcaccatgcagttcccagcagcttcaaggccaccaatgtacagctggaccaccaccgccacctggtggggggatggtgatgatgcagctcagtgtaccaaacaatccacaatcttgtgcccactcacccccgcagtggaaacaaaacaaatattactgtgatcaccagagaggacagaagtgtgtagaatttagcagtgtagacaatattgtccagcacagccctcaactcagtagccccattatttcaccagctcagtcgccagcaccagctcagctgtccaccctgaaaactgtacgtccctctggaccaccactttccatcatgccccaattttctagaccttttgtccccgggcaaggagattccaggtatccattacttggccagccactgcagtacaatcctcctgctgttctgcacggacacattccaaaccaaacaagtcagcctggcagcagcatggaaaccgagagagacaagctaaaaagctgcatccacagacctggagcagagaacagttgttgggaa

SEQ ID NO: 161562 - DNA, 54 bp, Homo Sapiens
agcacccggccgtaatggccgaattcccgggcatatgtccggtaccgtcgactg

SEQ ID NO: 161563 - DNA, 425 bp, Homo Sapiens
taccagcttattttctggttgctgaataaattctttcaactgctttacagtggccaatcttcggtctctgtcgttttcccgggtgatcctctgaagaagatttgacagtcgagactcatcaccataagacattgatctctcctgtgatttcctcatgtctttggtggctaaagcacgactgccatgctgaacactggtgaactcagggctggtcacattgttaaccctcagctcttgccccaacgacttccgaccataagtattttccccagatcctccattgacactgtagccacctacaacagcaatgtgtacgttatttaaatatgattgttcgtttcattcagtcaatttcctgatagctcaggatcttaccccggccgtaatggccgaattcccgggcatatgtccggtaccgtcgactg

SEQ ID NO: 161564 - DNA, 1233 bp, Homo Sapiens
gaggtcacattgggttcatcagcctctgccaggcatttgggacaggaacagacaaatagatagttctccctgaggatcttgtggcggctgtggcggctgcgctcccgctgacagcagtccaagtagctgatacaaatttcctctcctggcttaatatcctccagagcagtgacatgcaaaaggaagttgttttctggaaaggaggtctctgcattgggcacacaactgtggttgcagcagctctgaagcacaaagaggccagatccttcacagttaagaaactctccagttgctgcctcgatgtccttgtatagctggtcaatgaaggcgtcaagctgctcacggtcctgaggcttcaactccagagtgtcacaggcatggacccactggcttagggagctggtcccgattccttggccattggtcccaacaagagcaaagagagaccggaatccatctggagtgaaccactggctgactgcttcctcatagagggcctctgtgaagagtctccgcagaagttccagttggcccttgaatttgtctcccagaagtttatggacaatttcctcctcttcattggctgttttgttacaaaactgggaaaagagtctgatccaacggtccttgtccttcgcctgcttcactgtggccaccatcctagccatcaacatgatgcttgcagtctcaggtgggtagtgaatactcctccatgcctcctgaagcttattgagaggatgcaaggggtcatcctgggaggggcctgggcacaggacctggtggtattgctcagtggctgccaaccgacattctgcactgcagtacatcacttggcaatggggacagttctggtggaggtctttgcgcacagtgcacagctctgggtgaggcagaacctggcctggtttcccggtcagcctctgggcattctcctctgccttctctagtgccctaaggcagtggtcacaggctcggtagcgataaagtgcattccagagaaactgtgcagccaccaggggccgttctacgaagatggtctcccccttccggatgagctgtgtggcaaacagcccctttcccttggcgctgctcacgaaacggacttccacggagacccgcgcgcgcccgccacgcccacgcagaaggacgacgcgtgggtcgacgatatcccgggattccgaccgtaccagcctgcttttttaaccaacgtgtttatagttcaacctatatggc

SEQ ID NO: 161565 - DNA, 599 bp, Homo Sapiens
  misc_feature (468)..(498): n is a, c, g, or t
gactagcatttacaacttggaatggacgtaaactgtaatttctttgaacagcaatgttgatggttgtgctgaagtccacagccacagcctactctgccggctccaagtcatggttcagaaggttttaaaaacagagagtccaaagatgctcccttggtaaatgtttcttattaaaaatttgtgtgaacagtgacagcctgacacctgtttcactctagaacaatgcagacaacgctaaaccaacatacacgggcatgccaccagggtgtgtcatcgtcaccatgggtcggagcacacgaagtacaagaggaccatcctaccagtggggccacgtctcaacggtttatccttcacccatttttctgcacgtcatcctgaggtaaaccaattttaaatgtgtttgttttcagtaaaccagctatgacaatttatactaaacaaattgaactagaacccatttgaataggnnnnnnnnnnnnnnnnnnnnnnnnnnnnnnnaatacaaaggcctgactgtgctcaatcgtcaagctgcatgcatgaaaaactggccagcccaaacagtgtattaatcattagcaaatggaactttaaggagt

SEQ ID NO: 161566 - DNA, 1001 bp, Homo Sapiens
ccaggggatgctttgggcccctgggggccaaccaggtcaggcgccacaccggttgttaagaagtggcactccccttttgcggacctggaacaaagtgcgcctggcgtccaaccaaccgggcggttgttacccgtccttacgtcgagcgaaggcaccttagtgaaagaataggctgtccgggtcattcccggtccccagtggattagtaaacgttggacagcttttaggataactctggtaaagtattgctgcttaaacaagttatggtattcaagcctcagtcctctggtgcaatgtcccgtgaaaccgcgaaggtcttcagcctcactcctgaagccagcgagaccacgaacccactgggaggaacaaacaactccagacggcccgccttaagacgccgtaacactcaccgcgaaggtccacagcttcactcctgagccagcgagaccacggaccccaccagaaggaataaactccgaacacatctgaaatattaggtttctttttcactggtgaataaacagcaaacatccactgccctgatgattcccaacctccatatcttttacaattccttccagaacgtttctttctcatctttctgctcatcaggactaagtgaagcaaatgggttctcacgacaatccaaagccttccttcctgttagttgaagctccagaatcaaaagaactgaaatatggcttttcttgatctctcgctgcccccccatggtgtggatttggagaaactggatggctggatgacattggaatatctctggctagttgtattccatccacgtctattattacctgaaggctgctgctgcggttgctgccgtcctcctcctgcacccctagcaccgggatgttcgttccagcaccgatctccaaagcggcaccggccttgaagcggacgcgtgggtcgacgatatcccgggattccggaccggtaccagcctgctttttttaacacactgttctatagttcacatagcctcc

SEQ ID NO: 161567 - DNA, 1889 bp, Homo Sapiens
  misc_feature (41)..(94): n is a, c, g, or t
  misc_feature (138)..(254): n is a, c, g, or t
  misc_feature (287)..(382): n is a, c, g, or t
  misc_feature (418)..(478): n is a, c, g, or t
  misc_feature (484)..(728): n is a, c, g, or t
  misc_feature (735)..(958): n is a, c, g, or t
  misc_feature (1002)..(1123): n is a, c, g, or t
  misc_feature (1437)..(1447): n is a, c, g, or t
  misc_feature (1692)..(1700): n is a, c, g, or t
  misc_feature (1705)..(1781): n is a, c, g, or t
ctttctctctttctcctgctttgtctgctctgtgcctttgnnnnnnnnnnnnnnnnnnnnnnnnnnnnnnnnnnnnnnnnnnnnnnnnnnnnnngttccgcttctccgtcgctttctgtctgctcgttgggcgctcgnnnnnnnnnnnnnnnnnnnnnnnnnnnnnnnnnnnnnnnnnnnnnnnnnnnnnnnnnnnnnnnnnnnnnnnnnnnnnnnnnnnnnnnnnnnnnnnnnnnnnnnnnnnnnnnnnnnnncttttttgctctcttcggtgcgctgtctgtccnnnnnnnnnnnnnnnnnnnnnnnnnnnnnnnnnnnnnnnnnnnnnnnnnnnnnnnnnnnnnnnnnnnnnnnnnnnnnnnnnnnnnnnnnnnnnnnntgctcgcccttacctcctgctcccgtctctatgtgnnnnnnnnnnnnnnnnnnnnnnnnnnnnnnnnnnnnnnnnnnnnnnnnnnnnnnnnnnnnngtcctnnnnnnnnnnnnnnnnnnnnnnnnnnnnnnnnnnnnnnnnnnnnnnnnnnnnnnnnnnnnnnnnnnnnnnnnnnnnnnnnnnnnnnnnnnnnnnnnnnnnnnnnnnnnnnnnnnnnnnnnnnnnnnnnnnnnnnnnnnnnnnnnnnnnnnnnnnnnnnnnnnnnnnnnnnnnnnnnnnnnnnnnnnnnnnnnnnnnnnnnnnnnnnnnnnnnnnnnnnnnnnnnnnnnnnnnnnnnnnnnnnnnngtcattnnnnnnnnnnnnnnnnnnnnnnnnnnnnnnnnnnnnnnnnnnnnnnnnnnnnnnnnnnnnnnnnnnnnnnnnnnnnnnnnnnnnnnnnnnnnnnnnnnnnnnnnnnnnnnnnnnnnnnnnnnnnnnnnnnnnnnnnnnnnnnnnnnnnnnnnnnnnnnnnnnnnnnnnnnnnnnnnnnnnnnnnnnnnnnnnnnnnnnnnnnnnnnnnnnnnnnnnnnnnnnnnttccttctttaactgctatctgcttcctctctctttgccatccnnnnnnnnnnnnnnnnnnnnnnnnnnnnnnnnnnnnnnnnnnnnnnnnnnnnnnnnnnnnnnnnnnnnnnnnnnnnnnnnnnnnnnnnnnnnnnnnnnnnnnnnnnnnnnnnnnnnnnnnnnataaaatataaaataaaatctccccctcgctcctcgtcgatagatatatatatatactctatctcacataatataaatacaaaatccctactccctatattcactccacaaaacatttctttcttatccttctcccccctccctatatatagatactcccacccattttgttttatctcacccccctctctattatcacctctctcttaaatatatatctaatatattatcacccccactataatgcagcttcttaatatatacactcccacaatgataatagtttttctctccacaccatacttttctctctnnnnnnnnnnnaacctataataaggttccctcttttttcccacaaagtaatctctctcctccttttcacccgctgtttctctccctcctctttcaccatcttttatataataatactcctccccactcgctcctcactagtgtagtaaatatatcaccccccctcatatgggggccccccttgtacccacaaaacatcggggtcggcgcgccgaattgtggggccccccacaggagagagaagtcttcgtgcgcgnnnnnnnnntctcnnnnnnnnnnnnnnnnnnnnnnnnnnnnnnnnnnnnnnnnnnnnnnnnnnnnnnnnnnnnnnnnnnnnnnnnnnnnngagatcgacgcgtgggcgacgcgtgggtcgacgatatcccgggaattccggccggtaccagcctgctttttttgaaccacacttgttctatagttccacaatcgcgcc

SEQ ID NO: 161568 - DNA, 923 bp, Homo Sapiens
aattagaaaaagtatttatttctgctccgttcatacatcttattgttcaggaaacagttttacatacatatctgaaataatctaccatcacacactctagttaaaggcaaagcaccataggtaaagctgatcaactgtccagagttctcagcttacggaatcttgcttctggattttatgttaatttctgaaaatcagaaatgtcatctccaaaaaatgttaagagggttgtaaaaaataatcactttatttgatattatagttgtagatatggaatatattttaatgaaaaactaaaaagaaaatgccactcaacatcattggtatagcaataggccagcaggaaaaaaaattctgtgataaacttgtctctttaataccaagaagaaattctagtccaagcttcaatacgcttcctgttttttcactagatatttcttttactgctgctcttcattcttttccacatttcatattagaggattggtacagcctttaaaacttcattgacaggagcaaatcccagtatccactgatttcttctcaaaggcactctaacccatcagatagcccctgtaggccaagaaagctactggcctctgatgcccatgttcatcagtcatagaaccgacacttggaggttcaacaataacatcataaattattcctccggtgatgaggaagtaagacaccaccaccagagcatacacagtcatggccgacggcatgtgcaaccagggcggcttcttcagcttcaggttgggacattcgagcactaagaacgggacacggtacaaagtctccatgttggtggcagcaagggccgttctcggcctcaagccccacgcgcctcccggaaacaggcccgccctccccggccgtaatggccgaattcccgggcatatgtccggtaccgtcgactg

SEQ ID NO: 161569 - DNA, 54 bp, Homo Sapiens
gaggcccggccgtaatggccgaattcccgggcatatgtccggtaccgtcgactg

SEQ ID NO: 161570 - DNA, 53 bp, Homo Sapiens
cagtcgacggtaccggacatatgcccgggaattcggccattacggccgggatc

SEQ ID NO: 161571 - DNA, 946 bp, Homo Sapiens
ttctaagggtgttctgtttacgccggcctttctcccacgagttgaccggcactgttccactgtccttgagtggcgtgcgctgtcccacccggtcacccttcttccgttccacagtgcaaggttgcattaaagagttcttcccactactccttctgttaatgtcatttcaaactggcattcactgattctttgccatcgctactaccattttagaattgctgcattttttctgcacactggatggcttcttccaccagtgtctcaacaggacaaatcttgctgacaagacctgcttgcttggcgtcctgggctgagatccggtcaccggtgaggaccatctccatcgccagcgacttcccaacagcacgggtgagtctctgggtgccgcccgcacctgggatggttcctattaagatctccggctgtgcaaactgggccttctcaccggcatagatgatatcacacatcatggcaagctcacagcccccgccaaaggcatagccattgacagcagcgatgactggcttcttgacctgggtgaggtggtcccagtgcttcaagaacttgctggagtaacagtcctggaaactcaggttctgcatttccttgatatcagctccagctgcaaaggccttatccccgccggtgaggacaatggcccccacggccgggtcctcctcgaagatcttcagggcctggttgagctcgtcaatcaggccatcgcaaagtgcattgagggccttggggcggttcagttggatcaaccccacggtgttattcttccctcttttttctgcgatgatgtactcaaagttagcacccgaggcgaagggacgccaggcgggacagcgaaccggcgacgcgtgggtcgacgatatcccgggattccggaccgtaccagcctgcttttttgtaaccacgtgtttctatagtcacatgctgggcc

SEQ ID NO: 161572 - DNA, 549 bp, Homo Sapiens
catgtttaacatctttaattcaaatgtaaaagttcaatacaagccatttatagggcttgagatttgttggtcttttaaaaacaagaaatggggaaatgcaacaaaatgacctttccacttttcaaaagctttcaagtaaaggatagatcatagggccataaaagatccatttaatcaaacccactttcaccccctaccaattgtcttacacccattccacaatcttaatacatattcctgaagatttacagttcagctttgcttacataaccatttaaaaaatacttagcaccagcgtgcttcctatatgccaaacaaatcatcaaactacttcaatatgcatttcttctttttaaaacaaagggggcaattatttgtagaaagcaatacttagcctccagatgcatttcccagaaatggcatatgccattcaaaggcctagacactctcatgctttcaatgtggaatacgtagcctaatatgcatagaagcatgaatggcaaagttgaagatcaatattataactatttttctatttatttgaagcac

SEQ ID NO: 161573 - DNA, 1011 bp, Homo Sapiens
ggaaaacagtttaaaacctgtgcaaaatcccctaatctatttcaaaattatgttgtataaaggtaaaatatcgtatagtttaataatcgtccctatcacctgcagcttaccaggcagctcaaacctggacatgaaacgttcaaaacattcttgcatggatccggagagccagtgtgccaaattctgagatcacattcggtttttagcactgttggccttataatgtatcactctgtagaaacttgctcctgtatgtcactgtgccctttgccattctgaactggtgaagcagcgccatcccatcaaaccaatgattgtacttatccttcccaaactcgaatttcccaggtccaattcgaagtagagagccattgagccacttaggaaaatgtccccagactcgagcagagatgccccgtggagcctcttccactgtggtcagcagcggtgcaacacatggcagaccccgacactgcccaaagacggcttttttctgaggagtatttcccatgtacctgtttgaaaacatttaaatctttctccaaggcttcatctttataaaatagtccggaaatttcagagaaagatgaatctgattttccaagagaggacagctgtggactatctggcactggagacagtgaccatgaagagtgagggctgcagccagggaatagtccatcgcagagcaaggattcaaataagcagccggaagcagacccaggagcaaaacactgacaaccctctcgctagtccagtggagagatgcagccttggagccagaatggtggctcggtgacaagtgtatgtgctgcactccacaccattctgggataggtcggtcctgaagaaatgctgagatatgagcaggtctgaccactggagttcgaagcaacagagctcggcctcctagggcaccgcaaacggcactcagcctccagagaaccgccatctcgttcctcccggccgtaatggccgaattcccgggcatatgtccggtaccgtcgactg

SEQ ID NO: 161574 - DNA, 1414 bp, Homo Sapiens
gggcccccaaagccaaatttgggtttggtttcgggtatgccagagaccaaccttatgagggagggccccatagggcaccctcccctttttgcctgaaggggatcggaaagccagaaagtaaggggatctgtacttggggcacagagaggttttcaggaggatccttgtgaaacactagttaaaagatgacgagtgggggagaagtgcgaggaaagaaggaaattagtctgactggctttctgtcctgcacccattgattcaatggagactggcggggaggaaatggaagactagggttggagatgggatgggtggggcaagggatggaaaggaaaaggcagacaactaatgcgttccatttataccaagtaatatatatcaaagacttaaaggagattaaagaccaatcagaataatttggcaactttaattcttaggaagatcaaagttccctccaaacctaatttgatgttttattactaaaagcaaagaccagtatggtacagtattactccagagaaattaaaggaaaatccttagggcggcttcacccacattcattttatgaatggatacctcccctacctcaaaatgctttagggaggtactgctaccattacatggttccttattaaatttgaaaagtgcctgaaagtttgggcaccagtaagacagccgcctgacaacatgtgtctaaactgcaacttcaggttaatatgactaaagcaagttacacttgtgagaagtgctgaaggtatgtgatgtctttcccggcacaaaggtggccttggttcctcaccagatggtgtagccaccatctgaaccacccatgaagaagttcccccttccgctgagttacgaggacgttggctcccctgcatgactgcaagctgagcagcattgggagggcatccaggaggtggaggaggaatgttgccagcagtagccccagctccaaatctggcacctgcatcataccctccttccaccagcactgtggagccaggtggatagatgggcccgactggataataagccatggggattgtggaacctaaaggcccaacagccacagactgggccatgggaagatacagagaggctccaggaaatgcggctgacatggtggggactgtggcagcccctgggtgcacaaagctcggacgatagagctctgagtaggcaggtggagcatcggtatagggtggagcctgaggaagatgcaaggtctgagggtatactggattcccaggaggctgcacagggtaggttggctgtgttggatattgacctttgctgttcatggtggttgcgggtccggtttgtctcggcgtcgcggacggttatttttttcgcctcgtgccgaattcgccacccaggcctcgctaccttagagaccgttatagttactgcc

SEQ ID NO: 161575 - DNA, 171 bp, Homo Sapiens
acctcttctgaaactgccacagactgtagcaatgtattcagaatccacttttttaacttcatttagtacaatatcttgcatttgtaacatctcttcacgaggaattcttttttcaaagtcccccggccgtaatggccgaattcccgggcatatgtccggtaccgtcgactg

SEQ ID NO: 161576 - DNA, 121 bp, Homo Sapiens
caatagaaatgccataatttattccattgtataaaaaagtcatccttatgtaacaaaatgtcttcttagaagaagaaatatattatttcaggtcataaataatcagcaaacatacaactgt

SEQ ID NO: 161577 - DNA, 1344 bp, Homo Sapiens
  misc_feature (53)..(62): n is a, c, g, or t
  misc_feature (519)..(546): n is a, c, g, or t
tgcgaaaatcccttgtgcgagatatcacgtgacctgaaagttgcgccactatnnnnnnnnnncaccacaatattccccccgaagggcgcaagaggcggacgctgaaaacctgttccccagggggccttgcgggaaaaattgggggtgaggggttccagggggtatttaggggatgttccatcccgccggttttttgcggtgcagaggacttccccccagaatgggccaatttagggaagcccaaggcggttccctggaacaatacccgcgtttgggcgaaggatggggaacccatttatttttccggggcgtccagccacaactgggcccagggtcccactttgcttggcccacttgctgggccccggctggtacgtttcatcgtggcccaggatgctttggaggtcgctccagctggatgggctgggtcgggctggctgctgtgctggctccattcccggaactgggcgcggggctcgggctagttgctgaggcagctgctggagcagaaggggctgnnnnnnnnnnnnnnnnnnnnnnnnnnnntgacggggtgaccgctgccgactggctccgggagctggaggaggagctgctccctggaggcccactgctccccagtaagctggccaggccaggtccagtcagggcccccagcccacccagtcctccgaggccggctggtccgatgagctgcatgagctggctgtggctcatgtttcccagcaggctctgcaggccaccctcaccgcctagcgcagagagttcgtggccgctgcttccgctggcccccagtgccccaggcatcggggggttgttcagatactcgttgactttccggcaatgctcctcatcctggtctgtcttgggttcctgcatccagaagaaaagccgcttggaccctgccttgaacttcagcacgtagaccctcccgctggggcactgcggcacccgcttgaactcacagtcgtcagggaagatgatcaagtcgtcttccacgttcccggacgtcctgtccttccagcagaagtgaataagcgagtcgtccgtctgctgaatgtacaccagccctttccgcttatccggagtcacggtggtccccttcagggacatctttcccgcccgaaactccaccaagtacttgttggaggcgccccgagagcctggcaccaggcttggaaagagcgcgcctgaggtcgtcatcctgcctcgcgcccacactcgttcgagaggcgccgtccgggctcgctcttcccggacgcgtgggtcgacgatatcccgggaattccggaccggtaccagcctacaagtgtctcccgggtctaagccaccacatatcttggc

SEQ ID NO: 161578 - DNA, 343 bp, Homo Sapiens
aagacaatctaggttaagcaagagcaaagtgccattgtttgcctttaattggggggtgggaagggaaagagggtacttgccacatagtttcctttttaactgcactttctttatataatcgtttgcattttgttacttgctaccctgagtactttcaggaagactgacttaaatattcggggtgagtaagtagttgggtataagatctgaacttttcatctgcagaggcaagaaaaatatttgacattgtgacttgactgtggaagatgatggttgcatgtttctagtttgtatatgtttccatctttgtgataagatgatttaataaatctctttaaatact

SEQ ID NO: 161579 - DNA, 144 bp, Homo Sapiens
aaaaaagcaggctggtacggtccggaatcccgggatatcgtcgaccacgcgtcgccacgcgtcgggatgacgaggacgaggatgaggatgaagatgaaattgaaccagcagcgatgaaagcagcagctgctgcccctgcctcag

SEQ ID NO: 161580 - DNA, 55 bp, Homo Sapiens
atgtccccggccgtaatggccgaattcccgggcatatgtccggtaccgtcgactg

SEQ ID NO: 161581 - DNA, 843 bp, Homo Sapiens
tcatataggaaatagattttaaaatagcatattttagtgatgaaatttatattttctacttatttatacagcatctgtaagattcttctatctgttcatagttaactagcagcaaaatattttaaattacagaaattcagtagatgtttccctccaatggtttcattcatacagaatgtatcacgttaaccaaacgaaaccacttatatttcctgaagagaaaaggtgggaaaagatttcatcagttaccagctcccccaaaaaagaagaaacgagggagaaaggatggaagctagaaaaattttgcatgcaattactaaaaaatatattctcaaccactttgaccaattataggtggattttgtgaaatctacatatgtgtgtgttagtgaaagttatgttaactttattttctgactttatactgcagttgaaaaatatgtggaagtttccaggaggcctgtcagagcctgaagaagatattggtgtgtatcttttatatttttaattggcttaaaaatgttgaggaaattaatgtgtttactttcttgctttatagctaagaataaaaatttaaattttccaatttgttccgactgagtctgaacatttcagaaattacctcagagcagatataattagcagcataatttctaatattacagtttattccattagtagaaataatatcattaggaacataccacttattcttctgtttcgacgcgtgggtcgacgatatcccgggaattccggaccgtaccagcctgctttttgtaacacactgggttctataggccaactaaatgctccctctcttgtttgtgtgcgtgtgttgtgttt

SEQ ID NO: 161582 - DNA, 1049 bp, Homo Sapiens
  misc_feature (289)..(338): n is a, c, g, or t
  misc_feature (375)..(452): n is a, c, g, or t
atttattgatcatttattatgtaaatagcatttctgggtgatataaaattcacactgggagagggacacgaaatataaatggcttttatagctcagctggagcagtaggcagatgtaaccagtgtggctttcaaacatcatagcaatgctacaaaaaccacagctgtcctggtgagcacacgaacagctcacaagcctctggtctccctatcctcttatgctccgagaggccttcaatcctaaagaagccaaatcccaaacaacacttccctttggatttacatgattnnnnnnnnnnnnnnnnnnnnnnnnnnnnnnnnnnnnnnnnnnnnnnnnnngatgctgcagcctcatcactctctggagatgggagannnnnnnnnnnnnnnnnnnnnnnnnnnnnnnnnnnnnnnnnnnnnnnnnnnnnnnnnnnnnnnnnnnnnnnnnnnnnnggctatacccatctgactgtgttcttagctcaaggactttgaacctttgtcttccaattgctttcactttcactatctcaattccaaaatcctgttcttctcgataggcatatatctctgctgttgttccaaactgtgcttccctttcctgtacattgctgtatgcaagaacagcaaaggttctatctttctgaattaaattccgcaccatactgacttcttgagggtgaaaaagctgaagaggtaatgtctgtccgggaatcaggatcatcatcacttgtggaagaactggaatcacctgacagctgtcgtcatcgtgcaaagtcctgccatgaaattcttccatatcagcacctaggtatgtatgtgatgtcggcagactggtgtcaaaatttatgatgtttggttttttggcttctttactatcctggtcttcaacttccatttcatcttcttcctcactctctgcaggcaggagcggcaggtggttgcccatgttgtgcgcagcgtcctgctgatctccttcgccggccatgtctgtttaccccccggccgtaatggccgaattcccgggcatatgtccggtaccgtcgactg

SEQ ID NO: 161583 - DNA, 446 bp, Homo Sapiens
cagtcgacggtaccggacatatgcccgggaattcggccattacggccggggtgttcctcctgcccatggaagagtcatacatcaatttccttgcaattaaccaaaaatgccccctgcaggagatgaagccccagagaaacacagcggaccttctgcccaaaactcaagtccatggccctggctgacagagctgtgtttgaaaagggcatgaaagcttttgtgtcatatgtccaagcttatgcaaagcatgaatgcaacctgattttcagattaaaggatcttgattttgccagccttgctcgaggttttgccctgctgaggatgcccaagatgccagaattgagaggaaagcagtttccagattttgtgcccgtggacgttaataccgacacgattccatttaaagataaaatcagagaaaagcagaggcagaaactcctggagca

SEQ ID NO: 161584 - DNA, 82 bp, Homo Sapiens
ggcacatgtctgtagtcccagctactcgggagcccggccgtaatggccgaattcccgggcatatgtccggtaccgtcgactg

SEQ ID NO: 161585 - DNA, 251 bp, Homo Sapiens
tgcagctccatgagggtttgaggttttttcacagattcttccccagttatctcatttataatacactcctcagagttaacagtctccttcccagcttctccagtacaataggaatacttgaaaaaagagtgacagcatttgtatccccatcggccttctttccagtacgatccccagatatgtgtgtgattgtggatcttccccggccgtaatggccgaattcccgggcatatgtccggtaccgtcgactg

SEQ ID NO: 161586 - DNA, 56 bp, Homo Sapiens
taactccccggccgtaatggccgaattcccgggcatatgtccggtaccgtcgactg

SEQ ID NO: 161587 - DNA, 790 bp, Homo Sapiens
  misc_feature (209)..(245): n is a, c, g, or t
gcattttctggattttttgaagaagttactccatttgcacattcaatcttgtttgccctttttagtcttttttgttcagtattttaaacacttccattttcttctttttgtactgcctttgggcttcttctctctcctgttttctcctctcgaattcttgtttcttagcagcacgtttggcttgtatctgttcatattcttcttgtgcnnnnnnnnnnnnnnnnnnnnnnnnnnnnnnnnnnnnnaattgtaaaggagtttactgttttaatacattgttcttctggctgaggctggtcaaagctacactgatcttccaaataaaggctcgtcaatgctacactgttcttcaagcaacggctggtgaacttgttctgaccaaggatggtcgacttttcttgcttgcttcctatgtctttcctcttcagctaaatagagatgtttcagattatctgggtatcgatctgtgaattgagattccagtgacgtttgagccttcttttccttccgtagcatttcttgtaacttcgctgtattttcagttttcttcgaaaagcaagccttgtccctcgcgaacgctccccacgaaggcttgcgggtggttaggccgccatgtcttctgtctcacattcttattcctgtacccgacatgtggaaaccccttcaccacgcgcctcaataccaccaggccgccacttcgcggaccgcctcaccggcgccattgcagccgactaactgcccccggccgtaatggccgaattcccgggcatatgtccggtaccgtcgactg

SEQ ID NO: 161588 - DNA, 1246 bp, Homo Sapiens
  misc_feature (559)..(572): n is a, c, g, or t
catctctgactttaatggcttaagcaagaacatggtttccgtggctccccctggactgaatgctggaggatatatacttcacagtctgaggcctggtcccaggaactggcaatctaacaggatggcaagtggttttgaaacatatagattttcaggatggaagtttgattcttcagattgtgactcatccgtggaaaataaatggtttagcacctaaatctgtatattcccatcagtggcttggctgactcagttgtaaatagggtaccctccatctgtctcccacccatatgctccactgtccccaggccctcagtgcctgagccctagggggattcgagttggctgctggattcatttcctgcaagcaggcctgaccaaggtgacctgtctcctctaagatggagagctggtagaaactggcctgttaactgccaaactgtaaactcccttggctctggggaatgtaaagggtgtgggaagggtgcacctgtggccaggtgaacctgggagtgagtccatacacaacacacacactcatagctcctttccttccacnnnnnnnnnnnnnnaactaatgactaacaacctaagaagggaaaaatgaatggggaatgggccacagggggctctggcctcagtccatgaggtgtgtccgtccgctatgccgaggatccagtgcacagagggtcagaacatgagttaggagggccggtccactccgaatcggagggtgaactcttcggcattctttctgaacagctccggattctgtgtcagcaggtcagcgaggtccatccgcaggggctccctgatattcggtctattcaccagcacattgagggcctccaggacttggcaagtcttggtgcaaggcttccagttctcactgctgatgatgggcaggcaaatctgtccgttctcgtccacgttggggtggtagatcttggttgtgaatttgatcatgggaggcttgaacggatactccggcgggaagctgatgcgcaggttgaaggctttcaggtggtagggaggttggtcgggtaggaggagagcgtgccacaccaggacattggcatcatcgctggacaggttccgcaggtatgggggaggcttcttctgaagatcctccagctccttcaccactcgcatgctcgccatcatgtcgggaccgagtgtgtggcacccgtggcctccagcaggaccgagctccgacccgccctcgtgttgaatcgccacccaggcc

SEQ ID NO: 161589 - DNA, 53 bp, Homo Sapiens
gtgcccggccgtaatggccgaattcccgggcatatgtccggtaccgtcgactg

SEQ ID NO: 161590 - DNA, 77 bp, Homo Sapiens
catgttggccgcctcgggctctagaatcccggccgtaatggccgaattcccgggcatatgtccggtaccgtcgactg

SEQ ID NO: 161591 - DNA, 681 bp, Homo Sapiens
tcttgttttctaatagtcggaattgcaactctggaagcctgatgctggagataagtactctctgaagtcattgaagtccaaggctgtcatcgtctccagaatggaaaactgctgcaccagcagtttcaggatcactgacactcggtgcatccgagaaacaaccttaagcatgttcctttcatctctgacatggccattctgaaagatctctcgaacagaatccaactcccagaggatttgcttaaaccagagttcataagcttgatgagttatgataaaaagacgttcatcatggattttatttccttttgtttcactttgcagttcttgtgcattcaaaactttttccaatgcaggtagttcccatagataagacctcctttgctggctctattcacaccagtttgtgatttgtcttcttcgctgccttctacggggagttttttaaaagtatatctgaggcaaatgcgtatttgacttcttcctctggtctatgtttactttatcctaacactcactatattccaggcaggtgtctaacccagtatttgaagaagctgaaggaaaaggtcacaaaggagctggaggagctgtggtcctggctgctgcccgatactagcaagttgagtccccggccgtaatggccgaattcccgggcatatgtccggtaccgtcgacttg

SEQ ID NO: 161592 - DNA, 510 bp, Homo Sapiens
ggattgcttgggatattttaatacatattcaagagaaaatgacaaatatatcttaatagaaaaggataccaaattaaaaatcagaaggcaagaccaccaggattaaagatgcaacttagatcaaatattgaccaaagtaaatgggttgaattttgaatatagcatagatcatacttagtgagaggctttcgaactaacgacttacatttaataataattagcatgtccacagaatatagtttatgattattagaaaaatgaagttaaatcaatacttgggagattgtttattaatgtgtgaattatgtctttttttaatattcataaatagttttaaaattttaaatgtgttttagaaagaaattggttactccttgggaaaaaaataagtgtgcattacacgtctagtggaagagtttaaaggatagattttcatttatatttaggaaagaatgtttctcccggccgtaatggccgaattcccgggcatatgtccggtaccgtcgactg

SEQ ID NO: 161593 - DNA, 54 bp, Homo Sapiens
cagtcgacggtaccggacatatgcccgggaattcggccattacggccggggcca

SEQ ID NO: 161594 - DNA, 680 bp, Homo Sapiens
  misc_feature (55)..(178): n is a, c, g, or t
taggctgtggaagacgggaattatggaagggagaggggttcctcaagtctgttannnnnnnnnnnnnnnnnnnnnnnnnnnnnnnnnnnnnnnnnnnnnnnnnnnnnnnnnnnnnnnnnnnnnnnnnnnnnnnnnnnnnnnnnnnnnnnnnnnnnnnnnnnnnnnnnnnnnnnnnnnntcaaatctgttcttgagcagtagagaggaaaggagaaaggaagggacccactggctaaaataaaatacatttttaagaagggcaactctcagtgagtggttgtgatggccgccctgctagggctcttccctcgcctcctggagctcctcccttcatgcctctgcctgtattgctgggcccagcctagtgtggaagaagagtaaagctgagctagaagtattttctgctggtgccccaccaatttaaacacattaaatttggagtgtagttctgcctttgtatgaggcttttatctatggtgacatcctgttcttggactctgatactgtaaagaaagcagatgccttcacttcacaattgcatacctaaatgaagatttagtacatttcattatggtaatcctcagcccagcctccaccctgcgtagctactggatttataaattacagtcccccggccgtaatggccgaattcccgggcatatgtccggtaccgtcgactg

SEQ ID NO: 161595 - DNA, 59 bp, Homo Sapiens
gagactacccccggccgtaatggccgaattcccgggcatatgtccggtaccgtcgactg

SEQ ID NO: 161596 - DNA, 374 bp, Homo Sapiens
cctgatcaattatagaatttagcttggtaagtaatagaaatcctcgaccatggacaaggtactgtccaaggtttgccatgtgcgtctcctcctcttcttcctccctggcctccaccctctggaccactgcattgcaaagccggttgacatcggtcagaaattcacgtgccagtgagttactgtcggtgctcatgaccgagcagtctttcaccactgctgtgacatttacagtctatatcatttggactcataaactagatgaaacaaatattcttagaacaaagcttcacctggtttgtggcagctgcggccgccgcgcactcccccggccgtaatggccgaattcccgggcatatgtccggtaccgtcgactg

SEQ ID NO: 161597 - DNA, 53 bp, Homo Sapiens
cagtcgacggtaccggacatatgcccgggaattcggccattacggccgggcta

SEQ ID NO: 161598 - DNA, 55 bp, Homo Sapiens
aataccccggccgtaatggccgaattcccgggcatatgtccggtaccgtcgactg

SEQ ID NO: 161599 - DNA, 352 bp, Homo Sapiens
ctcatcttggagaaatgctggaacagacttgctcatccttttgagtttgtcagggtgagaaaatggattatcaggttgtgtaggcactgtggaaacatcttcagcactacgcactaattcttctggctgattatctacttgttgcttgatctgttcagaagaaattaacaaatggttaacatggctgacccttggagagaaaagaacaatgagattgtccctggaagcccgccggagattggaagcaattagtcaagatgcaatgaggggtgcaaccaagatgtcttccccaaaatactttccccggccgtaatggccgaattcccgggcatatgtccggtaccgtcgactg

SEQ ID NO: 161600 - DNA, 374 bp, Homo Sapiens
cagtcgacggtaccggacatatgcccgggaattcggccattacggccggggaacctgggaaggattttcaagccttggaaatggaggaagaagaaaagcgaaaagttcaaacacacgtcagcagccctggataaggaaaatatctatgaggcaaagcagagaagagctgataaagcgaggagtcctgaaggaaatctatgataaagatggggaactctctatatccaatgaagaggactccctagaaaatgggcagtccctgagctccagccagctgtctctgcctgccctgtccgaaatggagccagtcccaatgcccagggatccctgctcatatgaggtgctccaaccgtcagacatcatggatgggccag

SEQ ID NO: 161601 - DNA, 79 bp, Homo Sapiens
gctcttccctcttatacctgtgcctcctccccggccgtaatggccgaattcccgggcatatgtccggtaccgtcgactg

SEQ ID NO: 161602 - DNA, 757 bp, Homo Sapiens
  misc_feature (641)..(675): n is a, c, g, or t
ccacaagtttctgctcccttcgtctttcctttgaatcctggtgtgcaggaactagccttgttcagtggacttggggagaacttctcatgaatcagattctgcaaacagatgttcaccttttgaatctgggctaacggggggcgaccaggctctgagtgctaaatctgttagaaaattctagaggaggagttggaggctgacaacatggtgaaaacctgaggtcgtctgccactctattcctgtcaccacaggccatccctctcatctggatcccctcgtcccagtaccctcccaggcaggtgggaaaatccagtactctccaccgtccatctctttagcacatcagttcctccatctccctcaaatagcacaataccccctttcactactcttcatggagcctccctgtccatccctgccccattggaataatccaggccacaccctcatctccatggagtgatccaaatccctctgaatggaatgcagaccagcttcctccagccccaacaatgaacaccaacttcacacttggtggcatcctgtcattacgatgctgcctcccactcatgatgcctgaccattaactccccggccgtaatggccgaattcccgggcatatgtccggtaccgtcgactgnnnnnnnnnnnnnnnnnnnnnnnnnnnnnnnnnnncggccgcttcctcgctcactgacttcgctgcgctcgtcgttcggctacggagagctagcgccctatagtgatgaacagtctt

SEQ ID NO: 161603 - DNA, 850 bp, Homo Sapiens
  misc_feature (747)..(781): n is a, c, g, or t
cttcaagtcaccagatacatgtttcagggcattgtaatgctctccccctgattaatctgcgcgaacagtgctgagcgggaagcagactcggtttgtataaaacatggcggcatcatcaatttctttcacataaggccaggcttgggacccatagccacccagcccagggcctggatactttcgctgacagctgacaggtgattaaacaacttgctgcctcggttcttctcccgaaaggtgtatcacttctttgatctgctctgagatgggtgccacaaatcggaaagcttattttctgctggctgttgacactgagaagctgtaaccaacagagctcgctccaacgttcaaacctgtgtggaccatctccgcatgtttctgcacgtctcccccaatctctttactgatcttcaagtactctgccacaggaccagcaagcagcgagtcaaatgcctgcacatatggagctgctcctgcttttgaaggactgtctgcatacccacggtgcatgtcagaggtatgagatactgcctccaggcggcccactgccctctccaatctttctaccagattttgcatgtcagccataatggaccaccttcaatgttagcctggcttgtcaaagtaagagcagcagccgaggaggaaagggaggatatctgcctccggactgcgatcagccgctctccgcttccccccggccgtaatggccgaattcccgggcatatgtccggtaccgtcgactgnnnnnnnnnnnnnnnnnnnnnnnnnnnnnnnnnnncggccgcttcctcgctcactggaccttcgctgcgctcgtcgttcggtgcaaccggagctagcgcccata

SEQ ID NO: 161604 - DNA, 973 bp, Homo Sapiens
  misc_feature (81)..(115): n is a, c, g, or t
  misc_feature (175)..(256): n is a, c, g, or t
attatcgatcactataggggcttacgcttttttttcgaacgacagagcgcagacgagtcatgttgagcgaggaagcggcgnnnnnnnnnnnnnnnnnnnnnnnnnnnnnnnnnnncagtcgacggtaccggacatatgcccgggaattcggccattacggccgggaggtgaacannnnnnnnnnnnnnnnnnnnnnnnnnnnnnnnnnnnnnnnnnnnnnnnnnnnnnnnnnnnnnnnnnnnnnnnnnnnnnnnnngaaaagaaaatacaagaataacaaacttgacagtaaatactggactagattgttcagaaaagaccagagaggaggggaactttaggaaatcttttagcccaaaagatgatacttcattacatttatttcatatttccactggtaaatctcccaaacattcttgtggattaagtgaaaaacagtcaacaccactaaaacaagaacatactaaaacatgtttatcaccaggaagttctgaaatgtcattacagcctgatcttgttcggtatgataatacagaatctgaattcttgccagaaagttcaagtgtaaaatcttgtaagcataaggaaaaaagcaaacatcagaaagatttccacttagaattggtgaaaaatcaaatgccaaaataaaggatgaagatcatagtccaacatttgaaaattcagatgcacactgagaaaaatggtaaagaaggtaaacattaagaaaacattaatgggaagcataagagagggaaacagacaggcatcaaacagaatgaaggtggaaaggacaatacaaactaggtagtgcaagaacggcgaggggtgtggattcgtagagaatttggaaggagaattttttaaagtgtgaactgagattcctttaattggatgatcttacttgaaaattcgattggacactcagtgtataaccggagtgtgtgggggttaaggggacgtacgagggatttgg

SEQ ID NO: 161605 - DNA, 1013 bp, Homo Sapiens
  misc_feature (902)..(936): n is a, c, g, or t
ctaatttatagagacttaatattcatgttcattctacacagtattcaatttctatcacccaatcaaataggaatattagtcccatgaaaaagttccaaacattaaaaattaaattctgaaaccaatcacatgtgaaagctcattaatgataacatgacaaataaatagttaatcagcttttacttattactgctccaatgcatttctggcattccattcccaagcgagggtcagcatgccagggtataaatttcatactatgcgaccgtaaagagctacagggcttatttttgaagtgaaatgtcacagggtctttcattctctttcaaaggaagatcactcatggctgctaaactgttcccatgaagagtacctaaaaagcacctttctgaaatgttactgtgaagattcatgacaacatattttttttaacctgttttgaaggagttttgtttaggagaggggatgggccagtagatggagggtatctgagaagcccttttctgttttaaaatataatgattcactgatgtttatagtatcaacagtcttttaagaacaatgaggaattaaaactacaggatacgtggaatttaaatgcaaattgcattcatggatatacctacatcttgaaaaacttgaaaaggaaaaactattcccaaagaaggtcctgatacttaagacagcttgctgggtttgatcaaagcagaaagcatatactttcaagtgagaaaacagcagtggcaggcttgagtcttccaagcaatcaaatctgtaaagcagatggttactagtaagtctagttatgggagtctgagttctaactcatgctgtgcttgctggatttgctgcccggccgtaatggccgaattcccgggcatatgtccggtaccgtcgactgnnnnnnnnnnnnnnnnnnnnnnnnnnnnnnnnnnncggccgcttcctcgctcactacttcgctgcgctcgtcgttcggctgctaccgcgtagccctatatagtctaacatct

SEQ ID NO: 161606 - DNA, 973 bp, Homo Sapiens
  misc_feature (567)..(567): n is a, c, g, or t
  misc_feature (855)..(889): n is a, c, g, or t
tttccttggataggtttttataaggagatggcacagtggtgtatatgtggggtgccacttgttgaattttggtctttatcacacaggaactcatttgtgctcactgtgcccatttttggacaaaagcttggtacaagaacatcccagtagtgttggacaacatcattctttttccaaggttgataaactattgcatctaaaaaggtcattcaatggaattctgatggccaaaagttcatcaacagtaagaattcctttatcttcagcatcaggaaatgttgtgttatcaccagtgttgtaggaaaatgagacgctgtcaattgaataagtagatgctgccttggtaaaattcgcaatccaggaaaagccaggtccgaactgcactgctattttgggaccattctgatcatccccacaaatgcttccattatatgtcacagtgccatggtctgaaatggttacagttttataagttttatttgtagtttcatagcgtactgtgaaattcatctgccattttgcataaaggcaagtggcattttctgaatctgtcaaattaagttccantgcataagaccgcacagctcccaggactaggcagaccaggacgagccctgagcccggaaccgggaagaggcggaagcacaccatgaccccgcagagcaggcggcgacggcggcgacggcggcggtacaacaacagctgcaacaccagggaaaaggctcgctggacctgggtcaagagcactgatgaccaccgaccacagccttgcaaagccaggaatcggcgcttcagtgcgagtcccccggccgtaatggccgaattcccgggcatatgtccggtaccgtcgactgnnnnnnnnnnnnnnnnnnnnnnnnnnnnnnnnnnncggccgcttcctcgctcactacttcgctgcgctcgtcgttcggctgtaacgacgctagcgccctatagtgagtctatacacttt

SEQ ID NO: 161607 - DNA, 1007 bp, Homo Sapiens
  misc_feature (473)..(525): n is a, c, g, or t
  misc_feature (886)..(920): n is a, c, g, or t
  misc_feature (924)..(966): n is a, c, g, or t
cggtatttacttctggccttctctgtgctctcctgttattagacccctgattgggtctctcagcctcccctctgggcgttcgtccgcgagccgtccggtgttcctcgccgggcgctttttatttcgcgtgggagttcccgcccctttttctctgtcccccgttttccctttggacacccgctttgtgcgccctgttccccgtataccctactggggaccccgcgcccccaccgacaggggtcttaaacaccctctcctcagggtcccatagcgcggcccaccacagttgttgtgtgtcttgcgcgtcctgtgcgttgtcttctagtcgatggttgccccgtgttgtgaggtactcttgtttttcgttgtgtctgttctgtcttctgatatttttggttcttttgttttgaagtgtcctcttcagtggaactggatgagtaagaccctttccggttgttgtgtgtcaatttgannnnnnnnnnnnnnnnnnnnnnnnnnnnnnnnnnnnnnnnnnnnnnnnnnnnnttcctgtaatgcctgcaatttattcagttcttcattctcttcatcgctatcttcactacttgtactgctgacatccaaaactatgtcccttttagggtctactcggagaaaattgcggcattcaaaagtcaggtgaccagggtagccacattttttacagcctgctctgacactgtccttgttgcaacctgggactgccatgacggtggtaagaggggtaactcgagcctctggctttcgaaaaggcgcttgcttcccgccagctgtgagaacaaggcacagtcaaagcggcgttttccttcccccagcccccggccgtaatggccgaattcccgggcatatgtccggtaccgtcgactgnnnnnnnnnnnnnnnnnnnnnnnnnnnnnnnnnnncggnnnnnnnnnnnnnnnnnnnnnnnnnnnnnnnnnnnnnnnnnnnaataagacgctagcgccctatagtgagtctatacagtcttt

SEQ ID NO: 161608 - DNA, 870 bp, Homo Sapiens
  misc_feature (208)..(216): n is a, c, g, or t
gaaagccactgactttattgatctaaaaaactttacaaggacagtgactgttctgccaaaaaaggagccaaatggtatcaaacggattgaaagtgagggtgggggtgagggatggggccgggaatccattcaggaaagctggtaactgtcaccagggaactggcaagggaaaaaggacgggggaggcatgcaagagcgagaatccacnnnnnnnnngttgaaatggttaggggagaaaactcccaaagaccccggagtacgtcggaggtgagtacgacaatacaatcttttccttcgtagaggacaggggaggagtccctactcggctgcaaactctggatgagggctggggattgagagcttcccagagagcatcacaagaaggcgtcgcaccactctcgaaggcatccgaagcagtcccgggactgcttggcgttggcgccacaagtgtctttcagccattcccggaagaggtcttcatctttctttagcaccagaaactggccaaggacaacataggccttgtcaaaacccctttcctccagcttcttgcccaggacttcaccaatcccagccaggctccccactggcttctcccccatgggctctgccacgaagtctcggtgcttttgggaggttgtcatcttgatcaggcttaatctcaagccactagaactttcttccacttccgcttccgggtcgcttcaagagccgcctttaaaaaagaaacattccacgttgggcacttctagccagttagagctatagagttgaggcgccccggacccgacgcgtggtcgacgatatcccgggaattccggaccggtaccagcctgcttttttaaccaactgttcatagacaacatgcct

SEQ ID NO: 161609 - DNA, 581 bp, Homo Sapiens
  misc_feature (62)..(96): n is a, c, g, or t
agtgccaagctaaaattaaccctcaactaaagggaataagcttgcggccgcggctgtaggcnnnnnnnnnnnnnnnnnnnnnnnnnnnnnnnnnnngacagtcggtcacttttattctattgattattctcctgtgtttataatgcgggcggcagggtgggggtttctttaaaatgcttctcctgagcctaaagagcctccccacccagcccctgtctgagggaaggggtagagcatacacgcccccctggcatctctggagaggaagaaggatggggtgggcagaaggggctgcccccaaacggctccccaggctggcacttctgggcctctgccccactcagtccctgttgacctcccccaccccccgcgaaagaggaaccaaaaccagaaaagaacaaagcatcctccgccccggacccttggggctgggtctcccccagccctgccactttcctaccaacagcctcctctcctctctgggaatcttgtcccttcttccccatccccttagcaccggcctctgccctcgtgggcatctctggagaggaagaaggatggggtgggcagaaggggatgcc

SEQ ID NO: 161610 - DNA, 943 bp, Homo Sapiens
  misc_feature (355)..(355): n is a, c, g, or t
  misc_feature (433)..(494): n is a, c, g, or t
  misc_feature (868)..(902): n is a, c, g, or t
gtggcaggtccaaccctcgcggttttaatttcttattgggccttaaattttccccaggttgtaaaggaacaattttataccccttatttaattcccggccagaaacgttgaaggggcctgaattattaaactggaatatgggggtagccattccaggttaaagtattcagtgtggaggctgggaggtatccaaaggaaaaatattttattcaaagtttcccaaaaacaaaccttgaggaggtatggctgggttggaattgaagaaaaaaagggccaagttaaaattagggaaaacaaaatggttttcatttgggtggcaggtgaaaatcaaaggtatacatgtgtatacattctnaatccgtcatctatcccatgtggcattttccaaggttttaagagtctaccaggccaaaccctttgccactttcactgnnnnnnnnnnnnnnnnnnnnnnnnnnnnnnnnnnnnnnnnnnnnnnnnnnnnnnnnnnnnnntggttcatccatattgggtactgtccatgctggtctagaagagtctttttgtttctcttaatatcagtctccattttcatgtcatctttttcatcttttacctcacattgcattttctcttggcaatgtttgggtttgggtaccaccacagttgctatctcttgaacatctttcattaaaacatcaccgtctagtttgagaatacttttaagcctgctggcctcctttggggcattcttttttctcttttcagcacgcatctttcttttccacttactccgtaagcttttagccatgttttacctgagaaacgaacacccacccccggccgtaatggccgaattcccgggcatatgtccggtaccgtcgactgnnnnnnnnnnnnnnnnnnnnnnnnnnnnnnnnnnncggccgcttcctcgctcactgacgtcgctgcgctcgtcgtt

SEQ ID NO: 161611 - DNA, 604 bp, Homo Sapiens
  misc_feature (42)..(80): n is a, c, g, or t
  misc_feature (83)..(117): n is a, c, g, or t
  misc_feature (334)..(334): n is a, c, g, or t
aaaactggaattagatcatatagggcgctacgcgtctaaagnnnnnnnnnnnnnnnnnnnnnnnnnnnnnnnnnnnnnnncgnnnnnnnnnnnnnnnnnnnnnnnnnnnnnnnnnnncagtcgacggtaccggacatatgcccgggaattcggccattacggccgggggatccccagaagtgatcctgggccacccctacgacgtggccattgacatgtggagcctgggctgcatcacggcggagttgtacacgggctaccccctgttccccggggagaatgaggtggagcagctggcctgcatcatggaggtgctgggtctgccgccagccgntttcattcagacagcctccaggagacagacattctttgattccaaaggttttcctaaaaatataaccaacaacagggggaaaaaaagatacccagattccaaggacctcacgatggtgctgaaaacctatgacaccagctttcctgggactttcttcagaaggtgttttggtattgggaaccttctttttcggcattgaccccggaccagggccttcaagcatgttttggatttcattcagttttcggaaccttaaagccacagcccatt

SEQ ID NO: 161612 - DNA, 924 bp, Homo Sapiens
  misc_feature (23)..(23): n is a, c, g, or t
  misc_feature (48)..(48): n is a, c, g, or t
  misc_feature (61)..(61): n is a, c, g, or t
  misc_feature (81)..(81): n is a, c, g, or t
  misc_feature (274)..(280): n is a, c, g, or t
  misc_feature (826)..(861): n is a, c, g, or t
aagccaacaggtaaacatgctancacagcctgcagaaatcgtcaggtnttaacttgttttntaagaaaacaaccaaaacanccaaaaataccatgacccggtacaggaaaaacaggaagactcaagtgaatactagagctgcaagtgtttcttagaattgaaacaaaaattgtttttttccaacttgttcaaatttcctctaagtgcaggtgagaaaaaaagcaaatatattaagtcaaccaattatttttttaaaagtgcaatttacctttannnnnnnaaataaccaattaccacacacttgaccctaaccccaaccagatccccaaagcaaaatgtgtagagagacaagggtggtgatggaatgacctactttgtgatgtttttacgctttacaaaaagcagatttggtattcagaaaagcctgcaaatacaacattgcttaagagaacctgtaaacacgtttggaatacaatgcaacacaagtcagcaaggacaggggtaggtccaaaggagccagctagggggaaaggtgacagaaaaggagagggaaggatggagacagacatcgcctgtggtctctaagggggccatgtgtttaatttataaggtttcctccccacaggagttctgatgtgatctatcgttcataaaacacatttctcctcttgcaaagtagaatagactttaagtttcccaatgactttttgagtttatagggcctctttctatgtagtgtgtctttagaaataattggacaagaaaaaaatacggtcccggccgtaatggccgaattcccgggcatatgtccgctaccgtcgactgnnnnnnnnnnnnnnnnnnnnnnnnnnnnnnnnnnnngccggcttccttcgctcactgctcgctgcgctcgtcgttcgctcaaggtgccctaatatggta

SEQ ID NO: 161613 - DNA, 1274 bp, Homo Sapiens
  misc_feature (1165)..(1199): n is a, c, g, or t
ctatctgcttacttcttgaagaggatggcaattcatgtgtggtgctaatggatgtgtataaatggacgaaacttgcaacacctaacatgaggaccagcgtgatatacatttacacactgacacgtgatctgcttacgggggaaaacaagtgcaggagtcagtctgtatctgatgatccaggggacatccaagctatgacaagcaagagcccggtatgcgctgggaacagctggaggatgcacggtggctttgaatgctggtgacaacttggacctaaaaatacttcatgatcttgaaaagctaacagacctacccctagggaaaatgtgcctgcagcccccgggtctgtcaggagactgagcagttctcacattaacattctgcttataaatggtaggacatgggaggatgctatgctcgttatgttttctcgcttggaatatctgctgctctggtcctctttgctcatccacattttttgaatatgccaaaaccccagtcaaatgtccgctacctcctccagggagcttcccagtcagaatggttctctcttccttgttgcctccaaatacacatgcctattagttcggactcgcttcactcctctatctccccatcagatggccagcttattgaggacaaagagcctttccagcccatctctttaccacacccccactgcttcccacggtgttttgcacgtgacatatgcttgggggttccaagacatatatcccattactaccttggccgtaatggccataggaattgtcgggcatgtgtggggtagcttcgtctgagtttgctgagcccaaatgtttggccaggctagaatggaagaactttggagaaaatctggagaatccagagggtcagtatgaattcagcaggaaggacagtggtccctccgacagcctcctctggatctgctctgcttcagctgctgtggagctggtgtgcatgggtggcccaaaggcagggacaagacatgctcatatccttggaagtgttttcccttccggttctatggagactcccagctgtctgaaacttcaagtgcccaaactcagtgatgcttttggtttggcccaccagagcagctgtagctatggcccccggccgtaatggccgaattcccgggcatatgtccggtaccgtcgactgnnnnnnnnnnnnnnnnnnnnnnnnnnnnnnnnnnncggccgcttcctcgctcactaccttcgctgcgctcgttcgttcgctgcaaagggtaccccatatagttgtaatgt

SEQ ID NO: 161614 - DNA, 999 bp, Homo Sapiens
  misc_feature (28)..(28): n is a, c, g, or t
  misc_feature (39)..(39): n is a, c, g, or t
  misc_feature (41)..(41): n is a, c, g, or t
  misc_feature (80)..(80): n is a, c, g, or t
  misc_feature (126)..(126): n is a, c, g, or t
  misc_feature (165)..(836): n is a, c, g, or t
ttagcaccaattcagacttgacacgccnactactcgctntntatctgtacagtgctgtccagtgcgatagtcttctaccnggtggactcagacgtagtaccgatagcgcagcgtcggctgaacggnggtctgcacacagccagcttgagcgacgacctacaccgnnnnnnnnnnnnnnnnnnnnnnnnnnnnnnnnnnnnnnnnnnnnnnnnnnnnnnnnnnnnnnnnnnnnnnnnnnnnnnnnnnnnnnnnnnnnnnnnnnnnnnnnnnnnnnnnnnnnnnnnnnnnnnnnnnnnnnnnnnnnnnnnnnnnnnnnnnnnnnnnnnnnnnnnnnnnnnnnnnnnnnnnnnnnnnnnnnnnnnnnnnnnnnnnnnnnnnnnnnnnnnnnnnnnnnnnnnnnnnnnnnnnnnnnnnnnnnnnnnnnnnnnnnnnnnnnnnnnnnnnnnnnnnnnnnnnnnnnnnnnnnnnnnnnnnnnnnnnnnnnnnnnnnnnnnnnnnnnnnnnnnnnnnnnnnnnnnnnnnnnnnnnnnnnnnnnnnnnnnnnnnnnnnnnnnnnnnnnnnnnnnnnnnnnnnnnnnnnnnnnnnnnnnnnnnnnnnnnnnnnnnnnnnnnnnnnnnnnnnnnnnnnnnnnnnnnnnnnnnnnnnnnnnnnnnnnnnnnnnnnnnnnnnnnnnnnnnnnnnnnnnnnnnnnnnnnnnnnnnnnnnnnnnnnnnnnnnnnnnnnnnnnnnnnnnnnnnnnnnnnnnnnnnnnnnnnnnnnnnnnnnnnnnnnnnnnnnnnnnnnnnnnnnnnnnnnnnnnnnnnnnnnnnnnnnnnnnnnnnnnnnnnnnnnnnnnaagaattcggcacgaggccgaattaatgcaagttgagcttcattgaactgctctttggacatcatttcgttgaagtcaacaacagggaggttaatgattttttctacagggaatgggatatgcgtaggaggggtaagaataaagtggctgctcagaattgcag

SEQ ID NO: 161615 - DNA, 789 bp, Homo Sapiens
cgcgccaggaggtagggcgcgtcggcggagatgcgccagcgaccaggtgggccccgggcacgacgcgtgggagaagcggcgggccaagtgcctagcttatatatcgagctcgacgtattagggacgcacaggtaggaccaggaaaaagccggggtacccggtaaagccgtggcgcccccgaagggatacctctagagcgcgcgcccgtgtggggggggtggtgggttggtagaaatcttacaaatcatagtttgccagaaaaggtttcacaattgtttaaagaaggagtctctcatctccctcacatcatgcgacctggcttgtcctttggcctggcgtacatcatggcagggatctctgaagacactgtgtccaggggctgccagtgacagtccatcagagcgtcatacagctcctcactctgttccatgaactccttgttggcctcagtcacatccagctgtggcatggggtcttccaatgcatcatctccaacttcttcatatgtctgcatggtgctctgggtatagccatactgggggtaactgtagctgtagctgcctgtgttctggtcatagccccactgagcatagtagttctggtactgctgataatactggttgtagctataactgtacatctgactatattccactggctttacacggctcgctttagggattgccacgctcagccgcacaggcttagaccccagcgacgcgtgggtcgacgatatcccgggatatccggaccgtaccagcctgcttttttaccacttggttcatatcc

SEQ ID NO: 161616 - DNA, 980 bp, Homo Sapiens
  misc_feature (531)..(531): n is a, c, g, or t
  misc_feature (870)..(904): n is a, c, g, or t
acttgtttaccggcaagcccacttaactttagatctaatgtcccatctcaaataatgacacgtttaagaattaaatgaccactttaaaaaattaacccaaaatataaaggaaaaaattgttggcttccttctaaaacctgttgaatagaaattaatgcccaaatattacagtttctcactttcctatgaatactgcactgtttatttcatgtttatatgtgagtttctatgcataaaaatcccagtaagactgaatagtttaaagatcagtccatttttctccgacagacccctaacttctagattttaaaaattgcactcttgcttttgcattttagtacaaacgatacacaaatatatttcttttatatcagtgcaaccagttaataggcatgttattttttaaaaagtaataaattttgtgaatgttgtcatttttaaaaatcctatacagaatcacaacactgtcagaatctatgtagtgcacccacaagtgccttattgttttgaattcacagtccttttctcacnaaaaccttaagagttcaaagaattcataatacacaccatgtggataatttggggttaaaaaacccatggctctgggcaacaacaatgacagttaataacatccacccacaaagactgtttctaaaattttcaacttagtttgctataaataaaccattctgaagtaaagccttttgcacactgacaatacttatcagacatcagcgaggccacagtgaaggggagtgacttacattaaaaggacagggtagcagctggttttgggatggcacacctcgtacattctgccccggccgtaatggccgaattcccgggcatatgtccggtaccgtcgactgnnnnnnnnnnnnnnnnnnnnnnnnnnnnnnnnnnncgccgcttcctcgctcatagactcgctgcgctcgtcgttcgctatgcacgggcgccctatatgatcgatacgactg

SEQ ID NO: 161617 - DNA, 1081 bp, Homo Sapiens
  misc_feature (29)..(29): n is a, c, g, or t
  misc_feature (118)..(546): n is a, c, g, or t
  misc_feature (583)..(601): n is a, c, g, or t
  misc_feature (1001)..(1016): n is a, c, g, or t
ccgtacccagtcgacaggaccagagactncagggacgctgttctatatcttcggttccacttgactgactcgattttgtgctgtcaggggcgagcctatgaaaacccagcaccgcccnnnnnnnnnnnnnnnnnnnnnnnnnnnnnnnnnnnnnnnnnnnnnnnnnnnnnnnnnnnnnnnnnnnnnnnnnnnnnnnnnnnnnnnnnnnnnnnnnnnnnnnnnnnnnnnnnnnnnnnnnnnnnnnnnnnnnnnnnnnnnnnnnnnnnnnnnnnnnnnnnnnnnnnnnnnnnnnnnnnnnnnnnnnnnnnnnnnnnnnnnnnnnnnnnnnnnnnnnnnnnnnnnnnnnnnnnnnnnnnnnnnnnnnnnnnnnnnnnnnnnnnnnnnnnnnnnnnnnnnnnnnnnnnnnnnnnnnnnnnnnnnnnnnnnnnnnnnnnnnnnnnnnnnnnnnnnnnnnnnnnnnnnnnnnnnnnnnnnnnnnnnnnnnnnnnnnnnnnnnnnnnnnnnnnnnnnnnnnnnnnnnnnnnnnnnnnnnnnnnnnnnnnnnnnaagaattcggcacgagggggggccgcggctgtaggcnnnnnnnnnnnnnnnnnnnggttttcttggcatgactaagaagcttaaatgttgataaaatatgactagttttgaatttacaccaagaacttctcaataaaagaaaatcatgaatgctccacaatttcaacataccacaagagaagttaatttcttaacattgtgttctatgattatttgtaagaccttcaccaagttctgatatcttttaaagacatagttcaaaattgcttttgaaaatctgtattcttgaaaatatccttgttgtgtattaggtttttaaataccagctaaaggattacctcactgagtcatcagtaccctcctattcagctccccaagatgatgtgtttttgcttaccctaagagaggttttcttcttatttttagataattcaagtgcttagataaattatctnnnnnnnnnnnnnnnngcctacagccgcggccgcaagcttattccctttagttgagggttaattttagcttggcactgccc

SEQ ID NO: 161618 - DNA, 513 bp, Homo Sapiens
  misc_feature (61)..(84): n is a, c, g, or t
  misc_feature (210)..(245): n is a, c, g, or t
  misc_feature (271)..(299): n is a, c, g, or t
  misc_feature (302)..(318): n is a, c, g, or t
gtgccaagctaaaattaaccctcaactaaagggaataagcttgcggccgcggctgtaggcnnnnnnnnnnnnnnnnnnnnnnnnagcagctgcttactgttttatatggtggataaagtggacaacatccagcgatgggtggcaagtctagaagagaaactgtcagttggtggaggttctgtgggtggtgctcccttggagttaacaggnnnnnnnnnnnnnnnnnnnnnnnnnnnnnnnnnnnnctctctttctttacagtatattttcnnnnnnnnnnnnnnnnnnnnnnnnnnnnnatnnnnnnnnnnnnnnnnnaagaggcactgattgactgtgggggtgatcaaagaaggtgacatatgagccaagccctgacaggtgagaggacagaagggatcccaggctcctgaaactgagcacatccagtcagcaaagggcttggtttagcagaggaagagaggcagctccagaagcatggtgagtgaatggagaatgaggctgaggaggcag

SEQ ID NO: 161619 - DNA, 839 bp, Homo Sapiens
  misc_feature (49)..(49): n is a, c, g, or t
  misc_feature (708)..(767): n is a, c, g, or t
ttcccctcccctcccgcacctagtacactatagaaccagtgttttaaanaaagcaggctggtaccggtccggaattcccgggatatcgtcgacccacgcagtcgcagccttttcttaaaatgcaagattctcactttgaaggttttgtgttggaagaaatgctactggtttttaaaaagcaaagcttaactaactagaattattagcttttcttgagacagctttctgtgtcctcattactctgctctgtgtgagtgttactagaatttgtgaaatactgactgagcccttcacttatcttttctaaagcagcacctttggacacctcattctgggaagcctgctcgagtcatagtaaaggacacacgctttatgtggggagaagtggtaaaaatggagttttgtcttaattacatgaaactaagctttaaaatattttataacagattatttgagctgcataatctaaacatgtcaaacgttcagtgggactatttttatatatgtatatgtgggtgtaggtcataacatttcagtttataatataaattgttatttcagtttataagctatctctcagaggagactagctcttttgagaattcataattctcacacgttttagactgaagtaaaaatgcaacactagatactagtgtaacatcagatatcattgagggctatatggcagtaaacctgctagtgccnnnnnnnnnnnnnnnnnnnnnnnnnnnnnnnnnnnnnnnnnnnnnnnnnnnnnnnnnnnnagagatcatatgtttgttcaattaccatttagagttggtttgggaataaatatcctccaaaaagggatttat

SEQ ID NO: 161620 - DNA, 718 bp, Homo Sapiens
  misc_feature (601)..(635): n is a, c, g, or t
  misc_feature (639)..(678): n is a, c, g, or t
gggtcaactcaacctgggttttactgtcctaagacccaatctgaatttaaagagaccccaactcttcacaccaattaaacccacatatattttatataagaaagatataaatgaagatgtctccatatattcacagatattcctttaagctctatctcacagccattggaaaagccacccctccaatgaaattaaccttttccacccttggttttccaggatataaaccaattaaaattagaacacactaaaagctgcactatagttcatgacatctgcatgccacacaaaaaatcaaaatgtagtctcacataggctgatcatactagagtatatttattaaatttcaccattatgatcactttgttataactaaattaaccctgacataaactttgacattttaaaaacagagaacatactgatttttcaactattttacttacatgagttttttaattctcatgcagtgctcataattaggagatactacatattcaccctcacattatgcttattaagaaccaagctcagagggtagaaaagtgcccccggccgtaatggccgaattcccgggcatatgtccggtaccgtcgactgnnnnnnnnnnnnnnnnnnnnnnnnnnnnnnnnnnncggnnnnnnnnnnnnnnnnnnnnnnnnnnnnnnnnnnnnnnnnctcaaagagctagcgccctatagtgagtctatacatcttt

SEQ ID NO: 161621 - DNA, 1242 bp, Homo Sapiens
  misc_feature (73)..(107): n is a, c, g, or t
  misc_feature (544)..(579): n is a, c, g, or t
ctgaattgagctctatggggctccgctatatcgaacgacgagcgcagcgaagtattgagcgaggaagcggcgnnnnnnnnnnnnnnnnnnnnnnnnnnnnnnnnnnncagtcgacggtaccggacatatgcccgggaattcggccattacggccggggggcccacttggaccactataaaaggaagcaatgggcacctggacatattagcaccaatttcactaccctgggtggaaaacaaaaatgtctgtcctctaaaccacatatcctcatatttccccggtccataaatgaaattcccttccaccagtggcctgtctcttcctctttagtgattcctaaatccctatacccctgtctctccttggccagacacactgcctgagaatgactcttctaaggactctaacaaaatcagatggtcttatagctgcatttagcatatatataggtgacctaaacatattttcactaatttttatacacttaaaagttcctgtaaatacttgtattctaaccttactctctaagtgacttgcagctcnnnnnnnnnnnnnnnnnnnnnnnnnnnnnnnnnnnnacgagtatcaaaaagactggaaaatccatagagacagtacatttagtgttcgccagggtctgggcaaccacgggcagcgcaatagaggaaccgctaacagagcatgcacttttcgggcacggctggcacgggcggtaggggactcatgcatcacatgttctggaactcgtgatacacagttgtgccaatgggcaaagcactgggtggtacttttcaaaggacctaaaactgtcactggtatttctgaaatacactattcttcacgttctttagaaaattaccttcaggaaacaaacagcccgggccggcacaactttcacaggtgtcctcagaacaagaacttcctcctttggcattggctaaaaacccctcctttgggcacttgcccctgcttggtggccattgccctagaactcctttgaggaacacacagggcctacgcaaagacaattcgaagctcactctcaacgtacctaccttcggagaatcacatcgagccgctaactctttggccacaaacctctacaagaacacagttacccacagccgcattgatcattctggaccatcggaatatcagtcaccgggctagactaacattacgcgatcggggacgagcgaaacacagcctacaaatctacggcagagtgcgcccagcaagag

SEQ ID NO: 161622 - DNA, 948 bp, Homo Sapiens
  misc_feature (823)..(857): n is a, c, g, or t
ccaagtcaccaggttcgcaagacatttgttataagacccatcttatattttccatgcaggaaaattgttgcgaccaattttatttcgcctctatatactcccgtgatattacccgctttctcaagcgaaccactcttcgaattaatcttagacccagtaaattaccaccagtgctgtcccaaaacagacttggcttaacaccataatttagccccctggtccccccgccctcgaattatgaaaatatcttgttatcgccgtttttataccctgagaggccttcccaaacactgctgctttaccgcggaaaatcttctcaaactccctccatagtgcccccttaccttacccgagtcaccttaatgggcatgttaaacactaattcgcaccattctcatttcaatggcgacttctacaatattaaacacaatcaaaaaagatcatacagcatcaaatcagcatcagatctcccagaaaaacacagctggaatgttcacttacaaaataaagatacctaatactggcttaacagcacattttttaaaggaattttaaaaagcaaaaatgagaaaaatacaacgaaagagcactggtgttttttatacaaaggttcatgtacaagctttaaaaagtaccttaacaggtacatatgaaatatacagtttatcttacagaacatttaaaaaaatgtttttggagtccattttaatgccaccctgacccatggtaattgttttgaaatgttggtggcacctgtgctctgtgaattggacccggccgtaatggccgaattcccgggcatatgtccggtaccgtcgactgnnnnnnnnnnnnnnnnnnnnnnnnnnnnnnnnnnncgccgcttcctcgctatattactcgctgcgctcggtcgttcgacataaataaataaaaaacagcccccgccggtgggggggcgcccaccta

SEQ ID NO: 161623 - DNA, 734 bp, Homo Sapiens
  misc_feature (144)..(204): n is a, c, g, or t
acgtcgggcagcagctcaacttctggcggcattggttacacaccaggtgcccggcctggcactgcagaataggaggcaggacatagtcaaagcagaccggacactcgaagagcgaggtcagctcgtggtgctgcggggacaccnnnnnnnnnnnnnnnnnnnnnnnnnnnnnnnnnnnnnnnnnnnnnnnnnnnnnnnnnnnnnacgagccggggcccgcaagccgagatggtggcggcgagccggggggcgcagccggggacggagtgtgctgggggctgcggcggcaggctgcttgctgcagggtttaattagcgctggggccggtggaggacagggcggctcatcgcgctccgaaccaaccatggaactgcgggcgcctgcctgccgcggggccgcccagggtcaaaggcggtgcgcgccccgcgggcagcgagctccgaggcaacgccacggcagcccagcccaggtccgggcggcggagacgctcggcgcccggcaggcggagggctggaccgcgcatgatgcactccgcagcccccggcgttccgagcacgcctccgcgtcggaccccgcgcggtgccctcctcccggcggcgtcccgggccccgaaccccagcggtgcgcagagcctggcccacccgcttctggaacagccgctgacgcaagccccgggggcgcgcccccggccgtaatggccgaattcccgggcatatgtccggtaccgtcgactg

SEQ ID NO: 161624 - DNA, 645 bp, Homo Sapiens
  misc_feature (41)..(86): n is a, c, g, or t
  misc_feature (90)..(124): n is a, c, g, or t
  misc_feature (532)..(566): n is a, c, g, or t
aaagtctatcgactcacctatagggcgctccgtcctgtcannnnnnnnnnnnnnnnnnnnnnnnnnnnnnnnnnnnnnnnnnnnnnccgnnnnnnnnnnnnnnnnnnnnnnnnnnnnnnnnnnncagtcgacggtaccggacatatgcccgggaattcggccattacggccggggaaaattctggaagtagaggagataggaatgggtggggcaagaagaccacattcagaggccaaaagctgaaagaaaccatggcatttatgatgaattcagggtaattcagaatggaagtagagtaggagtaggagactggtgagagaagctagagtgataaacagggtgtagagcaagacgttctctcaccccaagatgtgaaatttggactttatcttggagataatagggttaattaagcacaatatgtattagctagggtaaagattagtttgttgtaacaaagacatccaaagatacagtagccccggccgtaatggccgaattcccgggcatatgtccggtaccgtcgactgnnnnnnnnnnnnnnnnnnnnnnnnnnnnnnnnnnncggccgcttcctcgctcactactcgctgcgctcgtcgttcggctgcgacgagtagcgccctatagtgagtctatacatt

SEQ ID NO: 161625 - DNA, 515 bp, Homo Sapiens
  misc_feature (396)..(430): n is a, c, g, or t
ctgaataagctcttgttgcctttccgtaagttcttgaatttgaatttctactgcatgtagctcactggttatagaatccagttcctcagttagagctgaaacggacgccattctttttctttccaaatttgtttctaaaataatccaaatttctttcaacaaatggcagctgctaataaacaggctttggtggccaatcctcctgcatggaaaagaatggggagatcagaagaccggtcagcaggcgaacgtgcccctaaaggcccgagttctcagagcagggcagtgattaactttccggtttctcctccgccaatgtgtgggcgaaaggaagtgatccgctaccccggccgtaatggccgaattcccgggcatatgtccggtaccgtcgactgnnnnnnnnnnnnnnnnnnnnnnnnnnnnnnnnnnncggccgcttcctcgctcactacttcgctgcgctcggtcgttcgctgcggccgagctagcgccctataagtgagttataactctta

SEQ ID NO: 161626 - DNA, 1415 bp, Homo Sapiens
  misc_feature (1341)..(1375): n is a, c, g, or t
ggtgttggcgtggtttgttgtgatgcttggatcgagagcggagtcgagtcggctgtttggggtgggggggtgcgtcgtggtggtgtgcggctgctcgtattagccgcttggtgactcgtgtcctcacttgcggtgggtgggttgtgcgctgcgtgtgtgtgtgtagctgtgcttgagatgtgcctgcgtgtagaggcccgtgcacggttgccgtgtgcccgggtctgctggtccgttgatcccctgggcatgttgttggtattgttatgtgggctggtgcgttccgatgttagcgattttgttcggactgtggagtgtttgtcgctgggtggggttattggttagtgccctgtgtccttcatggggaagagtaatgttgaaccatggttttccgcggctccaggtatgggcccagcatggggagttgggtcctggcgtgcggtatactctgctgttcatgggaggatggtacatgaggatacccattaatgtactggctgcgccccttggtgaccttttcagaggaagttgtaacacagaagcttggacatctgacattctcgtctgtgtcgtcaatccagccttcaggcggtccaccattcaagggacatgaaattccttccttccaagggagttcgatctgtggtagttcaatctctttccaggcgagggaggtgtgttagaacctagtacttcccaaaggtgaagtgaatacgtgcctctctctaaattccacattggctaagtaaatatcccatgtgactgtctatatgatagttgacatgacccccatgtttcccagaccaacaccgtcccttctctagaccaagcatcttcaggtcccagtgctcatgggacctaatccccaaccaccccagatacacaccctgtttatgcccatgggggttaaaccctgcataaggtgctaaggacagacctgggtagaggagaacttcacctcatgtgccgtgttccagcaggaaggtcaatctgcttgaaaactgcctgaggttacagcagttgtgtgggccgcccagtccacaggtcctcttcccaatcctccagagaaaatggggcactatttccatcgcaatgtctccattcctgccctcagccaggacacctgccttgttttctcgcagcctctcctacacttttttcaaactcccttctcagatccttcctcttctatgggtctactgctactgtgcacctctttgctgaaagtaggagtgggtcattgctcttaaacagttaccttataacacatgaggaactgacgctcgggcccccggccgtaatggccgaattcccgggcatatgtccggtaccgtcgactgnnnnnnnnnnnnnnnnnnnnnnnnnnnnnnnnnnncgcccgcttcctcgctcaaatgacctcgctgcgctcggtc

SEQ ID NO: 161627 - DNA, 1152 bp, Homo Sapiens
  misc_feature (477)..(585): n is a, c, g, or t
  misc_feature (593)..(601): n is a, c, g, or t
  misc_feature (1036)..(1070): n is a, c, g, or t
gttgtattcgtcatctgagagtgttttctcccgtatataccgcaactcttatctgttggcatcttcgttttccctattctacagtctcttaccattggggaccattaatccggtttcttgtaatgcatggcttctctggtgtcattcctgtagactttccgcacttgtctataagtctgtgttaatttacgtgtatagttgcggttcttctacaccctgtgagtattgcttcgtatactcttccctttggtcttccccatagagggcatatgatagtaaatgttcataaggctgaccacttgggcttattctggtcaattccagcacttttgggatgtccaagcgtgcaaatctcgtctaatatgccccgaatacgttcgagaatcgcgcctggcccacatttcgataccctgtctctacttataaatatcatactaatacctgaattagctgggttatgatggcacattgcctctnnnnnnnnnnnnnnnnnnnnnnnnnnnnnnnnnnnnnnnnnnnnnnnnnnnnnnnnnnnnnnnnnnnnnnnnnnnnnnnnnnnnnnnnnnnnnnnnnnnnnnnnnnnnntctgtccnnnnnnnnngatgttaaaggaaaaatctgaggcgcgattcatgaagtttagtgttccagtggcaaaatgtcacaggcaagtatttattgggaaaatgtggaagcaaaataaaggcaatcggttggttttcaattacataattgttttttgggggtaggtatcttcttagaaagtccctagtcacctaattatatgttagtaggctgcttgtgattggctggggttgtcttatttctaacataagcatttaccagaaatgatccaagttaagttttgcttatgcttgtatgtagtatgaccccgtgaagttttgcttgtgtttgtagtttaagcaagttaaagctatttctaagggccaggtggttttgtttgctcaggatttttccagtctcccccggccgtaatggccgaattcccgggcatatgtccggtaccgtcgactgnnnnnnnnnnnnnnnnnnnnnnnnnnnnnnnnnnncgccgcttcctcgctcacagactcgctgcgctcgtcgttcggctaactaagagctggcgccctatagtgatctatacagtca

SEQ ID NO: 161628 - DNA, 214 bp, Homo Sapiens
tacttatttatgctgtacaaaattttacaaggtaaaggaaacacaattgcacacagacatttggctcagttgataagtaatatgacctacgaatctaataaatactcacaatatatacattaagaaggggaaacggcagacaattgtattccactatattttcccacgcgtccgcggacgcgtgggtcgacgatatcccgggaattccggaccc

SEQ ID NO: 161629 - DNA, 353 bp, Homo Sapiens
  misc_feature (58)..(76): n is a, c, g, or t
acttgggggttttttccccgggggaaccaccaccggggtggtttaattatgggccgtnnnnnnnnnnnnnnnnnnngggggaaagaacccccagggccatggtgggagctttcgatttggtttgggttccccgtcccgttcccccccgcggggaggacggctccagcaccaggctttgcgcgcaggtcgagggccgaggcgccgctgcttgcaggcggctgcggtggagcttgcggcccggcacttagaggggcgcgggcggcgatgcccccgctggctcccaccttctggcctgccggacgcgtgggcggacgcgtgggtcgacgatatcccgggaattccggaccggtacc

SEQ ID NO: 161630 - DNA, 745 bp, Homo Sapiens
caggaaaaattttttatgggtcacatctttggggatggaagagggacaggaataggctacctaagacaatagacctgatggtcttccctacccagaggcttcctgagttatcacccctgagagaggaagaacacgatctctctccttaaggcacccagataagagtacaggcaaactcttcacttgcaccagtgccatgggtgagggagcaggcattaagaggcagaagaggccacagccctgtaggcactgggtactccctgctaccataccctgaacccccggcagttgtccctgaggtctggggagtagcagaacccagtgtagaagccagcagacccagtgatgcccttggagaccctctgctgccattcccttattctctgtgggttttgagaggttcgtttgctgccatttcccacgaagggaaatgcgtggagccatcaggcgtggatccattctgaccacccagacctggacggtgatacaacccggtcactgtattcccgtagaacccccacgccagctggatgcccaggagactttaacaccaaccactagcagcagcagcttgaagagggtcacgcgcatgtcctgcgcctcccactcccgcaagaactcgctgcccagcgcgcccagcaccgtggccggcagagcctgcaaggcctgcccagaccaggactccgccatgactccccggccgtaatggccgaattcccgggcatatgtccggtaccgtcgactg

SEQ ID NO: 161631 - DNA, 771 bp, Homo Sapiens
  misc_feature (72)..(72): n is a, c, g, or t
  misc_feature (466)..(527): n is a, c, g, or t
  misc_feature (656)..(690): n is a, c, g, or t
  misc_feature (693)..(731): n is a, c, g, or t
gaaaatcagaaaaattgatttcaaagtttatataaaaaatgagcaagactaattggaaaattataaacaacngacacttaacagaaaattatccctaccacaagcgtacagcaattttaagactacaataattgaaacagtgtggtaccagatcaacagttcatcagatagccttaaaagtccagaaaccaattagcaacgaatcagtaaagatggattatataacacatgatattgcaataagtcaacaaccatctgaaaaaaattaagttggatctctaattcatattttaacagcaaaataaattccaggtggatgaaaaaaacatacaaaataaaccataaaaccactagatgaaaatacagggcatttaaacataatctcaaagagctaaggcttttctacctgtgaaacaggtagaacacagaagaaaaaaatgaaagactgataattccacctgcattnnnnnnnnnnnnnnnnnnnnnnnnnnnnnnnnnnnnnnnnnnnnnnnnnnnnnnnnnnnnnncacagttcagactcatatcacaatgaccatttctgttataaagagttttaacaatcataagaaaaagacaacccaccccccggccgtaatggccgaattcccgggcatatgtccggtaccgtcgactgnnnnnnnnnnnnnnnnnnnnnnnnnnnnnnnnnnncgnnnnnnnnnnnnnnnnnnnnnnnnnnnnnnnnnnnnnnnctcgacgagtagcgccctatagtgagtctatcagtgcttg

SEQ ID NO: 161632 - DNA, 940 bp, Homo Sapiens
  misc_feature (821)..(855): n is a, c, g, or t
cactcctagataagactcagattctatttcttccaccaaatcctctgatgctgaacgctccttattttggaaataaattttcttggtcagtctgtatcatagggctttctgaataatcttttcattagctgattctggaaatgtagatgaccttaattccaccgatattttgtgttactttctgttctgtttcatttgtttttgaaatatgtttagcaaaatttccactaggaaaattagctatttgttcagaattttctgagcctgtgtctgttttggcacaagaatcctcacctccaccatgatctggaatataattttcctgggcttcaattcgattattatgctcattaggttgacataaagttttatcagtgtttaatgacaatagtttggactcattttctaatttgctgctttcattgccagaaaacaagttgcatgagtcttcctttaattcaggtgttttcccaacatttttatcagaggaagtagaggctatgtggtctgtctctgacatgctgactggcaccaattcactttgtaattcttcaaatctgctcctgatcttcgttttacatcccacttatccaagcctcaggccacgccctaacaaggctgctggagctctggctcaggggccaacttttccatagcggggtccaaccagccaagagtgggaggaaaagaccgcggtgagaaacacagccgatgcctcactcagcggccgtttccccaacccctgcggagctgacacatcaacaaagattcccggccgtaatggccgaattcccgggcatatgtccggtaccgtcgactgnnnnnnnnnnnnnnnnnnnnnnnnnnnnnnnnnnncggccgcttcctcgctcactgacttcgctgcgctcgggttcgttcggatactaagcggagcgccctatatgattctatacgtctt

SEQ ID NO: 161633 - DNA, 849 bp, Homo Sapiens
  misc_feature (473)..(505): n is a, c, g, or t
  misc_feature (771)..(805): n is a, c, g, or t
caggccccccgtgccacagcatctgagactgggattaagtctaccattcatgcccagcggttcatttctggccaccaccttctcaccaaagtcagtcagcccgctgatgttgttgtagaaggagtggacgcccttagcggagctctctgcccagggtgtgttgcaggttgtgggtgagcgtcaggtagcgcactcccagcatgtagaaggtacgtaaaatggagaggctattgtccagcgagtggccaccctctacaccgatgaggcagccaatttctgagtgtcgttcagagctttagccgaggtcacaagctccagctcagaataggaggcacacatgcggcgtatgaggtcaatctgctccagggtgaggcgcagggcatcccggtcctgggtctggcatggcacataggctgaccagaactgggctctgggggggcctggcgtggtgtaggcacaggttacaggctggnnnnnnnnnnnnnnnnnnnnnnnnnnnnnnnnnggccaccgaccaaacgtgccgggaccctcgaggccggagggctgcatgttgtgcagggccgggcaggcaggcaggggtggcagtcagagagctcagtatccagcagtgcccagatgatgatcatctgcatccaagcccctctggtcctggagactcatgcttccctttgatgtcgcctggatctgctcccatgatgtctgatacagacattcccccccggccgtaatggccgaattcccgggcatatgtccggtaccgtcgactgnnnnnnnnnnnnnnnnnnnnnnnnnnnnnnnnnnncggccgcttcctcgctcaagactcgctgcgctcgtccggttttt

SEQ ID NO: 161634 - DNA, 611 bp, Homo Sapiens
  misc_feature (283)..(336): n is a, c, g, or t
ccactattgctcagtgaaggtactaaccaaatattttttagaagaaagaaacgacgtttaaacctaacacattcttcatgtatttttactgtggcaagtagtcattcacaatgtgatataatcattactcttagtagtcattcaccatgtgataaaatcattacacttccaaacagcactgcattttttgccttcccggaatattttcctttccttaaatagaacatcatttctcattaggatggacttataggatgcatttgggggatagttgagatcaagnnnnnnnnnnnnnnnnnnnnnnnnnnnnnnnnnnnnnnnnnnnnnnnnnnnnnntgtagtaagcaagctcttttttaatatatgacatagatcataaaatacattaaaaatgttagcatgcaagtagcaaaacctaaattacattttatatgggtaaccatttggctgacaggatatttgttgtaaacatactctatgtaatatttaattgtgtcaaaaatatatttatttattatgagccctttattgttttaatgttatgaacaatatccgacgcgtggtcgacgatatcccgggattccgaccgtaccagcctgctttttgtacca

SEQ ID NO: 161635 - DNA, 1052 bp, Homo Sapiens
  misc_feature (936)..(970): n is a, c, g, or t
gggaggatgggtcactgtgtccgtattaccaaagacagtcacccccaagaaacacaagcagctgcatccaccctctttcagggggtagagccactatacttctcatgtagatcagccacattgtcactggagactcggatccagccatcctcccgcacgtggtagaggttgactgcacctcctgagtaggcatctctgtaggtggcttggtagatggctcgacgggccagatcataggcctgctccacttccaggtcataggaatagccccgatccatgaccccatatgcatacacagagccagaacctacagagaaggttgcccctgaaatccgggttccctttcactggtccacgtagtagaggccagggcctctcttatcccagccacagatcatggtgcccatggacagccccatgcctttgtactgatacaccatgttggcaagcagtttggaggcagctgctacagagatgcgttccttatttcgaagctcatagattcgacattgccgagccaacagccgttcccagaagctgcaatccgctgcgcccccagccatggtgcctagcaggtatgggttgatctctatcaccttcttcaccgtctgggaggcaatgtaagcacccgctgtagccctggagtcagctgcaactatgactccatggcggaacttgaaggccagggtggttgttccatgaagcatttcgattcctggctcttctgggacaccccagcctggcgcggccaggctcagaccatcactgagactcctggacctagatccagcagatctgcacgacccccaagtccgaaaaacccgcgctggttcaccggtagcggtctctccaacacgctggcaagcgccatgtctagtgtgggcccccggccgtaatggccgaattcccgggcatatgtccggtaccgtcgactgnnnnnnnnnnnnnnnnnnnnnnnnnnnnnnnnnnncgtccgcttcctcgctcacaacttcgctgcgctcggtcgttcgactactacagagctagcgccctatagtgatctatcgatg

SEQ ID NO: 161636 - DNA, 928 bp, Homo Sapiens
cagtcgacggtaccggacatatgcccgggaattcggccattacggccgggatttaaataatacttttttattatttatactactatatataatatacatcaacacttttgctatataacctaagtgataaccctcttttagttacctgccaaactctggacttggtttatattgcagttaacacagttacaaagctgtaatggtgtctttttttcctttgtaacggaatgtgtaaatcaaagtatatacattgtgtggtgttcctgtttctggagtttcatgaggatttacacatggcattcagtgttctgtatagatctgcctacctttgtgaattcatctgttaacccctcttcctttgagagagcaccggcgatggtggttaactccttgtgttttctctctctcctactggttattcttgaattaagcacagactcgtcagctcggttgctttatcatgaataatgtgtgtgaccttgcagttcttccacagttcagcaaacaagtgctagcttcactgaccaaaaattaaggaaggaaaacacagtttttaaaacgatccatcttttaacagccgaaaccgatgtgtctatggtgctgcaccttgctgttgtacttctgaaatcagacgtgtgtgaaccgatcatttctgacttaaccgtgagatgctcacgagtacccttcctgttgttttgttagcattgaaatcgagactatttattttggaatatatacaacagtgtttttccactgtatttccatttgcaaaagttgagaactgctttctctaccttttgcaaaataattgatattccatattgggattctcaaagacttcgatatggtgaacctataaacctagaaatttgtattcatcctttcatgactgtggcctgagttccccagcccctctcctccttttttt

SEQ ID NO: 161637 - DNA, 1259 bp, Homo Sapiens
  misc_feature (54)..(54): n is a, c, g, or t
  misc_feature (97)..(131): n is a, c, g, or t
  misc_feature (548)..(548): n is a, c, g, or t
aacaacaacaacagcaaaactgagtcactcatatagggcctcgcgttgatgagncgaacgacgagcgcagcgagttagtgagcgaggaagcggccgnnnnnnnnnnnnnnnnnnnnnnnnnnnnnnnnnnncagtcgacggtaccggacatatgcccgggaattcggccattacggccgggggttgcgccgccgcccgcgggagccggcagatccgggtcttgtggctaagagtgacgtggtcactcgaatcaaaacagaggagggggaggaagccggcggccagaaacggcagtggcagcatgtcgtcgcggggatgcagccgcagccttctggaagctccaggcggtctttctggccgatgccttcggtcccggggctcccatcctccccgccccatcggttgttgtctgggcggatttaaacaggtcaacgctagaaatcaagctgggtaatcatggcagaaggtggatttgatccctgtgaatgtgtttgctctcatgaacatgcaatgagaagactgatcaatctgttacggcagtccccagntccgtaactgcacagacacagagtgtcttcaggaattaccgggaccctctggtgataatggcatcagtgttacaatgatcttggtagcctggatggttattgcattgatcttgttcttactgagacctcctaatctaagaggatccagcctacctggaaagccaaccagtcctcataatggacaagatccaccagctcctcctgtggactaactttgtgatatgggaagtgaaaatagttaacaccttgcacgaccaaacgaacgaagatgaccagagtactcttaaccccattagaactgtttttccttttgtatctgcaatatgggatggtattgttttcatgagcttctagaaatttcacttgcaagtttatttttgcttcctgtgttactgccattcctatttacagtatatttgagtgaatgattatatttttaaaaagttacatggggcttttttggttgtcctaaacttacaaacattccactcattctgtttgtaactgtgattataatttttgtgataatttctggcctgattgaaggaaatttgagaggtctgcatttatatattttaaatagatttgataggtttttaaattgctttttttcataacgtatttataaagttatttggggttgtctgggattgtgtgaaagaaaattagaaccacgcctgtatttacatttaccttggttaggtttatttg

SEQ ID NO: 161638 - DNA, 1140 bp, Homo Sapiens
acggcagtaactataacggtctctaaggtagcgaggcctgggtggcgaattcggcacgaggccagctaggcagactcgggtgggaaggcctccctccataaccccacctggaatgccctcatctcccctactctccaggcccgaggcaggcttgccacctccaggaagccctccatcatgtgtgctcagctcctctagctctcacggctgctccccacctttggcacagccctggcactgccaaaggaaaccattctgtgtacataagcaccccagcctgcctcccctgccaggcagtgagaatgctcagggcagggcctggacccaggcatctcagcagccctgggcttaattgagggcaacaaggcccaggatgggctgggtaaatgcttgacagggacagcactgcgggagggccgcagaggttccatccaagtcgacggtgaggagctggtcagcggccggtccccaggtcccaacgtggcagtcaacgccaagggcagcgtctacatcggcggagcccctgacgtggccacgctgaccgggggcagattctcctcgggcatcacaggctgtgtcaagaacctggtgctgcactcggcccgacccggcgccccgcccccacagcccctggacctgcagcaccgcgcccaggccggggccaacaacacgccccctgcccctcgtaggcaccttgcctgccccacacggactcccgggccacgccccagcccgacaatgtcgagtatattattattaatattattatgaatttttgtaagaaaccgaggcgatgccacgctttgctgctaccgccctgggctggactggaggtgggcatgccaccctcacacacacagctgggcaaagccacaaggctggccagcaaggcaggttggatgggagtgggcacctcagaaagtcaccaggacttggggtcaggaacagtggctgggtgggcccagaactgcccccactgtccccctacccaccgatggagcccccatatagagctgggtggcctgtttctgcagcccttgggcagttctcactcctaggagagccaacctcagcttgtgggctggtgccccacagctacctgagacgggcatcgcaggagtctctgccacccactcaaga

SEQ ID NO: 161639 - DNA, 836 bp, Homo Sapiens
gaattactaaggcggaactctttgtctgctggtacctcttttgttgcgcatatctcctgtaccaggcggcaatcacaatttggctttttttcattagcaggaagtgtgtgcggcatttccacccccgatatatcttctgaatgagagtggccaagtcctccaggcgttgcttcctcaggtcttctaatttgaataatgttcttgggtttcggatgaatatctttgatctaccaaaggagtattcttccacgggaatttctaattcattaaataggacctccacaccagacctggctggtcctttccaatgaggccatgtttgtttacaaagcattttgtatctttctaggcaaggttcataggcctgcctgaaggcgtagcctgccctccgcactcggacgttctccaaaagccccaggtacctgatctgatgacacactagagcctcgttgaagatgtgtgctgcttttttatcattcggtttgatacacctaatatagtttgggttcttggtctgtaggtttttcatcagagtggccacggatgccttgaactgtgagcctgctgtaggaggccttttcaggttgatcttggcgggattcccttcggggaacaaagacttgatgagggcatggctggccttccacatggcttgggacaggtctcgatagagaaggtcattgtttttgtcaacgaatccttccacctggtacagcacctttccagcataatgctggatcctgaagcagctgtgaggcagagacgtgtcattgaggaaccgagagcacttgctcatcctgctttcaaaatgctggtgggtggcacatacttgccaa

SEQ ID NO: 161640 - DNA, 1005 bp, Homo Sapiens
  misc_feature (909)..(943): n is a, c, g, or t
cattaagaaacactttaataattttaaagcaaaagctgttagagtctagatagctaaaactgtactcctgagttcaagcttacagataaatcttttgttaagtagtttttcaataaaatatcttccctccccataccccttacccgaaatcttatattgttctttacaaaactttggtcaagagttagaaatatatccaggcagatgtatatgccatacaatagcaagaacagtaaagcccaactaatgattttgagttttaaaaatagaaggcaattaaaatgtactcaaagttacattaagaaaagctttcacgggggtaatattgaaacagtcacaaaggttaagaaaatactgatatcaaagtacagaatgactacaatgttaaaatagacaaaactgctatacaagagcctctttgaaaattaaaaataaagaacacaacacatgagtcaggatgattttcctgttctactcatgaattttagtctttataaggttggttatgttgacatctagaagagtttcttatcacatctgatggtctcattccaacttcgtagggtgggtcttccccaaggaacctctgatcctggtcgcatcttggtcattgtacgatttcaaagtagtgcaatatcgccatgatgtgctggggcatgaagacgtatcctgtgtatagtgccatccccacaatggaaaccagcatggaattgaacaccgtccgctcccagggctccagcatgtagagcgccgtgaccagcaggtactggtagtagaaccaggacatctgcttccaggcccgcgccagcgccatccccgccatgcgcctcccgcgatgcagctcacacgtcagtctcccccggccgtaatggccgaattcccgggcatatgtccggtaccgtcgactgnnnnnnnnnnnnnnnnnnnnnnnnnnnnnnnnnnncggccgcttcctcgctcaatacttcgctgcgctcggtcgttcggctcgacgagctagcgccc

SEQ ID NO: 161641 - DNA, 943 bp, Homo Sapiens
cagtcgacggtaccggacatatgcccgggaattcggccattacggccgggggtggctgggctgcgcttgggtccgtcgctgcttcggtgtccctgtcgggcttcccagcagcggcctagcgggaaaagtaaaagatgtctgaatatattcgggtaaccgaagatgagaacgatgcgcccattgaaataccatcggaagacgatgggacggtgctgctctccacggttacagcccagtttccaggggcgtgtgggcttcgctacaggaatccagtgtctcagtgtatgagaggtgtccggctggtagaaggaattctgcatgccccagatgctggctggggaaatctggtgtatgttgtcaactatccaaaagataacaaaagaaaaatggatgagacagatgcttcatcagcagtgaaagtgaaaagagcagtccagaaaacatccgatttaatagtgttgggtctcccatggaaaacaaccgaacaggacctgaaagagtattttagtacctttggagaagttcttatggtgcaggtcaagaaagatcttaagactggtcattcaaaggggtttggctttgttcgttttacggaatatgaaacacaagtgaaagtaatgtcacagcgacatatgatagatggacgatggtgtgactgcaaacttcctaattctaagcaaagccaagatgagcctttgagaagcagaaaagtgtttgtggggcgctgtacagaggacatgactgaggatgagctgcgggagttcttctctcagtacggggatgtgatggatgtcttcatccccaagccattcaggcctttgcctttgttacatttgcagatgatcagattgcgcagtctctttgtggagaggacttgatcattaaaggaatcagcgttcatatatccaatgccgaaacttaagcacaatagcaatagacagtt

SEQ ID NO: 161642 - DNA, 1144 bp, Homo Sapiens
  misc_feature (413)..(468): n is a, c, g, or t
tttgattttgaaaaagttgagaaaaacagtgatttttttacttatttatgctgtacaaaattttacaaggtaaaggaaacacaattgcacacagacatttggctcagttgataagtaatatgacctacgaatctaataaatactcacaatatatacattaagaaggggaaacggcagacaattgtattccactatatttttttaatcagaagggaattttaaacttgatttctccgcaacccccacccccaaaattcttgatcaactaaccagttgggaagggcatctgaagaatcactcatgaaactattttgtgtgtgtttattgcgtttctgtgttaagtcacaggacactttttacaaacgtcacatagggagaggttgtcaaggcacaaaacgtgcagtaagtttccnnnnnnnnnnnnnnnnnnnnnnnnnnnnnnnnnnnnnnnnnnnnnnnnnnnnnnnngtatacccacgggaggcatactttctgcacagaggcatcttgataaccagatacatacagtacagagacatccagtcatcgctttaagttctggtgccaacagcctggtctttaatactcctacaattcatagaatctctaatttcctcaggaactgtttccacagccagcctggaggccgccaggccagagggaaatgtgctcatgtggtgcacacagcccctgggcagcacagggcagggcctcccgtgcctggcccagggctgcacccagtgtgtgctcccaggggctgcagggctgaggaaacagagtaaagtgctctagtcaggagactggcacgtgagtacagggatcctgggagggggtgcccagatccaaatacatctttggtgtatgtgtgtgtccagcaggcccacggctgcaatcctaccactgcttgtaaccgtgggctttgtatgaccctaccaatgggctcgagacacatcagggaacaagctgagctccaacacagctttaaaaataagtcaaagtcccaaggagattcttggggaaaggaaattttttaaagtaagagtatttggattgaaatcatctctacctaaaggaaaaagtgaatatgcaatatatacatatatattttttaaattatgaagataaaaatgtttagattttccaa

SEQ ID NO: 161643 - DNA, 740 bp, Homo Sapiens
ccacccagactttttctcaccagcacagtcttcaaagcttcgtgggaaaggtgtgtgggagtggagaaagacaaagggcccttctgaagagaggagctgcagagaggggcaaaggggttcctagcccagtgatggcccaaggggtggagaaggtggagggctggcagcaggccccagcgcttgagctgggggtcggcctcggggacggggcctgggtgaagggcaggcctgggatccagtcagtcgtctatccagatcccctccccgggtggggggtccttccgattccagcccttctgacaccaatgccccccaccctttctttctctttcttcacaagcactggaggggccgttggtggcggctgtgatgaaggaccctgcaggcatctggctgtaattggcgcctgcggcggccagggcccctacgggtgcggcgctgaaggccgccccgtaccccggaggtgtagcgtagggacccggcgggtaggccggtgtggggtgaggctccgtgcccttgctggccagccggctgaggatgctgcgctcggacatctgaaggcgggctgcgatggggggtattcgggacagcgtggctggcaggcgggtcacgtccgccttcatgtcgctcagcaactcctccagctggttcagaaccttgtgcaggacggcgttggccggcttgttccccgccagcgactccttggagaggtgctggtggctctggggccaggcacccaa

SEQ ID NO: 161644 - DNA, 862 bp, Homo Sapiens
cagtcgacggtaccggacatatgcccgggaattcggccattacggccggggaggtctcattctgtgcctgtgaacatggcggcgcccgttgtcacggccccgggcagagctctgctgcgggcgggcgctggacggctgcttcggggaggcgtccaggagctactgcggccgcgacatgaagggaacgcccctgacctggcctgcaacttcagcctttctcaaaatcggggcacggtcatcgtggagcgctggtggaaggtaccgctggccggggagggccggaagtcgcgcctgcaccggcgacatcgcgtctataagctggtggaggacacgaagcatcggcccaaagaaaacctggagctcatcctgacgcagtcggtggagagtaaggcccgggccgaggcgcttcctctcaggctggtccggtttggcatcagctttttctagcccgtccccctcaactatttgccttgctttttctttgtggaaacaatccaactctatatgtgagaagaggaagccataaaaactattgtgattgtgacactggcctccagcattgaaaattaaaacataaaggcagcaacatcattaacagtgtgtggggagaggagcctgacaatttgtgccacatatactgaaatcctccatgggacgacaactccctctatacaggggatattaaatttatacatcaagttctaaagaaactaattagcagtctcttaaatcttgttcctagtgaatatgaattagcatttcttttaggaaaaataaagcactgtgagaaactaagaggtgcttctcttttttgacatcttttctttaggggactccttagatggttctaattccccctgtc

SEQ ID NO: 161645 - DNA, 1555 bp, Homo Sapiens
ctattataatggttccggaattgtggtgaggttcagcaaaagttcttgaacggtaagttcttcaacctaaattggttaggaacccagagggaattcgggtggagttaaataaataagggcccagcccttctcgagcccctcccagagttatggcatttctcctctcaaggagcatggagtcccaatgggatgtgaagagcttcccctcccgtggcctttcagcagctgggagaggtcgtaatgggctctgaaggtagctcagcgcacttttcgtggagtggacagggatggagacggggaagttgaacacggtggttggtgaaggtgcttcggtcgagcacagccatggcggggctcccagcctctgccgaacagtgcggagccagcacctgggactcaacctgcagcagctggcccatgaagctgaagttgggagagatgatgcttcgcctctgcttcacaaactcaaaggcctcgtccagcttgactcgattagtcctcataaggtaagcaaggcagatggtggctgaccgggaaatgcctgcctggcagtggacaaacacccttcctccagcattcttgatggagtctatgaagtcaatggcctcgttgaaccaggagctgatgtctgccttgtggttgtcctccacagggatgctcttgtactggtagtgaccctcaaaatggttgggacaattggctgagacgttgatcaaggcagttatgcccaaggcatccagcatgtccttgcgggaagcgtgatacgcactgcccaggtacagaaagggcaggatttccaccgggccaccctgatcgtagagtggggtactgcaggaactgcacccagattccgggctgtcagggacgctagtactcaggggaaggctgagccccatgggggtcgactgtttgctgcacagctccgggcaggaagccgaaaacgcttcgtatcctcctttgaggaagaagacttgcgcggcgcgcgcctcgcggcagagcgcgccggccgccagggccagggtgccgtcgcgcttggcgccgtccagggcggcgctgcgctcgtccagcaacaccacggcgtggtaggcgccggccagcaggcggccgcggagctcggcgttgggcacgatgtgctccaggcccatggcgcccttggcccggcgccgcacgatggtgctgaagcgcacgttgacagagccggcgatgtggccggcgttgaaagcgaagaaggagcggcagtccagcagcaggcattgcgccgctcgctcccccagcagcgcccgcaggcctccagcgtccagggtgcccacttccatgaccatggccggcctcagcgcccccagcgtgatcggccctgcggtgctctttgtctgttctcggggccaagggcagggcggcgcttttcgaggaaaagctagacccccgggtctctctgcgccgaaccaaaagccgcttttggactgagagaggagcgtcacgcggggctccgggctcctcggcttcttcgcggttcccccgactgccccaacttttttgtacaaagtctttattatgt

SEQ ID NO: 161646 - DNA, 1274 bp, Homo Sapiens
  misc_feature (877)..(886): n is a, c, g, or t
cagtcgacggtaccggacatatgcccgggaattcggccattacggccggggcagccaccttctggaggcagcttttatcctttctctctattgctatgttgaagtaatagggttttttttaacctctggatgtctcgtctgtggttgagtttatggtaatgggtacatgggtcaggccatgtattaacagatgccagtgcgctctgacaagtattccaaagtgttccgtagctagactggtgcaggctcgttgtaccactgcaaccgactgacgttactgtagttcctagaatgctgtgagggccggggggtccagatcaacataaagcctaactgttgctggagttgtagtctcaaggctttctctcttgcttaactaaaacctaaggaccactgtttttggtagcaattatatggttactatccactgcagtcctcagttgttggggtaaatcccacatggcagagtaaggcaccccacagaaattaacttggagagcctgagaaattcccagtggccttggcatagctgtctagaacaccatctctaggaaaatttaattctgtccctggccagctattgttcttccacttcgttttctgctgtcccaaggccagatgagtggaatcaccatctgactgttgtcagtaaaatgtatctggcgtgaacagcaggataacccatgttctccacataagggataaccttacgtgaaaccttcctgctgacaaccatgccggaggaatttttccacttaagtcagagccttcctccccatctggaattcacaggtgttccttggcagcacacaggagggtattaaggacctttgtgaggctaggtacactgtccacacctctttggggaagttacgannnnnnnnnnccatcataattcagtctcttcttattctacagtgtgcactttatgcctctcgccttttgataatagttgttcagtgaaggaagtcagctgccagaatattaagaagggtctccctttatgtcagtacaactgttagggcggccttcccatttactttaggtttcaagaggattcaccggaagcacatgccccggtctagtcccatttgaaacagttctgctttactgagaccctagccggtctccttgctgaccctagcgctgctgcctaggtgccatttctttcctcctcagtcaaatacaggctgcacattttgtcacttaatgccagtacaatctgtgttactcctaaggactttgggattttgatgagacctgcgaggggagaa

SEQ ID NO: 161647 - DNA, 831 bp, Homo Sapiens
  misc_feature (75)..(201): n is a, c, g, or t
tggatcattaaaaaacacaatttcaatttatatagcactttcttccgaagagttgaaagcattcgtgcttatctnnnnnnnnnnnnnnnnnnnnnnnnnnnnnnnnnnnnnnnnnnnnnnnnnnnnnnnnnnnnnnnnnnnnnnnnnnnnnnnnnnnnnnnnnnnnnnnnnnnnnnnnnnnnnnnnnnnnnnnnnnnnnnntaaagtcaatgctggaacagggaccacagccctgtgctcttgtctccgaaacccatggtttccctgttacactaaagttgtcccacttgagaatttaattcaataactctacacttttccaataaataaaaaagtgcatttttttcacccataaaaatttttgaaatactatgagcaagatacaaacattctgggatggatggtagatggatgctacactcttctagaaagtgcttatggaaatgtttattttaatatgaggagtttcttttcctagttaaaacaaagtagatgtctttacaagaaatatatttgaaaaaatgcttctagtcacctactcaattatagctctagtagccatattatattatctacaaaccaggtttattcctgagtttaaaaagaagaaaatatctaaataataagttaaatctttgagataatttttctcatttacacacatttactcaagagactcagagtggcagatagggaattgggccaacacatttctcagagagacatgagaactgagacacacaggggcagcaagtctgaattttgctctcatctctgctcccccggccgtaatggccgaattcccgggcatatgtccggtaccgtcgactg

SEQ ID NO: 161648 - DNA, 931 bp, Homo Sapiens
aacctaatgaacaactttgtacaaaaaagttgggaagatggagcccagcaccgcggcccgggcttgggccctcttttggttgctgctgcccttgcttggcgcggtttgcgccagcggaccccgcaccttagtgctgctggacaacctcaacgtgcgggagactcattcgcttttcttccggagcctgaaggaccggggctttgagctcacattcaagaccgctgatgaccccagcctgtctctcataaagtatggggaattcctctatgacaatctcatcattttctccccttcggtagaagattttggaggcaacatcaacgtggagaccatcagtgcctttattgacggcggaggcagtgtgctggtagctgccagctccgacattggtgaccctcttcgagagctgggcagtgagtgcgggattgagtttgacgaggagaaaacggctgtcattgaccatcacaactatgacatctcagaccttggccagcatacgctcatcgtggctgacactgagaacctgctgaaggccccaaccatcgttgggaaatcatctctaaatcccatcctctttcgaggtgttgggatggtggccgatcctgataaccctttggtgctggacatcctgacgggctcttccacctcttactccttcttcccggacaagcctatcacccagtatccacatgcggtggggaagaacaccctcctcattgctgggctccaggccaggaacaatgcccgcgtcatcttcagcggctccctcgacttcttcagcgactccttcttcaactcagcagtgcagaaagcggcgcccggctcccagaggtattcccagacaggcaactatgaactagctgtggccctctcccgctgggtgttcaaagaggaggtgtcctccgtgtggggcctgtgtcccatcatcggg

SEQ ID NO: 161649 - DNA, 703 bp, Homo Sapiens
  misc_feature (624)..(658): n is a, c, g, or t
cgttggaatcttattttcaaagatgattcagaattcaacgtggaccccttctggagggtggggagaagtggctaagtgttataaggtatactggacaacacggggtgtttcaaagaggacgacaaggcactgtccacaatcagtccaactgtaattctttcctttcttgtgattatgtaaattgttaaagaaaagaggtttctcacaagctatatacagcagcttaaaacctcagtgtttctttttcacttgataccacacattaaaattaatttacgacaaatacttgtcaccagaaatgtatgtaggcacatagaaactctacagctttactggaggggcgaggtcttcagtgggatcatgattctggattccatttcctgaataagtggaactgtgtaatataccgattcctcccagccatgtttgtgccatgctgcattccgtatgtcttccctggtctgaagatccctgtaagcccaaagatggtgcaccatgtacagctgcccagtctgagagaagaatcctccgacggcttcgttaccatcctgtctgaagcggattgcacgagcccccggccgtaatggccgaattcccgggcatatgtccggtaccgtcgactgnnnnnnnnnnnnnnnnnnnnnnnnnnnnnnnnnnncggccgcttcctcgctcaaagactcgctgcgctcgtcggttgttt

SEQ ID NO: 161650 - DNA, 1027 bp, Homo Sapiens
  misc_feature (75)..(109): n is a, c, g, or t
  misc_feature (528)..(538): n is a, c, g, or t
aacctattacctacttgggcgtgcgcgtaatttcgaacgacgagcgcagcgagtcattgagcgaggaagcggcgnnnnnnnnnnnnnnnnnnnnnnnnnnnnnnnnnnncagtcgacggtaccggacatatgcccgggaattcggccattacggccggggagttcatgtaccactaagaatgaactattgacttaacagtttggcttaggctcctggttagaacaccaccactcctctctccaccttaccttctgtttgtcccagtgcaaaatttgtttgttcttctctggcttaggtgaagattgtccccagtggatggtccctatcacaatctctactagtgaagaccccaaccaggccaaactaaaaattctaatggacaagccagagatgaatgtggttttgaaccaatgtcaaaccagaccaatgggtgaaggtgagttcagaatcttacctaaacagatttctctcacttatacattttatggccggttttaaattctgcttcagtttagtagtttcaaagnnnnnnnnnnncctaaacttttctttgtgaaacttaggacgaattttcatatagtattgtccagacatttgtccttatgttagggaaggtagtggtagagaagcagatccaaaggcataggactaaggaggagaagaaaatgctagtggtaaacctatagcagctgtgatgaatacctggaccaaacaaatgggatttcccctcatttatgtggaagctgaacaggtagaagatgacagattattgaggttgtcccaaaagaagttctgtgctggtgggtcatatgttggtgaagattgtccccagtggatggtccctatcacaatctctactagtgaagaccccaaccaggccaaactaaaaattctaatggacaagccagagatgaatgtggttttgaaaaatgtcaaaccagaccaatgggtgaaggtgagttcagaatcttacctaaacagatttctctcacttatacattttatggccggttttaaatctgcttc

SEQ ID NO: 161651 - DNA, 658 bp, Homo Sapiens
  misc_feature (57)..(89): n is a, c, g, or t
  misc_feature (543)..(577): n is a, c, g, or t
tttcagaagggaaccttgtatttcacaggcctcattttgatggcaaaaagacagtgnnnnnnnnnnnnnnnnnnnnnnnnnnnnnnnnnctgaaaaggattgttcagggggagttggggtctcccgatcctgccatggctcggtggtggctcaggtggctgcttaaggctgaaaggtgggtctgagatgaacctgcagaataatccaagccgagcctcacctgctgggtccagggctaaagcctttgagaatgctcccatggatcctggaactaggtctactgtggcagcaaggcacaggctgggggcctcaggggtccttgaggtcaggcaggtcagccagcagcattggggagtccatctggatctcacgctgcagggactcaatatcggcagggttcatgccatggccttcgagccagtcagcaagcagggaggctgagagagaggctgaatctgcctggccatcctgtggcccatcagccacgcccaccccggccgtaatggccgaattcccgggcatatgtccggtaccgtcgactgnnnnnnnnnnnnnnnnnnnnnnnnnnnnnnnnnnncggccgcttcctcgctcaatactcgctgcgctcgtcgttcggctgcaagagtagcgccctatagtgagtctatacatcttg

SEQ ID NO: 161652 - DNA, 998 bp, Homo Sapiens
  misc_feature (44)..(44): n is a, c, g, or t
cttcatggaaggggtatccttgtggaggtacagctcaacaagcnacagaccctccagttcctgttgtagctgagtaaggtggtcatatcctggctgctcagttcaaagtcaaagaccttaaagttctcagcaatgcgttctggtgtcacagacttggggatcaccaccaagttcctctgcatggggaaccggatcaggacctgggctgtagttttattgtgcttggctgcgatcgccttgatcctgggatcctccaggagagaagggtcctcgggcttggcccagggcctgtcaggagagccgagggggctgtaggcggtcaccacgatgcctttggactggcagtactggattaacttctcctgagtgagatatgggtggcactcaatctggttaactgcaggcttatacttcaagccaggtttgtttaagatcatctccacctggagatggttgaagttggagatgccaatagctttcaccagcccttcatccaccagctcttctggtacgtgcaccacagcttgctgacgatgaagagctcctcacgcttcaccacctgctccctgagcttctcctgaatggccacccccacctcattctcattctggtagaggtccaggtagtccagcttcaggtcgctgagtgtcttctggcaggctcctttcaccaggcccttctcatggtacgtgcaccacagcttgctgacgatgaagagctcctcacgcttcaccacctgctccctgagcttctcctgaatggccacccccacctcattctcattctggtacacatgggcacagtcgatgtggcggtacccgacgtcaatggccaccttcgcggcctcagtcacctgccctggaggggacttccaggtacccaaccccaggatgggcatcttggcgccgttgttgagcaggagacggcttgccatggctgctgcgctccccagaccggacgcgtgggtcgacgatatcccgggaattccggaccggtcc

SEQ ID NO: 161653 - DNA, 1012 bp, Homo Sapiens
  misc_feature (675)..(703): n is a, c, g, or t
  misc_feature (895)..(929): n is a, c, g, or t
ttgggccacgtgaatgaaaccatgtgccaaattcaacagttgcattcttgtttcttcagtcagaggcttggtgcaaagatatgttacacgtgcgttgccttaggcccgacccggttttcgttgccaaagaaaaagggtgtctccattagcggaaagttttggaaggggaaagaaggtcacaccatgctgaatcccttgatcgaaaagatggtcttcctccgttttctggcttgttgtttttggaatgtttttcctgcccagggttaaataatcggcgttcatggttcagagccagagccttgcctgtttcttgcccctcggccttgaccttttggtgttgtaagtcttctttggaaatgcccaaattcggaatccggagtcagagtttacagcctctactactttcttctgttttggggctctctgggcttagggactgtatctgaagacggttttccatcttctgacttctgagaatatgaaggaaatgagaagagatttccaaaatcctgacttttttttgtcatgcaaagatttttctggagtggcttttgatttgcctggtgaaaatgtatattcatcggttatctaacccatctgaaggaacaaattcatcttccccatcatttgttatgggagatgctttaactttcaattcctctaaatcattattgnnnnnnnnnnnnnnnnnnnnnnnnnnnnnctcttcttctgagaaatcaaatgtgtatttaggtctttcggctgctgctctcctaagcaaagaatctcttggaataaccacaggttctgtttcttccaaatcactttctgacttggattcatcatctgaccaaggattccgcccggccgtaatggccgaattcccgggcatatgtccggtaccgtcgactgnnnnnnnnnnnnnnnnnnnnnnnnnnnnnnnnnnncggccgcttcctcgctcaactactcgctgcgctcggtcgttcgataactacgagctagcgcccatagtgagtcgatacagttc

SEQ ID NO: 161654 - DNA, 1102 bp, Homo Sapiens
  misc_feature (251)..(251): n is a, c, g, or t
  misc_feature (278)..(306): n is a, c, g, or t
  misc_feature (1025)..(1059): n is a, c, g, or t
tcaggacccaatgagggggaaaaaccggaagccggatttttttccataactgtccaatttagcggaatcattcttggatttcgggaatatgagggaaatgagaagagatttcccaaatcctggcttttttgtccaagaaaagattttttggagtggctttgattgccctgggaaaaagatattcatctttatctaccccatctgaaggaccaaattcatctcccccatcattgtatggggagatgctttanctttcaattcctctaaatcattattgnnnnnnnnnnnnnnnnnnnnnnnnnnnnnctcttcttctgagaaatcaaatgtgtatttaggtctttcggctgctgctctcttaagcaaagaatctcttggaataacccacaggttctgtttcttccaaatcactttctgacttggattcatcatctgaccaaggattccgtttcttcactttctttgcactaggtttaccagatgatgtaggtgtttttctcactctggtaccaggctccttcttctccctcttaggtttgggacctttatttataggaactgatggagtcaatgcctcttctcctgcaccttctactggtgctccactgaattcttcatcaaattccacttttactgctgcagtatcaagatcacccttcttcttcttcagcaactttttgctggcatctgccttcatagctgtaatttcaggaattattcttctgccataaggtgagggcattgtctcttccaactggagtttcttcaccttaggtttgccaactttacctttaattgcttttccagacattccagccagaacatcttctcgttcttgagattccactttatccagttcttcaacaaatgccgctaaatcctctttccaaagatctgaaggagattttcttttaagatcattgacctctcgcccttttgcatctctctgtttaatcagttcttcaactttttcccccggccgtaatggccgaattcccgggcatatgtccggtaccgtcgactgnnnnnnnnnnnnnnnnnnnnnnnnnnnnnnnnnnncggccgcttcctcgctcaatagctcgctgcgctcgtcgttcgg

SEQ ID NO: 161655 - DNA, 1150 bp, Homo Sapiens
  misc_feature (82)..(90): n is a, c, g, or t
  misc_feature (1020)..(1054): n is a, c, g, or t
  misc_feature (1057)..(1095): n is a, c, g, or t
  misc_feature (1108)..(1108): n is a, c, g, or t
taggggtgctttttaacagccccccagggagggggggccccaacaggaagtttctgtggttttataaaaaaaccggataaannnnnnnnnaggaaagcgccccttaatctgagagaattaatttttgccccgtggtcaaccgtatttgtggcgggtaaaaacttttcccaagaggtggggtggtttgttttcccagaatggctcttgtttttgaattggggtgtaaaggggttggccaggaattttattattttccatggttccaaaaaccaatttaaggcttccccgtttattcaatagaattgtttggaagggttcccggtagaaaccacccccaccttttggtcaatggccaccttggtagtcggtttcatcagagtgtgaaggctgcctccccgcggggtggttgggtagaccccatgaagttgatttcccgcctctaagcatctcggggccagcattcgtccgatactctcacaagccaccacatttttggtactataaaggggctttttaatagcccactcacgagtggaggccgaaaccacaaccttgccattctgatgctccacaagtgcttgtacatgatgctgagtccttataactcgcaacctgtgccagaactcacgggagggaaacaccgtccgccagccccgctctttcctggctacagataaaagctccaggttccgggggttccggttggtgaattctggggcgacagcttcattttccacagggtccacttcaggtttcgctgccggctcggagctggttgacagggctgcgaacctgcacccagggttcctgcaaaccgagaacccccaaaactgcgaccgaagcgccatcgctgagacgatctcggaaaagcctcgcctctttttcctcacggacgactcagtcgctcgccaggcgcagccatataaagtcagggacaagcctttggctgctgtagatccccaaactctccccggccgtaatggccgaattcccgggcatatgtccggtaccgtcgactgnnnnnnnnnnnnnnnnnnnnnnnnnnnnnnnnnnncgnnnnnnnnnnnnnnnnnnnnnnnnnnnnnnnnnnnnnnnctcgacgactagnggcccgggcccccccgcccttaaatttaagggttaagaattg

SEQ ID NO: 161656 - DNA, 1021 bp, Homo Sapiens
  misc_feature (337)..(375): n is a, c, g, or t
  misc_feature (907)..(941): n is a, c, g, or t
agcattaaaagatgatcagggaatattaatgcaagctaaagagcccgtatcatgtgaaactttcatttgccatcaccattattgttataattctaagaaagggatcacataaattatagttgaaagaaaaaaaatcccctcatgtacttggatttccaagtacaaagttttgcaacaacagaattatttttagtacacttctatacaattagtaaacatttaaattagtttttaaaaacttaaaacttcaattggaatgtgctaattcaagccaagtagcaattcaggtgacctttatatttgcattataaggcagtattaaaagattgagaccgcnnnnnnnnnnnnnnnnnnnnnnnnnnnnnnnnnnnnnnnaatgccattgtttcacacctgttaatactgtcttaaaggttctattgctcttcaacgatcttagtgtactttgaaatataaaagtaataattatcattggaacagttattctaaatctaaaaagataactcccatagcaatatttgtttactcagaacatattttcacttccaatatatgtaaaatttctcacaaagaacagaactcacagtttgaacagaaacctcagtgtttaaatctccacattcagtaaaataaacgctacatagtaggttgttctgaatataaatcacgcatttaactaaatgggatataatttctaacttgtgttaaaagtgaagaaataattttttatgtgaagccttgtcccaactcagtcaagtgcaagattatcatatgatacaatcaactctactaacacagcacatttgtcagagacttgaaggcagatacataactacagctggggaactggatgtcccccggccgtaatggccgaattcccgggcatatgtccggtaccgtcgactgnnnnnnnnnnnnnnnnnnnnnnnnnnnnnnnnnnncggccgcttcctcgctccctacttcgctgcgctcggtcgttcgctcaggcgagctagcgccctatagtgatgtatcgact

SEQ ID NO: 161657 - DNA, 798 bp, Homo Sapiens
  misc_feature (681)..(715): n is a, c, g, or t
ttttcaaaatgtagtgttccccagggtccacgtctctcaagccaatatacacgatatccttggcagatatacagggagtcacccaggagaatcctggcacatcgggaatctttccttttagttccttcaggaggaaagatacaggttgtccatgcaagtttccacttgtggttgtcagtggagtgttgatatcagtgtgagcatccacccagatgactccaagatcagggtggaccctggcatggccagagatgcttccaattgccaaaactgtggtctccgcccagcaccaggctgattcttccgttcttcttgacttctgccaccttgccagccagctgctcgcttgcttttcccacagaccttggattcttcacaatttgaaagggactgtcattagggatgtcagcaaagggcaggtccccataatccttcacatcacactcttgttctttaagtttctcaagcagaccagcctttctcaatactgtagggccttcttccacccctcctcgtggctgtccctttgagaaaggagctccaataatccctatggttctggacttggcgctcatgctctgacacttctctttgctgcacttgagctctccagtcagtcaaccctcagtccccggccgtaatggccgaattcccgggcatatgtccggtaccgtcgactgnnnnnnnnnnnnnnnnnnnnnnnnnnnnnnnnnnncggccgcttcctcgctcactacttcgctgcgctcggtcgttcgctgcgggcgagctagcgccctatagtgatgtatcaatctt

SEQ ID NO: 161658 - DNA, 850 bp, Homo Sapiens
  misc_feature (95)..(104): n is a, c, g, or t
  misc_feature (490)..(500): n is a, c, g, or t
gtattgaaaatattttataatcaattctctagaatcctagccatccagtacaggaaaaaattatattggaacacttccgtatttttaaacaatgnnnnnnnnnntttgactagaggatggcataagaaatttacaaatacaaacttaggcttcctcacatttcccacagagcaactaaacgagaaaaagatttcaagaaatgacagtatacctcgaatgcaaaattccaaagtcaaatagctacttacattaagagatttaccaaaacagtttgtaaattaaacattaacagcaaaaggcacaaaaagcctatttcttttatggtgtctcggctgattctttaagaagcagataaacaaggtactgtatggaacgatcaaaacttggcctgagctgtcttctgataattaatcctagtatatccagatttgttgtccaaggacacaagctccatgccaccttctgctgtcactttccaagaagaggctgnnnnnnnnnnngtttccagttttcactatgatcattaaaagatactccactgctctgtcagggttgttgaaactggctctcagggctgcaattacttgctctcgttcatagcccattgacatgatctcagttaccatattctcgtaagactgacccgtcacaagttcactcgttgcatcttcaaaaaggtttgaccgagaagaatcacccgatgtactgtcagttgctgttgggctagtagccactggtgtctctgctggcttttctgcaggcttctcttgtttagctgcactagcaggtgcaggttcagaagatgctgtcgccctcgtgccgaatatcgccacccaggcctcgctacctt

SEQ ID NO: 161659 - DNA, 944 bp, Homo Sapiens
atcggccggtggccccttttgccccggtttggggggaacccgcgcgtaaatttaaaaagtccctgcggctttaaccaaaaaatcttttataaaatcgaacttctccaaaagccaggcatttggcccaataggaatttaaatttcacatcaataaaactttaggctttagatttatttagggctgtttgcatatgtttatagaatagtttactttaaaagatgacaagacagctccccctcagtgagaccctggcctaaatatatttgctttatttatatagcaagaggataacattaaacatggaagctttcaatttgtggcactgaataatctacacagggcatccttcaaaggctacaattaaggatccacctaacttttcagcaatacaagcccgattgagatcttctggtccatttgcttgacattcatgttttatgccttgaaatttctttttaattgcatccttggagcttgcatagatcattttacttttcagaggtgctagttctggtgcccacaaaaaaaacatcaactcttcttttctggattcttttgtttcaaagcttgcatcatacaaagcatagcgacaatctttttcaggaagcattcccacaaaatgcttgaaaggatcagttatggttacaccaacatctccaaccaagatctctataccttcttctacaatgatgcactttttgtctgcactgagacaaaaaatgacagccttctttcttttcttgatttcttctggtgtggagcatttacgaactttcatgtcataaaaaatgcgacatacttcatcagctacttgcactcctgaggccatcttcgccgcggcggtcgcagggacgcgggggagggagccggcgggcagcgagtatgcagaccgtcccggacgcgtgggtcgacgatatcccgggaattccggaccggtaccagc

SEQ ID NO: 161660 - DNA, 994 bp, Homo Sapiens
  misc_feature (261)..(333): n is a, c, g, or t
  misc_feature (355)..(433): n is a, c, g, or t
gctaggtagcgaggcctgggtgtggaatcggcacgaggtcctctcgagaaggcgcggggcgggctgtccggcccgcagggcggtcgagcccgcggcgccatggctcacgtcggctcccgcaagcgctcgaggagtcgcagccggtcccggggacgggggtcggaaaagagaaagaagaagagcaggaaagacacctcgaggaactgctcggcctccacatcccaagagagaagcaagcagaaggcccggaggagaacaagnnnnnnnnnnnnnnnnnnnnnnnnnnnnnnnnnnnnnnnnnnnnnnnnnnnnnnnnnnnnnnnnnnnnnnnnnagtgatggccggaagaagcggnnnnnnnnnnnnnnnnnnnnnnnnnnnnnnnnnnnnnnnnnnnnnnnnnnnnnnnnnnnnnnnnnnnnnnnnnnnnnnncacagcaggtggaggctctgccgggcccctcgctggaccagtggcaccgatcagctggggaggaagaggatggcccagtcctgacggatgagcagaagtcccgaatccaggccatgaagcccatgaccaaggaggagtgggatgcccggcagagcatcatccgcaaggtggtggaccctgagacggggcgcaccaggcttattaagggagatggcgaggtcctagaggaaatcgtaaccaaagaacgacacagagagatcaacaagcaagccacccgaggggactgcctggccttccagatgcgagctgggtttgcttccctgagtggccccggctggccaaggcctgtggaacgacgctggcggcccagcctgggcaaggtttcagggtgccagtgggaagcctgatgggtgctggtgggctttccccccgtggattggtctctggcccagcccagtctcttctcaggggcagggggtggaggttggggtcaccggcctgcttggcacccccatctgaaagagcagcacttctcagctattaaaggccccctggatagac

SEQ ID NO: 161661 - DNA, 622 bp, Homo Sapiens
  misc_feature (480)..(518): n is a, c, g, or t
cagtcgacggtaccggacatatgcccgggaattcggccattacggccggggaaatacttttgagtatggctatctatacctgccttttaagtttgaaactaactcatagattgcaaatattggttagtatttaactacatctgcctcggctcacaaattccgattagacctttatccagctagtgccaaataattgatcagatgctgaattgagaataagaatttgaggtctacattcttggttgttaatttagagcgtttggttaaagtatgtccttcagctgactccagtataatctcctctgctcattaaactgattccaggagattggatttgctgtgactagatacagatggagcaaatgtcctaacagagaaatagaggtgatgctgctaaagggcagaaatgccaggcggacaaagttcagtgtcgggaattttccccgtgacattcactggggcatgagattttggaagaannnnnnnnnnnnnnnnnnnnnnnnnnnnnnnnnnnnnnnattcagctagaatttctggtgggttgatggtagggtataatgtgtctgtgttgcttcaaattggtctgaaaggctatcctgctgaaagtcctgctttcctatct

SEQ ID NO: 161662 - DNA, 1018 bp, Homo Sapiens
  misc_feature (197)..(249): n is a, c, g, or t
  misc_feature (604)..(648): n is a, c, g, or t
cagtcgacggtaccggacatatgcccgggaattcggccattacggccgggtcttgaatgtgccatctgagaagggagacccaggttgtgagttttcctttgaacacattggtcttttctcaaagttcctgccttgctagactgttagctctttgaggacagggactatgtcttatcaatcactattattttcctgtnnnnnnnnnnnnnnnnnnnnnnnnnnnnnnnnnnnnnnnnnnnnnnnnnnnnngtcttctaaaagactcctctgattgggagaccatgtctataattgggatgtgaatcatttcttcagtggaataagagcacaacggcacaaccttcaaggacatattatctactatgaacattttactgtgagactctttattttgccttctacttgcgctgaaatgaaaccaaaacaggccgttgggttccacaagtcaatatatgttggatgaggattctgttgccttattgggaactgtgagacttatctggtatgagaagccagtaataaacctttgacctgttttaaccaatgaagattatgaatatgttaatatgatgtaaattgctatttaagtgtaaagcagttctannnnnnnnnnnnnnnnnnnnnnnnnnnnnnnnnnnnnnnnnnnnncgaaaaatactgagggatcttttgataaagttagtaatgcatgttagattttagttttgcaagcatggttgtttttccaatatatcaagtatagaaaaaggtaaaacagttaagaaggaaggcaattatattattcttctgtagttaagcaaacacttgttgagtgcctgctatgtgcacggcatgggcccatatgtgtgaggagcttgtctaattatgtaggaagcaatagatctcggtagttacgtattgggcagatacttactgtatgaatgaaagaacatcacagtaatcacaatatcagagctgaattatcctcagtgtagcttcttggaattcagtttctggaactagagatagagcatttatt

SEQ ID NO: 161663 - DNA, 1426 bp, Homo Sapiens
  misc_feature (117)..(170): n is a, c, g, or t
  misc_feature (633)..(633): n is a, c, g, or t
  misc_feature (658)..(1174): n is a, c, g, or t
  misc_feature (1186)..(1186): n is a, c, g, or t
  misc_feature (1206)..(1207): n is a, c, g, or t
  misc_feature (1236)..(1236): n is a, c, g, or t
  misc_feature (1242)..(1242): n is a, c, g, or t
aaggttctcaagaattttattataaaacagaacaatgacacaatataagcttacacattaatatttacattatattcaaaatatattacagctttaatttatgaacagaaatatccnnnnnnnnnnnnnnnnnnnnnnnnnnnnnnnnnnnnnnnnnnnnnnnnnnnnnnacttgatcttgtaatttagaaaagaatgcttgagaggactttaaggccttgtctttacctttatcctttatgaaggaagctttgccagttttggtcagctgttttaacttctccgaagctactgttttgctgtatttccctgcttgatctacactgctcttttcaagcagttttctccgcttctccttctcttttattttcatacgcttttgatatttctttttccttcgctctcgtttcttgtctgtagctgttttttcagcagctgtttttatatctccagctttatttttctccttgatctcctctggggccaggagagctgcatcactaacactcactggggctacttcctccatgctgtccggatggcacctgtgattacagaggaaaccacccttcaactggaagatatcattaaacagaggataagagatcaggcttgggatgatgtagtacgtanagaaaaacctcgtgccgaattcttnnnnnnnnnnnnnnnnnnnnnnnnnnnnnnnnnnnnnnnnnnnnnnnnnnnnnnnnnnnnnnnnnnnnnnnnnnnnnnnnnnnnnnnnnnnnnnnnnnnnnnnnnnnnnnnnnnnnnnnnnnnnnnnnnnnnnnnnnnnnnnnnnnnnnnnnnnnnnnnnnnnnnnnnnnnnnnnnnnnnnnnnnnnnnnnnnnnnnnnnnnnnnnnnnnnnnnnnnnnnnnnnnnnnnnnnnnnnnnnnnnnnnnnnnnnnnnnnnnnnnnnnnnnnnnnnnnnnnnnnnnnnnnnnnnnnnnnnnnnnnnnnnnnnnnnnnnnnnnnnnnnnnnnnnnnnnnnnnnnnnnnnnnnnnnnnnnnnnnnnnnnnnnnnnnnnnnnnnnnnnnnnnnnnnnnnnnnnnnnnnnnnnnnnnnnnnnnnnnnnnnnnnnnnnnnnnnnnnnnnnnnnnnnnnnnnnnnnnnnnnnnnnnnnnnnnnnnnnnnnnnnnnnnnnnnnnnnnnnnnnnnnnnnnnnnnnnnnnggacaggacatnaaatacaagcgttcccctgnnagctcctcgtgcgtctcctgttcgacctngcgctnacgggaactgtccgcttctccctcgggagcgtgggcttctcatactacgcttagactcattcggtttggccgtggctcagctggtgtgggagacccccttaccgacgctggctatcggtatatcgctggtcaccgggtgaccaactacccctggacacccgggaaagataaagagttgtggggg

SEQ ID NO: 161664 - DNA, 1143 bp, Homo Sapiens
tttttttaaggttacacgattatttattgagagcctcctctccccgcccttgcaatctctaggtcactttctccgcttgtagattttgcgcgcaagccccagaaagacggctgggggcaggggtgctgcgtactgttcaatgagagccataatgtggctgtaactgtcttcctcatattgcaagaacactgctggcagatccagctcctcatatagcgccttcacccgggccactttctcagcctccttctgcccgtaattgtcctgaatctgaaagaactcccccttctccagcaggatcttcttggcattggcgtgctccttctcgccatcaatttcctgccatgtacatggctgcagctataggaaggtagaaggagtagaaagctgtcttgtacttgacaatagatttggtacctcttttcagtgaatctgacaagatccacattgccctggggggctgtgaggaggtccagggtctgcccaatctcagtctgataggaactctgcaggaagagctcgatcaggttcaggtaatagggctgctcccggcaatagagcttcagcaggcggtagatacatgctttccaggaggttagcatcattgatggcatgcagacccacgcccggcttctgataccagcagatctgtccccggcgggtaagggatgaatccatgatgtcatctgccaccaggaagaaagcttgcagcagttccacacaccagcccacagtccaggcccgctggagactatcagcatcctgtttccttggctccaccagctcccggaatgctactaccaccgtcaaaccccggttatacttgcctccaatggcattgtactccaggacctccttgagccgggcaatagcatctcctatctctgggtgccccatctcatcctcagtcagcaccctaacgatctgggagaagtgctgaacgaaatcctgcttttcttgggcataaacatctgaattctggtctccgttcattcttcaaaacggacacaacaggctggccttccgatgcctcacagtatcgttacagaagtaaggcccggtctcggcccccttcctccaggcccagcacacatcctctctccctcgtgccgattcaccacccagcctcgtacctagccatta

SEQ ID NO: 161665 - DNA, 856 bp, Homo Sapiens
gtcacatggggtccccaaagaggtcaggtatcatcctgaatctggaaggactccccccatcttccacaggatctttcttggcattggcgtgctcctttctcccatcaattccctgccatgtacatgctgcagcttataggaaggtagaaggagtagaaactgtcttgtacttgacaatagatttgtacctcttttcagtgaatctgacaagatccacattgccctgggggggctgtgaggaggtccagggtctgcccaatctcagtctgataggaactctgcaggaagagctcgatcaggttcaggtaatagggctgctcccggcaatagagcttcagcaggcggtagatacatgcttccaggaggttagcatcattgatggcatccaaacccacgcccggcttctgataccagcagatctgtccccggcgggtaagggatgaatccatgatgtcatctgccaccaggaagaaagcttgcagcagttccacacaccagcccacagtccaggcccgctggagactatcagcatcctgtttccttggctccaccagctcccggaatgctactaccaccgtcaaaccccggttatacttgcctccaatggcattgtactccaggacctccttgagccgggcaatagcatctcctatctctgggtgccccatctcatcctcagtcagcaccctaacgatctgggagaagtgctgaacgaaatcctgcttttcttgggcataaacatctgaattctggtctccgttcattctgagggaggagcaaagggctctcctcccagatacggaatctctgctcggtcccgcttgttggcggtactcctaaaacagatccgatacgc

SEQ ID NO: 161666 - DNA, 952 bp, Homo Sapiens
ggggtcccccccaggaggggccaaggtaatccaatccggaatttcgaaagggacttcccccccattttcccggcaggatcttccttgggcatgggcgtgttcttttctcgcccaccaattcctgcccatgtacatggctgccagctataggaaggtaggaaggagtagaaagctgtccttgtacttgacaatggatttgtacttctttccagtgaatctgacaggatcccacattgccctgggggtctgtgaggaggtccaggggtctgcccaagtctcagtctgataggaactctgcaggaagagctcgatcaggttcaggtaatagggctgctcccggcaatagagcttcagcaggcggtagatacatgcttccaggaggttagcatcattgatggcatcctaaccctacgcccggcttctgataccagcagatctgtccccggcgggtaagggatgaatccatgatgtcatctgccaccaggaaggaagcttgcagcagttccacacaccagcccacagtccaggcccgctggagactatcagcatcctgtttccttgggtccaccagctcccggaatgctactaccaccgtcaaaccccggttatacttgcctccaatggcattgtactccaggacctccttgagccgggcaatagcatctcctatctctgggtgccccatctcatcctcagtcagcaccctaacgatctgggagaagtgctgaacgaaatcctgcttttcttgggcataaacatctgaattctggtctccgttcattctgagggaggagcaaagggctctgttcccagatacggattcctgctcggtcccgcttgttggcgggtactcctaaaagcagaatccgctccgcgatcggctctgtgggtcgagcctcgtgccgaattcgccacccaggcctcgctaccttaggaccgtatagttactgcc

SEQ ID NO: 161667 - DNA, 1126 bp, Homo Sapiens
  misc_feature (690)..(750): n is a, c, g, or t
  misc_feature (1006)..(1040): n is a, c, g, or t
ggaactccctgctcgcggccggcagcagggtttgccgggggggcgtgtccggctgggtaccacccggtcctctcaaggtttctcccaggacttcccggggtttcctcgtcccacttggatttcctcgttgagccctgaagggggtggggcaccttccttattcgataaggccctttacttcgccaaaaacttccacctaatactcgtcccaaagacccgtgcccgtccccgtcagggtccccgggcgcggaagggtgtcttgctctcctccatggcctcctggaagtgctcggccgtcttctccatgatccagcggtgcatctcttgggcactgatcttccggtcagtgttcacatccaccttggaaaagatggccatcagcttcctccggctccgccggcggctccgcgtcctcatcaaaagccacccaggtccttgcctaggaagacctcctggtggaagccgcgattgaggtgcccgtccatctccagcttcaccccgttcaggtggtctgggggcaggatctcattctcctccctgttggctactctctctcgagtggacgagtggttggcaggccgtgcagacgcgtccatcagaaggactgcccccaggagccagaggcagcacggagccaggccaatgaggggaccccacctggacgccatcgccacccagggccagaccatnnnnnnnnnnnnnnnnnnnnnnnnnnnnnnnnnnnnnnnnnnnnnnnnnnnnnnnnnnnnnagtgaggtcctggctccaatccaatccccgggcaccacggagggctctgtgtccccaggacggccgcaggatggggacaagcagctcacagtcggtctgcctccccgcgctcgggatccgaggaccggagcgaagcgtcagtgacgccgccaacgggcccggatcaggccactgccatctttctttcggggcggggggcggtgcccccggccgtaatggccgaattcccgggcatatgtccggtaccgtcgactgnnnnnnnnnnnnnnnnnnnnnnnnnnnnnnnnnnncggccgcttcctcgctcaatgactcgctgcgctcgtcgttcggctattgaggcggaggcgccctatagtgagtctatcatattggc

SEQ ID NO: 161668 - DNA, 645 bp, Homo Sapiens
  misc_feature (447)..(447): n is a, c, g, or t
gtaaggttgaatgcacttttggtttttggtcatgttcggttggtcaaagataaaaactaagtttgagagatgaatgcaaaggaaaaaaatattttccaaagtccatgtgaaattgtctcccattttttggcttttgggggggttcagtttgggttgcttgtctgtttccgggttgaagatgtcccaggagtaataggtccaaagtctagtttggtctgcagtgtctctgggcgtggcgtggttttatgtttgggacgtggacgacgtgttcttgttcgttgcgatgtttttggagctaatgttgtcactgtagcctcagttctcacagttacaggctcaatgtctgtggtgggaacaggtttggtgtgtgtcacttctgggctgagagggattttaggtttcagagaaataaaattgtgtttaccgggagccggtgttgtcatgtangttcagggcttttagaaattttaggttgtattggtccggcaacttgtggtctttcagggtgggttcttgcggtttgggccggggcgtcgtttagtgtaaaagggatagatgaagttgctggggagcagtgcgtagccgcatttttggctggtaagatttcagtttgaggacaatgtggttcattggaccaggttccct

SEQ ID NO: 161669 - DNA, 1263 bp, Homo Sapiens
  misc_feature (1142)..(1142): n is a, c, g, or t
  misc_feature (1198)..(1198): n is a, c, g, or t
cagtcgacggtaccggacatatgcccgggaattcggccattacggccgggggcggtacggcgtgttggtcccagcggttcagctgaggtagggacgtgctgtaggccggaatgttaccggctgttggatctgtggatgaggaagaggatcctgcggaggaagattgtcctgaattggttcccattgagacgacgcaaagcgaggaggaggaaaagtctggcctcggcgccaagatcccagtcacaattatcaccgggtatttaggtgctgggaagacaacacttctgaactatattttgacagagcaacatagtaaaagagtagcggtcattttaacatgaatttggggaaggaagtgcgctggagaaatccttagctgtcagccaaggtggagagctctatgaagagtggctggaacttagaaacggttgcctctgctgttcagtgaaggacagtggccttagagctattgagaatttgatgcaaaagaaggggaaatttgattacatactgttagagaccactggattagcagaccctggtgcagtggcttctatgtacagggttgatgctgaattagggagtgatattcatcttgatggtatcataactatcgtggattcgaccaatatggcttcacaccatttaacaagaaggagaaacctgatggccttatcatgaagctactagatccatacatggactagggacaaatcttagaaacccaacagatcacgagttgatctctctactgtattagatcttcatgcctttgattagtactctctggaatacgtttgcagaaaaaacttcagcttgtgccaggaacacaacctcaccttgatcagagtattgttacaatcacatttgaagtaccaggaaatgcaaaggaagaacatcttaatatgtttattcagaatctcctgtgggaaaagaatgtgagaaacaaggacaatcactgcatggaggtcataaggctgaagtttgaactgaggctgatcaatgttcagtcaattctcctttgagcagggattggtgtcaatcaaagacaaatcacaacaagtgattgtccagggtgtccatgagctctatgatctggaggagactccagtgagctggaaggatgcactgagagaccaaancgattggtcctcattggcagaaatttagataaggataccttaaccactgtttatantctgtgccagaacagaaagcagtggcaccattcaagaagtcagttgtcatacctagtgcattctt

SEQ ID NO: 161670 - DNA, 1031 bp, Homo Sapiens
  misc_feature (322)..(389): n is a, c, g, or t
  misc_feature (911)..(945): n is a, c, g, or t
gttattttttggcataggtgatcttcattagcatggaaccgttttgatcttaaatcccctgtaaagcaatccctggcagcttccagcctgcccatcagtgttcaattgtcacaaaagcaatgtcaatgcctcccctggtaccagacgtacttccttgaaagccagggaactgattaaacagcatggataacatcatctcattagtctcttctggtaagttattaaggaataaaatattagtttggagggtaatcagggacctgaggatttggtgttgaatttccttgggtattagctgaatttggagttccctggccaggcnnnnnnnnnnnnnnnnnnnnnnnnnnnnnnnnnnnnnnnnnnnnnnnnnnnnnnnnnnnnnnnnnnnngtcagcaaaagttccacgcatttttgatattattatccgaatctgtttttgcatactgtattcgcattggtttaccataaaatggaaatccttgtagctgtctcaaggcatttgtggatgagcccagttccttaaatatgacaaaggcctgccccctcatcttcatggtctttaaagccacaatgtccaccacatgaccaactgagaaaacagggcatatagggatctcttcaattcttcctttttaattttgtcattcatattgttgatataaattgtatgatttggtctgatatccatgtttgtgttaaattcttcaggagacagtaaaaaatcccagcttcgcgcttcgtccgctcccagctgcaacaggggagaaaagggccgaggagccaggaaaaccgaaacagcgaggtagaaggcgcacgaacccacctaaggcctacgccgactactgtaagaaccaaagcccccggccgtaatggccgaattcccgggcatatgtccggtaccgtcgactgnnnnnnnnnnnnnnnnnnnnnnnnnnnnnnnnnnncggccgcttcctcgctcactacttcgctgcgctcgtcgttcggctgtgacgcggtagcgccctataggtgatctatacattctttt

SEQ ID NO: 161671 - DNA, 754 bp, Homo Sapiens
gaaagccactgactttattgatctaaaaaactttacaaggacagtgactgttctgccaaaaaaggagccaaatggtatcaaacgggattgaaagttgagggtgggggtgagggatgggggccgggaatccattcaggaaagctggtaactgtcaccagggaactggcaagggaaaaaggacgggggaggcatgcaagagcgagaatccaaaaaaaggttgaaatggttaggggagaaaactcccaaaagaccccggagtacgtcggaggtgagtacgacaatagcaatcttttccttcgtagaggacaggggaggagtccctactcggctgcaaactctggatgagggctggggattgagagcttcccagagagcatcacaagaaggcgtcgcaccactctcgaaggcatccgaagcagtcccgggactgcttggcgttggcgccacaagtgtctttcagccattcccggaagaggtcttcatctttctttagcaccagaaactggccaaggacaacataggccttgtcaaaacccctttcctccagcttcttgcccaggacttcaccaatcccagccaggctccccactggcttctcccccatgggctctgccacgaagtctcggtgcttttgggaggttgtcatcttgatcaggcttaatccgcaacttcagttcccgtaacggttcctcccgccacccggccgctcctgcggatacctcaagccactagaactttcttccacttccgcccc

SEQ ID NO: 161672 - DNA, 660 bp, Homo Sapiens
  misc_feature (94)..(94): n is a, c, g, or t
  misc_feature (579)..(602): n is a, c, g, or t
tgaaagatcgatgaattttttaaatatcagaagaaaagggaaataaaattttccccccaaaacacataagacccacttactggcacttgtattntaagtacctgggaaaaaaacggaacagatttttaaaggcaataacgacttgtaagacggcttgtttcatttgatttggcacgaagtaaagtaagagtaaatatgccatggaagacataatcaagtttttcctccatctctcatatttccccacttctaccagaccacacagtacatcagcaaccatcctttagattccaatttttaaatggctgctcagacgacaccaatagagttctttctccttaaaatatggtggcagtgaatgctaacaggtatcaatttctttgatcaggaacaaagaactccttcaggaaactcactttcctggtccttgttaacctatcatgtaaattctttttattggtacacctgtttactaattataattgattgctatttatgccaagggagcatttcccaggcatgcctcatctatttactaacaacaaagtatgcttactttatttacatagtgccacgggnnnnnnnnnnnnnnnnnnnnnnnnattggcgggggagatggtactataacttgttatttatcagggcagatcacacatttgg

SEQ ID NO: 161673 - DNA, 914 bp, Homo Sapiens
  misc_feature (406)..(429): n is a, c, g, or t
cagtcgacggtaccggacatatgcccgggaattcggccattacggccgggatatatgctgtatttattttgtcgttaagcatactttcagtttactcagaattttcaatttgctataaagatgtatcaattagcatatagaaaaatattactttaagatgacttgtttcctttgaaaatacctgtgtactgagggttatgatttttgtcaaaaattgacataagtgcttttacaagcaccaaagttgaatgaattttcaacaaaatgtaattaaagtctatgttttcagttatgactcaggttaagaaatgtgttttaggatctacttgctggtttttctttttgatccaaatgtgtgatctgccctgataaataacaagttatagtaccatctcccccgccaatnnnnnnnnnnnnnnnnnnnnnnnncccgtggcactatgtaaataaagtaagcatactttgttgttagtaaatagatgaggcatgcctgggaaatgctcccttggcataaatagcaatcaattataattagtaaacaggtgtaccaataaaaagaatttacatgataggttaacaaggaccaggaaagtgagtttcctgaaggagttctttgttcctgatcaaagaaattgatacctgttagcattcactgcaccatatttcacggggaaagaactctatggtgtcgtctgagcagccatttaaacaattggaatctaaaggatggttgctgattgtactcggttggtcctggctagaagtgggggaaatcatgacagaatgcgggcaaaactgcattaatgtcttccatgggctatttactcttactttacttcgtggcaaatcaatgaaccagccgtctacaagtcgtactgctttacaatccgtccgtttttccacagtacttaatc

SEQ ID NO: 161674 - DNA, 870 bp, Homo Sapiens
  misc_feature (756)..(790): n is a, c, g, or t
gacacaagaagagacacaggtaggggccagttactcatgtattgctttttaaaggcaaacacaaaggtgtcacacatgaccttctagtcacaatccactgcccaaacctcagagaccataccaacgttcaaggaaagttagtacatgttgtttccagcttgacacccatatatctataccacttattaacttctaaaataatagatcagtcacttagtctcacagtttctaaaatgagccttcatacgatcctaccctttattgacagatatttgaatattttatattacatcaataaagttcaattaaaacattttccaggattttcactcagccatttgcaatggattatttacatttatcagtatcttttcctctctacaagttaccactttctcaaagtaaaaggattaaacaagtaaaagaatacataaggagttcaacataaaagtacactgctataaagcctaatataaactattagctaacatttgttaagcagtgtattttacatatataatttcattgaaacctcacatcaccttataagataagggcttcttatctcataggtgagaaaactaaggattagagaccttatgttacccaagatcgtaaaattggtattacggcaacccaactttgagttcctagccactatgctttaaaagtgagtattttctccatactttaaattctctaaatcccggccgtaatggccgaattcccgggcatatgtccggtaccgtcgactgnnnnnnnnnnnnnnnnnnnnnnnnnnnnnnnnnnncggccgcttcctcgctcactactcgctgcgctcgtcgttcggctacaaccgagctagcgccctatagtgatctatacatt

SEQ ID NO: 161675 - DNA, 1038 bp, Homo Sapiens
  misc_feature (221)..(276): n is a, c, g, or t
  misc_feature (486)..(486): n is a, c, g, or t
tcattattaacaaatttattgaacaactagaacttgacaagcacatgccaggtagaggggatacagtggagagcaataataatgatgataatgaggagtagtttttccctagcaggcagcagttgaaaggaatattggtttaacatccaccaatgagcaggggtggatagacccctctcctggagacagagtccataacgggattaaaaatatccctgtannnnnnnnnnnnnnnnnnnnnnnnnnnnnnnnnnnnnnnnnnnnnnnnnnnnnnnnctgctactgcatacaggcccactccgtctgcaaccacaggtgcttccacagtcgggatgttctctcccttgttgttgctccactgtatttggggtgtgggtaccagccagtggacctgcactccagatggatccctccatccttgtaacccttcacttcaatgtgaagatcagaacccagtgctgcaaccttcagctccaccagggcttntttcgtagaagtcaccatcttgggaaataacacaggtactttccactgtcagaggctgtgacgttgtgtattcggagagcagccttccctgcagtgatgccatcccgcagaatcgaagttctccctcgatacggtgcactctgcctgtcttccacttcctttccatctgcatacacgttcaccacctgccttaggctggaactcacccacctcagctccatggtctctgcactcatggtcgggaacaggtgacagggcagatcagcgtcttcacccaccatggccaggatgggcccagagggtccaagcacagaaaactgagctctgccaaaaatgtctgtccttgagtgtctttacctttgggttccagtatggaaaaccatttcttagtattcccctctgaaaatcacagcccactgaagaatggtggttaatagttctccattctttctattatggttgagtctctcattccgaagaaaggaaaaagaaagcagaggctatctcctcgtgccgaattcggcgcgccgtcgacttcatactctctccccc

SEQ ID NO: 161676 - DNA, 843 bp, Homo Sapiens
cataatagaaagaatggagaattattgattgaccgtctttattctgtgggctctgattctccaatgggaataccaagggatggttttccatactggaacccaaaggtaaagacactcaaggacagacatttttggcagagctgctcactccttgctcagctcagttttctgtgcttggaccctctgggcccatcctggccatggtgggtgaagacgctgatctgccctgtcacctgttcccgaccatgagtgcagagaccatggagctgaagtgggtaagttccagcctaaggcaggtggtgaacgtgtatgcagatggaacaggaagtggaagacaggcagagtgcaccgtatcgagggagaacttcgattctgcgggatggcatcactgcagggaaggctgctctccgaatacacaacgtcacagcctctgacagtggaaagtacttgtgttatttccaagatggtgacttctatgaaaaagccctggtggagctgaaggttgcagcactgggttctaatcttcacgtcgaagtgaagggttatgaggatggagggatccatctggagtgcaggtccaccggctggtacccccaagcccaaatacagtggagcaacgccaagggagagaacatcccagctgtggaagcacctgtggttgcaagatggagtgggcctatatgaagtagcagcatctgtgatcatgagaggcgggctccggggagggtgtatcctgcatcatcagaaattccctcctcggcctgggaaaagacagccagcatttccatcgcagaccccttcttcaggagcgccagcctggatcgcagccctggcagggacctg

SEQ ID NO: 161677 - DNA, 1010 bp, Homo Sapiens
  misc_feature (877)..(911): n is a, c, g, or t
  misc_feature (974)..(974): n is a, c, g, or t
  misc_feature (982)..(982): n is a, c, g, or t
tcaaagaaaggaagaacctgaatctgttaatggcaatttggaaagataatatttcctagtccccgtatatgtgtttgttttaccagatatgcttgaatgatgcgattatgaaaccgggatctgggcaatccagaattcattccaccaggactccatccttgtttttttgtatcagtgggaacaccttctggaattgcaaggtgcagatgctgcctcatccaaataagactgtcttcatcagccagaagctcatcaccttagtgcatccaactctgcttctaaatcatcttcatccagttctggggtgccataaactgcgactcagtgcttcttggatttcatttgcatcttccatcatatcctctagctggtcttgtaaatcctcaatctggtcgatcttcacttgcttgtatgccttcttcatgttcctttactcccagtttcatagcatcaaccgtggtcttggtgtccttcaaagactggatggtataattggcttgttccatgttgaatgactgttgggcaagattgtcccgctgctgctcatacatcctcttttgctttaaaactccgcaaggctttctgcttgaccattattcttttgcaggaccctctctcatcttcttgatctgatccttatacttcactagctcagcatccaatcgagaaatcttcttgtcaatggattctgctctactgtccaccgtgccaatgcagtcagtcaggctgggcggcggagccttgggtttcgctttcccgaagagtcggttcatcttgagcagccgcgaagaaacccaaacactagagcaaaaccagaaacggaaaccccggccgtaatggccgaattcccgggcatatgtccggtaccgtcgactgnnnnnnnnnnnnnnnnnnnnnnnnnnnnnnnnnnncggccgcttcctcgctcactactcgctgcgctcgtcgttcggctcgacggctagcgcccatangttgaggngttcaattcatcaagggttttctctttt

SEQ ID NO: 161678 - DNA, 728 bp, Homo Sapiens
  misc_feature (117)..(236): n is a, c, g, or t
  misc_feature (254)..(533): n is a, c, g, or t
  misc_feature (652)..(686): n is a, c, g, or t
ggcagaatccagatgctcaaggcccttcataatatcccccagtttagtagttggacttagggaacaaaggaacctttaatagaaattggacagcaagaaagcgagcttagtgatacnnnnnnnnnnnnnnnnnnnnnnnnnnnnnnnnnnnnnnnnnnnnnnnnnnnnnnnnnnnnnnnnnnnnnnnnnnnnnnnnnnnnnnnnnnnnnnnnnnnnnnnnnnnnnnnnnnnnnnnnctgaagttctcaggatcnnnnnnnnnnnnnnnnnnnnnnnnnnnnnnnnnnnnnnnnnnnnnnnnnnnnnnnnnnnnnnnnnnnnnnnnnnnnnnnnnnnnnnnnnnnnnnnnnnnnnnnnnnnnnnnnnnnnnnnnnnnnnnnnnnnnnnnnnnnnnnnnnnnnnnnnnnnnnnnnnnnnnnnnnnnnnnnnnnnnnnnnnnnnnnnnnnnnnnnnnnnnnnnnnnnnnnnnnnnnnnnnnnnnnnnnnnnnnnnnnnnnnnnnnnnnnnnnnnnnnnnnnnnnnnnnnnnnnnnnggagtcaggtgcaccatggtgtctgtttgaggttgctagtgaacacagttgtgtcagaagcaaatgtccccggccgtaatggccgaattcccgggcatatgtccggtaccgtcgactgnnnnnnnnnnnnnnnnnnnnnnnnnnnnnnnnnnncggccgcttcctcgctcactgacttcgctgcgctcggttcgg

SEQ ID NO: 161679 - DNA, 690 bp, Homo Sapiens
  misc_feature (65)..(65): n is a, c, g, or t
  misc_feature (144)..(240): n is a, c, g, or t
  misc_feature (253)..(484): n is a, c, g, or t
  misc_feature (575)..(609): n is a, c, g, or t
ggaatgaaaataaatgttttttattaggcagaatccagatgctcaaggcccttcataatatcccncagttcagtagttggacttagggaacaaaaggaacctttaatagaaattggacagcaagaaagcgagcttagtgatacnnnnnnnnnnnnnnnnnnnnnnnnnnnnnnnnnnnnnnnnnnnnnnnnnnnnnnnnnnnnnnnnnnnnnnnnnnnnnnnnnnnnnnnnnnnnnnnnncagaccaggccannnnnnnnnnnnnnnnnnnnnnnnnnnnnnnnnnnnnnnnnnnnnnnnnnnnnnnnnnnnnnnnnnnnnnnnnnnnnnnnnnnnnnnnnnnnnnnnnnnnnnnnnnnnnnnnnnnnnnnnnnnnnnnnnnnnnnnnnnnnnnnnnnnnnnnnnnnnnnnnnnnnnnnnnnnnnnnnnnnnnnnnnnnnnnnnnnnnnnnnnnnnnnnnnnnnnnnnnnnnnnnnnnnnnnnngaggttgctagtgaacacagttgtgtcagaagcaaatgtccccggccgtaatggccgaattcccgggcatatgtccggtaccgtcgactgnnnnnnnnnnnnnnnnnnnnnnnnnnnnnnnnnnncggccgcttcctcgctcatctgactcgctgcgctcgtcgttcggtataaccgcgtagcgccctatatagtctgtcagtttt

SEQ ID NO: 161680 - DNA, 861 bp, Homo Sapiens
tgacttctccagagcacagctccatacacgggtctgatggggctttgcgcaagcccgtgtcggggaaggcctggctgaagctacaggagaagttggtacgggatctcctccccggctgggttcaccattagcctccgactgcagtgtgaaagagccctgtcctcaggtgtctcctggtctgttccttcacagatactcccttctcattaggcaccaggggcttcccatccaagtgccagctaagagtccctgcagggtagcttccctctgacacacatgtccccaccttattgggaacaccagccgtgagttcagaggcagaatctacaatttctggcttcccaggaatctggtagacacggactcggtagttggacttggtctcctgttccattcctgttcattgcctggcaccggaaaatcccctcatcctggatcccgacagccggaaggaagagggagccgttgggaaggacacgagccacactgtcccaggggcctcctccctggggagacaggaccttccaagcttctgtccggcctgtgttcagtttccattccagccgctggggtggtttcttgggggcgcccttacacttcagcaccagtggctcgccaatccgggctgtgatgttttgagcacctactactgccccccacagacctgaggaccagcacccaggctccaactgctgttccggctgccatcctgcttccttccagggtcctggctctgtctgcccctctccctgctgtggcctccgccctaggtggggcctgcaccctctctccagcccccatctttcagtcccccggccgtaatggccgaattcccgggcatatgtccggtaccgtcgactg

SEQ ID NO: 161681 - DNA, 1623 bp, Homo Sapiens
  misc_feature (214)..(275): n is a, c, g, or t
  misc_feature (1070)..(1082): n is a, c, g, or t
  misc_feature (1564)..(1564): n is a, c, g, or t
cagtcgacggtaccggacatatgcccgggaattcggccattacggccgggggaggctcgcaagtgcgcgtggccgtggcggctggtgtggggttgagtcagttgtgggacccggagctgctgacccagcgggtggcccaccgaaccggtgacacagcggcaggcgttagggctcgggagccgcgagcctggcctcgtcctagagctcggccgannnnnnnnnnnnnnnnnnnnnnnnnnnnnnnnnnnnnnnnnnnnnnnnnnnnnnnnnnnnnntctgcgctgtctctccgatggcgtccgcctcaggggccatggcgaagcacgagcagatcctggtcctcgatccgcccacagacctcaaattcaaaggccccttcacagatgtagtcactacaaatcttaaattgcgaaatccatcggatagaaaagtgtgtttcaaagtgaagactacagcacctcgccggtactgtgtgaggcccaacagtggaattattgacccaggggtcaactgtgactgtttcagtaatgctacagccctttgactatgatccgaatgaaaagagtaaacacaagtttatggtacagacaattttttgtccaccaaacacttcagatattggaagctgtgtggaaagaggcaaaacctgatgaattaatggattccaaattgagatgcgtatttgaaatgcccaatgaaaatgataaattgaatgatctggaacctagcaaagctgttccactgaatgcatctaagcaagatggacctatgccaaaaccacacagtgtttcacttaatgataccgaaacaaggaaactaatggaagagtgtaaaagacttcagggagaaatgatgaagctatcagaagaaaatcggcacctgagagatgaaggtttaaggctcagaaaggtagcacattcggataaacctggatcaacctcaactgcatccttcagagataatgtcaccagtcctcttccttcacttcttgttgtaattgcagccattttcattggattctttctagggaaattcatcttgtagagtgaagcatgcagagtgctgtttcnnnnnnnnnnnnnctcttgaccagaaaaagatttgtttacctaccatttcattggtagtatggcccacggtgaccatttttttgtgtgtacagcgtcatataggctttgcctttaatgatctcttacggttagaaaacacaataaaaacaaactgttcggctactggacaggttgtatattaccagatcatcactagcagatgtcagttgcacattgagtcctttatgaaattcataaataaagaattgttctttctttgtggttttaataagagttcaagaattgttcagagtcttgtaaatgttattttaataatccctttaaattttatctgttgctgttacctcttgaaatatgatttatttagattgctaatcccactcattcaggaaatgccaagaggtattccttggggaaatggtgcctcttacagtgtaaatttttcctcctttacctttgctaatatcatggcagaatttttcttatcccttgtngaggcagttgttgactgagtttttcatcctttacaatcctgtcccatggtatttaacat

SEQ ID NO: 161682 - DNA, 976 bp, Homo Sapiens
  misc_feature (687)..(718): n is a, c, g, or t
  misc_feature (878)..(912): n is a, c, g, or t
aatgcagccttgctgtcgtgcttgataaccattcttggttgtaactttttgggtgccttccacgttgtcccaaacaggagaggtgcccacggattaaggataaagtttcgccataagttccctaataagaatttttcgaaaagagaaggccagtaattcatcttgaagtgtgtccacttgaaagaccgagcttattttatcttatgtaaattggctcggccttgtcaaccagccactacaaatgggcctcttgtgatcatgttaaccggcagtatttattaaatttctcctttcagatgctgtcggtattgttctctatggctgtagaaagactggttattagccataaatgactgtatttcatcttgtgagataaagatttcctcatctgaagtacattcagactcatcaaggagttcaactaagctcttggcaccttttccggaatcgggaccaaacaacgtttctgtaggttctgcaaactgtggtacattttgtcctatgctcaaaccaaggcaatggctgcccacccttttcagagctgcaacagctttcaggatgtgtatctttggtcttgtcacggtgaaacactgtgtgcatggtatttcctgaggtctctcgattacctggatctgtaatacagcttccaagcttctggatatgttcatcacatttcagtatcttgcnnnnnnnnnnnnnnnnnnnnnnnnnnnnnnnngtgtcgttctcttcagaatttgcccaacattcaacacaactatcaccatcatcctctttgtcttcacagtgatgaacacaagagtcatcaccgtgttcatcatgattaccccggccgtaatggccgaattcccgggcatatgtccggtaccgtcgactgnnnnnnnnnnnnnnnnnnnnnnnnnnnnnnnnnnncgccgcttcctcgctcatctgactcgctgcgctcgtcgttcgctcgcagagctagcgccctata

SEQ ID NO: 161683 - DNA, 1044 bp, Homo Sapiens
  misc_feature (57)..(95): n is a, c, g, or t
  misc_feature (98)..(132): n is a, c, g, or t
tcaacccccacagacgccgccagatgatagatcatatagggcgctactcgttttagnnnnnnnnnnnnnnnnnnnnnnnnnnnnnnnnnnnnnnncgnnnnnnnnnnnnnnnnnnnnnnnnnnnnnnnnnnncagtcgacggtaccggacatatgcccgggaattcggccattacggccgggggagctgggagacaagcccgcgcccaacaccttctatgtaggcatctacatcctcatcgctgtgggcgctgtcatgatgttcgttggcttcctgggctgctacggggccatccaggaatcccagtgcctgctggggacgttcttcacctgcctggtcatcctgtttgcctgtgaggtggccgccggcatctggggctttgtcaacaaggaccagatcgccaaggatgtgaagcagttctatgaccaggccctacagcaggccgtggtggatgatgacgccaacaacgccaaggctgtggtgaagaccttccacgagacgcttgactgctgtggctccagcacactgactgctttgaccacctcagtgctcaagaacaatttgtgtccctcgggcagcacacatcatcatgcaacctcttcaaggaggactgccaccaggaagatcgatgacctcttctccgggaagctgtacctcatcggccattgctgccatcgtggtcgctgtgatcatgatcttcgagatgatcctgagcatggtgctgtgcttgtggcatccggaagcagctccgtgtactgaggcccctgcagctctgggcacagggaccttctgcagttgccccctaagtgaaccggaaacttccgagggggccatcaacgctgtgtatataacagtaacgggtattactctgactacaacgtagccctttttacatataggagaaaaagaaaaggatctgaacttttcctgttaccctttccacgggctgacgtaccattgtacagtggcgatgaactacagtcacacaaccgcctgcacacatggagcacggaggccaacagatcatacttgcctgggataccc

SEQ ID NO: 161684 - DNA, 1143 bp, Homo Sapiens
  misc_feature (1019)..(1053): n is a, c, g, or t
  misc_feature (1057)..(1098): n is a, c, g, or t
cgtgtaatcgctttatggcttggctcccttggtgttgttgcgtgctacgggtaggtgttatcggctcttgtgctgggttttctgtatgttgtgcgctccgtgtgttcactcttcgtgcccgctgttttgccgtagctggttctgtcacgttgcgtttccgcggttctgtctacttgtggttcagtattgccccatggcctgtcccaccgattactgtgtatacctttcgtcaccggtgggtggtctgtacgtggtgtgtagatacgctgggtagagaacctcggacatatttccaggatcttgcgtgcatgaagccaaaaatctggcgtgtcgtggttgcaatgtttgctctttattatcctggtttgcagtatctctgtgtacacatttgtgtgcactctttccagactttctattcgattcggatttcctgtcacatcccccatagtatgaattcttcgcactgtcgagtgttaaatattgaagatatatcttggtcatgattgctttacatgggccatcatccgcctggaatgcacagaatgaatgcataagtgtcagtggtggcaactccgtatctgtgataattgttgttcttcatcttcctcagaatcagcattaagaggggcaggggcaagattaagcagcaggcatacagaagcccaaagtgcatgtactttcttcattgtgtaaatcatctcttgtgctgctaaccgctgagactgctgttcaagtaaaatctctgatgaaagttcttggaatgtttttttcaaaacggagttgaggttattttgtttttccttccaggtattgaagacaggatttatcttctctacttcttcttttagaagcagatcaagaaactggcgattgaagagtaactgaaagaaacgcaatctgatcttactagcagtgaaagagcgaggtaagaatttgactattatccagcctaaagtcgctgctgtctccccggccgtaatggccgaattcccgggcatatgtccggtaccgtcgactgnnnnnnnnnnnnnnnnnnnnnnnnnnnnnnnnnnncggnnnnnnnnnnnnnnnnnnnnnnnnnnnnnnnnnnnnnnnnnncaaacagccgatgcccccatatatggatgattgttctttcccccc

SEQ ID NO: 161685 - DNA, 721 bp, Homo Sapiens
agtttataatgttttactatgatttagggcttttttttcaaagaacaaaaattataagcataaaaactcaggtatcagaaagactcaaaaggctgtttttcactttgttcagattttgtttccaggcattaagtgtgtcatacagttgttgccactgctgttttccaaatgtccgatgtgtgctatgactgacaactacttttctctgggtctgatcttttaaccatttttgtgagtgctaaattggcatcatatgtcaagttttatcagaataataaagacttcattgattcacttggcctgttacatgaacagaatatggcaaaaatgagactacttacttttatgggaatggcagtagaaaataaggaaatttcttttgacacaatgcagcaagaacttcagattggagctgatgatgttgaagcatttgttattgacgccgtaagaactaaaatggtctactgcaaaattgatcagacccagagaaaagtagttgtcagtcatagcacacatcggacatttggaaaacagcagtggcaacaactgtatgacacacttaatgcctggaaacaactgtatgacacacttaatgcctggaaacaaaatctgaacaaagtgaaaaacagccttttgagtctttctgatacctgagtttttatgcttataatttttgttctttgaaaaaaaagccctaaatcatagtaaaacattataaact

SEQ ID NO: 161686 - DNA, 1302 bp, Homo Sapiens
gatagtagaaaaaatacctttttattaattattaggaataatccattcatgtaatgcaggatgtatgttggagaaggttaagtacagccacatgaatgaggggaaacgtgcaagaggaacagtggtgagaagggggatggtcccccactttccacaaactataaacagcaacatgaacacagagaatcacaaataagagggtctttcctcatgtctcctctcaccccattcttccataatgagtcccagttggtccctagaggtgccagggcatctggaagttctgggctgggagtggggtgcagtgagtggcctcaaagttgtgcagatgcttccgagccagaaacaaagccagctgccgccgtccatctgcactcatgtcctggggctggaagcctaggcggtggatggcaaactggaccaccacatccatggcattagcctcattctgcgggaatggcacccccgtgcttccagcaaagcctggatgattccagcccaggactgaatatccagcttccaggggcgtggagacgcagcccacctcataaaacccagcattcccctcacagcagatcaccagcttctgtccctggggctcagctgtcccccgccggtccacaaacatggtgtcaatctcattgccatcacaggccagcagctttgcccggcgcccattacactcttccaccagtcgggcctggccctgcagcagcacaggcatgaggggcttctgcagcaggtacacagagcctggatacagcatccggcgccctagggtgtgcgccaccaggtagctggtgatctgacaaggcagcttcttaacccggttgaggagggtgtctgctgtcccccggtgcaggggctctgggcgaagcagggccacaccccggcgggaagggccccctcgagactccttccggctgctgggttcttcccagtggaagtcgactggccagctccggaagtcaaagttgtagttggcaagctgcctcttgttttgctgaagactggttccgatgtgttgcttccaagatggtgatgaactgccggtactgggggttggtccagcggccatgcctcggaggcaggccacacctgccagaagtagcagcaatgtcccagcatagtgagaaaacggcaccactttggacaaactcaagtaacccaggagctggaatggggggcagtgactgccgttggcgtctcagggacgctggccggggcccctttcagagtccctctcccggtagattttgtagagccgggggcctaggacgcagctcagcagcttcgccatgg

SEQ ID NO: 161687 - DNA, 901 bp, Homo Sapiens
ccataatcttcagttctggttcaggagtaaggctgagactcctccgaagtccttggggtacgggagctgttatccaacttgttcatagcaacggccacatggcggggtccccgggggtcacaacacatacagattgtggtcattttctggcaagaggtccaacatcgtgcaagaccaggcagtccccactgcttcatcacggcagggcctctcgcaccccaacgttcaacagttttgccctgttaaatggttccatttccagcctggtggatgacatagatgccataagcaagctgctggcgctgcaagaaggggtgcaggtggtagagcagcaggcgcaggtggtgctcccgggcacgatgaggcacaatgatggctgttcgggagcggggctcacaacctgcagggcggtaccggccccctggttctacccggggattccgctccacaatctctgccagtgatggcactgggctaaaggacaccgacacaggacccactaagagaggagatcgttctggacagtagggcagaccttgaggagctggaggaccccctggggccccaggcaggtgactgaggttactgtagacatcacgagggtgagaatagtcaaatgtcggtccctgatctcggccaaatagggcactgagacttcggaagccccccagtgacaggtacatcatgacagccagctgggagcccacaagcagggccagcgtgcaaggccgctccagcagcctccgcaacatcctgggggtgagatctaggttcaagctgtcttcttagggatcatgggggctccagggggtcccggggggacagagatgtgaggcattatctggtcttttgctgcctgtcgtcaccgccaccccaacagccgggcaggcatcgctgccgc

SEQ ID NO: 161688 - DNA, 462 bp, Homo Sapiens
  misc_feature (61)..(61): n is a, c, g, or t
  misc_feature (74)..(74): n is a, c, g, or t
  misc_feature (354)..(354): n is a, c, g, or t
cagatgtcacgaacagggacagcaacaccgacaccaccgtgactatgatgacccatctggntgtccgacacagnatcatagatcttccaacatcattcggggctgaggtgtttgtgaaaagatgttgccaccgcgagacattcaagtccagcacagccaggctggttacaggtggtgctgcagttgacctcgaagggaccctttgggctcaaccgccagcttctttggcctcacgtgtacctcgaataccttctgattcgatcctggacagcagatcagggtgaagagggccacagtcagggtcctgtaaccgaaagaggacatctctggcagtctccacgggctcgcaggganccagccaagggcttcccctgtgggctccaagaagggtagctctgggatcccgggcaggaaattggtgacaaggtgacaaggtgcgcgtgtcacagctgcccagttcac

SEQ ID NO: 161689 - DNA, 851 bp, Homo Sapiens
acaggttcgggagcatttctgcggtgagtccaggtcgcacaggggcatcgtcgcctcatggcgcttctagatggcctgagcggatgaaactgcaggcgtcttcagcgtgccgccatgtgacaggcttcatgggacagagcgtactgccatcctctcaaagtgtaggtggtgagcaccagaagaagccatcgctgcggccggtatcagtgcagctgttgtactccttgccattgaacaagaaggggaacttgcagtactccccatcggcgttgccatacttcacacggaccacttggccttctcccaaggtccatagctcatcgtcatcaaaatgggagtctccccccacaccagtgccttgggcgaaggcatgagccaggagtccgtccttacccgtcaaaggggtatcccatcgccatgctcccagcggccaaagttgatcatgatgtctgcctctccatcatggattcgagaaaaccgcagtggggtcacatcgctccagacttggaaggcacgagcaaaggcatcatccactgtctctgggtccagatcaggtgtgtagccaatgatcctgtatgtgatctggttcttgtcccacttgggcttgcgagggaagaagttgtagttggccacatctgggttgccgcagcgtggcttccgcatggtctcgatggtattctggtcaagatcacctgtctggggcagtccaaagaacttctgcatcttctttagtgtgtccttcagcacaaacaggttgcagctctccttggggcagccatagaaggtgttcaggtattgcactgccacctcgtgccgaattcggcgcgccgtcgacttcatactctctacac

SEQ ID NO: 161690 - DNA, 971 bp, Homo Sapiens
  misc_feature (859)..(893): n is a, c, g, or t
ccgggtgcggtcccgggacaattttggtccttcagaagtgttaagtgggcactcttgggggcaaaaaggcagtctttcgaagcgtggtgcagggtcctccccaccgtgacggcccctgttagctccggctatacactggttatccagcatagcccagcgaaaagcccctggtgcttgtccttgaatcggtggtgaagaggtgggtcatgtcccaagtagaattccaccaggtagtttcaaaggaacttttgaagattcagacactgactagagttactggtttaatacaggatcgtgactgagggcagactgcgattgctgcaaaatagaactgtatatcctcccggggcctcggtttcaaagacaccttctgcaacttccgtcagtggccactccagcttcctggcgttgctgacagcctggctagaagcgagcgtgattcccataaagtcattgccaagcttgtagtctccgacgccataattgtaagtcagttctgcgacaaaatgatcatcctcaggcccaaatcccaccattgttttactccatttcccattcataaggctttgagaaactgtcttctgttatccgggtgtagtcagagcctaaaggagattttaagaaacaaggtatcatacccattacaggcagctttgcagccttcttcaaattcctcatgccgcagaaccttcatccccaggacgtcccgatagaaacgcgccgtctggaagcggtttcccactttgaatacgaagtgcagagctctgcgagcagccatgattcccgccgcacgcagccgtcacgcgcccccggccgtaatggccgaattcccgggcatatgtccggtaccgtcgactgnnnnnnnnnnnnnnnnnnnnnnnnnnnnnnnnnnncgccgcttcctcgctcctactcgctgcgctcgtcgttcgataagcagcgatgcgccatatggggacttacgttggcgt

SEQ ID NO: 161691 - DNA, 787 bp, Homo Sapiens
tttgaatggcaagtagggtgggtggccaggattttatattttaacggtgtccaaagacaattaaatgctttcccattttatgcaataggattctgtggagggttgcctgtaggaaccacacccaccttgctttcatggcaactttgtaagtcggttttcatcggagtctgaaggctgcctccccgcggggttgggttggtagaaccatgaagtgatttccgcgcctctaagccatctctgtgccagcactcgtcctatactctcacaagccaccacatttctggtactataaaggtgctttttaataggcccactcacgagtggaggccggaagccacaaccttgccattctgatgcttccacaagtgcttctacatgatgctgagtccttataactcgcaacctgtgccagaactcacgggagggaaacaccgtccgccagccccgctctttcctggctacagataaaagctccaggttccgggggttccggttggtgaattctggggcgacagcttcattttccacagggtcgacttcaggtttcgctgccggctcggagctggttgacagggctgcgaacctgcaccactcctgaggcctggagcaaagccggccgatctgcctcacgctccccgagcagggacaaggaaaagacactaaacctaaaacgcacgactcgctcagaaccccaactctaacttggagaagggcccgcccctccagttacaccccagctccaagctccacccttcttacaaccttttctagaaggcactagaatccc

SEQ ID NO: 161692 - DNA, 1003 bp, Homo Sapiens
  misc_feature (417)..(467): n is a, c, g, or t
gctctacaagtgtttattgagcacctgtatgtggcagggatggttgtaggcatctgggtacagcagtgtacaaaaccaggaaggccctgccccgcagaggcacatgaacagggcagtgcacagtgaccacgtggcatttcgggtggtggtgactgcagtggggaagacagcaggggcgctgtcgagggagacgacggctgggttgggaggggcagaggcccaggcccaagggtcagagctcacctggcttccccaactgggatggggccatgtggctgcaaggcaaagccccagttcctgaagggcctggggtgtgaagggtttctccccctgctgggaacgctcggccttgcgccactcagcaaggccccttccaacctgcatctgaccaccaggcagagagtatgtccggggagnnnnnnnnnnnnnnnnnnnnnnnnnnnnnnnnnnnnnnnnnnnnnnnnnnntgctgggcattggtgcgcagcaaaaggcacttgaagctgcctctgagtttggggtccccagaggttatggtgatggcacaggttgggtgtcatcagggagcccagcccctggtactcagtggtctcagctcagtagttgggtgcagcagcagcaaggcccaaggcagggtcagtagtgctccagcttgagactcctgtacaggcagcacgtgaagatcatgccaaagacctgcacacaggcaatgccgatccccacagccccaatgaccctcaggtgctcctggatgaaggtctccaacttggtgatgcagccgccctccaccttgtagatgttggaggcatggtctcgctgtccacaaagagccaccaccgtcttgcagcagctgtctgggaccacacggccaccggcctcctgtgagcggatccactcactgtctcgccagtcctgtgagttgttgctgccacagcagtggaactcctgctgcccccggccgtaatggccgaattcccgggcatatgtccggtaccgtcgactg

SEQ ID NO: 161693 - DNA, 821 bp, Homo Sapiens
  misc_feature (409)..(469): n is a, c, g, or t
cacttgcaccaggatggccatcagaagagctgcaggccagttttgagcccatgcagctgcccctggctccagagaaggccctcgaagttgctgctgctgctgttgctgcagttgccactgccgacaccacagctcaggcccaaggtgtcagtcttgcatgttgagggttccagccgctgctctagcacaggctggtccaaaagatacatggtgtcataattctccagcatgagctctgctgggtcctcggtctgacctggcattcggcctaggggaaatgtgtcccatcgcacgtcttctgagctaacctgccatgcagagccctgcaaagctcctcttttctgggccagaagcctagcattctcggcagtgggggactcttgccctgtagagaaagccccacctccannnnnnnnnnnnnnnnnnnnnnnnnnnnnnnnnnnnnnnnnnnnnnnnnnnnnnnnnnnnnttttcttcctcctcctctacctggtctggcaagacctctttctcctccttctcctcttccttgacatcattaacactgccctgctcctcctgttgctgggcctttgcttcagacccgaagctggagctggctggcttgacgctccaatacaggctgtctagtgtatatggagacttcccaatgggggaggcctcagagccctcctgcaccaggctgttttctccactctgggtataaatggaacagatgcgcagcagcttctcctgctcctcgtctggcaggccctgccccctcgtgccgaattcgccacccaggcctcgctaccttaggaccgttatagttactgtccgtc

SEQ ID NO: 161694 - DNA, 1170 bp, Homo Sapiens
  misc_feature (538)..(565): n is a, c, g, or t
ggcaggtaaaagaaaagactttattaataatcagtgggtgggaggtgagggtgtgcaacgcactgcaagcgcccagttcctcggaggacggcgcgtggctcagtccaggctcatgtcctcctcttcgtccttcttgtccttcgtgtcgccctctttctgctcgggcttggcgttgttctgcatggctttggcaaacgcttccacatctgctggaactggggcgaggtcagggtattctggatctcatccgcggtctgcggcagcgactccccagatggcaagtagggaagcaggcgctcctggacatccgcgttggcgaggatgggagccattatctccggcgtcagcacacttgccaggtccacttgctggccgcctgctggcccggctggtacgttcatcgtggccaggatgctctggaggtcgctcagctggatgggctgggtcgggctggctgctgtgctggctccattcccggaactgggcgcggggctcggggctagttgctgaggcagctgctggagcagaagtgggctgnnnnnnnnnnnnnnnnnnnnnnnnnnnntgacggggtgaccgctgccgactggctccgggagctggaggaggagctgctccctggaggcccactgctccccagtaagctggccaggccaggtccagtcagggcccccagcccacccagtcctccgaggccggctggtccgatgagctgcatgagctggctgtggctcatgtttcccagcaggctctgcaggccaccctcaccgcctagcgcagagagttcgtggccgctgcttccgctggcccccagtgccccaggcatcggggggttgttcagatactcgttgactttccggcaatgctcctcatcctggtctgtcttgggttcagtcgtcagggaagatgatcaagtcgtcttccacgttcccggacgtcctgtccttccagcagaagtgaataagcgagtcgtccgtctgctgaatgtacaccagccctttccgcttatccggagtcacggtggtccccttcagggacatctttcccgcccgaaactccaccaagtacttgttggaggcgcccacgagagcctggcaccaggcttggaaagagcgcgcctgaggtcgtcatcctgcctcgcgcccacactcgttcgagaggcgccgtccg

SEQ ID NO: 161695 - DNA, 1438 bp, Homo Sapiens
  misc_feature (116)..(145): n is a, c, g, or t
  misc_feature (1235)..(1235): n is a, c, g, or t
  misc_feature (1302)..(1302): n is a, c, g, or t
cagtcgacggtaccggacatatgcccgggaattcggccattacggccgggggcccgcgccgcgccgtcccacccatctccctggcctccggtcccaacttcgcttctctgctgacnnnnnnnnnnnnnnnnnnnnnnnnnnnnnnctgccaaaatgtctacaggtccaactgctgccactggcagtaatcgaagacttcagcagacacaaaatcaagtagatgaggtggtggacataatgcgagttaacgtggacaaggttctggaaagagaccagaagctctctgagttagacgaccgtgcagacgcactgcaggcaggcgcttctcaatttgaaacgagcgcagccaagttgaagaggaaatattggtggaagaattgcaagatgtgggcaatcgggattactgttctggttatcttcatcatcatcatcatcgatgtgggttgtctcttcatgaagaaccagcggaactcaaaactgctgttcaagaaaccttcttcaagacttttgacttagaacctgctatattatcaagcttacctacgtgttatctctaaaattttttttgtgttaatgtaaagttgaatttctaggaaacgtgcctttgttttttaatatgcactccaaattagaagccggccccgtccacattttgcacagtgcctttacagatttacgtatgggctgatgaagaggccttcttaagttccagagtgctataatctagatgtaatgttgtcactaattaattgccattactcccagttagttacccttgtcatttggcattattttcagaaccacattttaaacctttgggtaatcagatttccaacttatgccttccagaaaaaaacactactgcctaacacaaatctgtgataacaacaggctgtgccttattttgataattttctgattccctagaagagaaccctctactttttgtaagcactactgactctcgctgtatttaagatgctggtgaagagcttttgctcttgcattagatttgaagatgtttacattgttgttattgttatgtatcacttgctaaaaatattgttttaatcagagataacctctttaaaaaaatttttaaagaactatggctatgaccaaagcttctattttgccaaaaagttaaataccgataaaatggccttaagtgtattcctgacagttaaattcagaaacgtgccaaatggaactcaaggtgccccttcagaattaanatcattacctttgtgtggtgaaccttctacatcttcataggcctttcttccttttgaaaggctgtanacagtgtggctccccttctgattcagtattttgcatgggggttagagaaaggtttgagggtaaactctgacccgtctcataaaagagttctacccagcagttggcaaattattcaccggtgggactccagcatgtt

SEQ ID NO: 161696 - DNA, 915 bp, Homo Sapiens
  misc_feature (242)..(325): n is a, c, g, or t
gcggatggtccagagggccaaaggcctccccaggccaggacagggcacgcccccccgccccaggggcggccactgcccacggcggccctagagctcttggtagtcgccaccccccagggtggcggccgcccggggccccgccccccaggaaagcctccagctcatcggcagccgtcctctccctgtggcgcgggggccgctgctgccgccgtcgccgctcctccttgccctctcccttgtcnnnnnnnnnnnnnnnnnnnnnnnnnnnnnnnnnnnnnnnnnnnnnnnnnnnnnnnnnnnnnnnnnnnnnnnnnnnnnnnnnnnnagagggggttttgccactccattaccttcctcactgctctccattgggtccggcactcctccagccccagcccgaagaggtccgagtcattcttcagtctgaaggcggggagagggagcttggggggtgggggcggctcaggcagggccctcatcctcgtcagtcacatcggaggggtcatctcgcacgggaaagtcatccgccctgcgctgtgtgtctgatccctcgctctcaaagtcggggtcatccatgacgaaggacagcatttgtgcagcaatgggtccctcggggtcactctccgacgaggaggcctgctcacccttccccggctccatctcagcagggggcctggtgctgctgcgcttctccggacctgtgcgaacagagacaccgcctggccaggggggtgctgcggtcctcgtgggagctgtccccctccgtggcttcgaagctggtatggaggaccacttggtctctggctctgagcactgctggggagctggggcagggccttttgtgggagctgccacttctgcttcctcctcactcgaaagagtgatgtcttgactgggacggggccgcaggcagcg

SEQ ID NO: 161697 - DNA, 1409 bp, Homo Sapiens
  misc_feature (212)..(268): n is a, c, g, or t
  misc_feature (381)..(431): n is a, c, g, or t
  misc_feature (658)..(658): n is a, c, g, or t
  misc_feature (669)..(669): n is a, c, g, or t
gcgccagccggcgggctacgcgaccaacgctcccgttagcggcaatcagcgcgcgcggaccccaagaccgccgcgggcacgcggcgggcagcatgcggcggcgtaactggccgggccgcgcgtaaggtcgccccgggcgccgcgccgcccgtactaccgggcggggccggcccgataaccctccgcccgccggcgcgcaccatcgcggcgannnnnnnnnnnnnnnnnnnnnnnnnnnnnnnnnnnnnnnnnnnnnnnnnnnnnnnnnacccccgtttccccgccggctcggcatgggcggggctcgtacggccgcggagcgtcggcgcggcctggcgcaggcgggtcagggggccgccgggcggccgcccggcccgtctnnnnnnnnnnnnnnnnnnnnnnnnnnnnnnnnnnnnnnnnnnnnnnnnnnnccggggcgccggcccgccgcgtgcgccacgcaggcgcgcatcagatcaggcgtgggcgccatggcggtcgcccgggggcgcccggcgaggggccacggcgtggaacagcgtgtctcgggttccactcgtgcggcgccgcagccgggggtcgagcgcgcgcagcgaagccggcggcacagacatggtagaggggccgcagggtcggtggcctttgatgttccgcacanccctgcgggtnccacgtccagcacacagatgcggttcatggcctgcacggcctgcaccgccacccttgctcgtgccatacaggttccccgagaactcggcatgctcgatgaagtcgccggctgctatgtcacgctgcatcacctccctggttacaaagtagtaatctttgccgttctcctcgccgggcctcgggttcctcgtggtatgggacacgctgaagccaaagatgccgctgtgctcctggagcagcctcttcagcagggtgctcttcccagctcccgaaggcccgctcagcaccacaggcctggggcccgacatgccaccagacgtgggcctgggctctgggctgggccaggtggatgaaggggaggctggtggtccaggcggctgctcttggctgcagggtttctgggcacacatccgggtagcacgcatcctggccttcagcaacctcgttttaaatgggaccacaccaggagcagccagggcgctttcattttcactttctttccccgggggggacaggaacattcctttacctcctgaggaaatcgggctcttccagagccacagaggagtgaaggccccagcccttcacgatgctgcgcggctatgtttgggtctgtccatcagggagaaagaaaaaccggccgagtcttgcacagggtcctcgacagcaaccccaggtaaagagcagagcaagccgtccggtggggcccggcccagggcggccgcagccagcccggccag

SEQ ID NO: 161698 - DNA, 1093 bp, Homo Sapiens
actggtaaattcattttaataatgaggggaaaaaactttagttattaaaaacaaaagaatgaatacacatacacacactaaatgtggcagatgtttccaggagagattagcaacagagaggccacatgatcaaataaaatttacacttttgatgggattgcccctcgtggccacccaagtgtttgtggaagaaagtctggagttgtttccaagcatccacctgagccatggcatgagccctgggtcccctccccagataataggactgcccaccaaggcatgcagggaaagcccgacacaggggggaagtaagggaggctcaaatatagtgccctgtctctgggtaacagatgatctggggctttctcctcccatgggcctgcaagcgtttacaggcctcattagcatagaactcactcttccaagttgtggtcatcctgacctaccaggaacaggaaggtgctctctgccctttccacaggaatgaagctcttctggtcaggtccttccaaagggctgttcaggacatccacaatgtctgcatagccatctttggtcaccttgatgcgatttctgttgacgcccacagggggcagggtctcgcccttgtagcgtaaggttcccccaacattggccacagagccgttgatgacgacagcagccgtgatgcccttcaggaaagcgggccatggaaaggcagagctcaccccctttggaaattccaagcagcccaactcctggaccttttacctcgggatgactgagcaagtagttcatggcttcttcaaagtactccagatggagcgtctccatggtcttggggaggtcttcatagttataataagccagagccatcacagcaaaacccttcccagccagcagactagcccgatactccagcaggccacctccagttccgaacatgtccacaatcccaggaaagggcccaggttctgcctcagctgtggagaccccaggaactgcgccgaactcttcaggctccattggtacagccgggacgctcgaaggacagcacctcgtgccgaattcgccacccaggcctcgctaccttaggaccgttatagttactggc

SEQ ID NO: 161699 - DNA, 1082 bp, Homo Sapiens
  misc_feature (1006)..(1006): n is a, c, g, or t
tatggtgaatataaacagtggtaaaaaaagcaggctggtccggtccggaatcccgggatatcgtcgacccacgcgtcggtgaccatcacaggccccacagacgccatcttcaagggctttgccatgatcgcatacaagtttgaggaggatatcatcaactccatgagcaacagccctgccaccagcaagcccccagtgacgctgaggctggtggtgcctgccagccagtgcgggtccctgatcggcaaaggaggctccaagatcaaggagatcagggagtccacaggtgcccaggtgcaggtggctggggacatgctgcccaactccacggagcgagcggtgaccatctcggggaccccagatgccatcatccagtgcgtcaagcagatctgtgtggtcatgctggagcagttgaccaagctccaccagttggccatgcagcaaaccccctttcctcccctcggacagaccaaccccgctttccccggagaaaagctgcctttacactcctccgaagaagctcaaaatctgatgggccagtcatcaggtctggacgccagcccaccggccagcactcatgagctcaccattcccaatgatctaataggctgcataattggacgccaagggaccaaaatcaatgaaattcgacagatgtctggagctcagatcaaaatcgccaacgccacggaagggtcctcagagcgtcagatcaccatcacgggggaccccggccaacatcagccttgcccagtatctcatcaacgccaggctgacgtcccgaggtcaccgggatgggcacgctggtaatcctacccagcacccttccccccgcgtcacccacctgcccagagcctaagggccccggcttctcgcactctgtacaggccacctttccctggctcacagataccaataaagagggttttcttaattaacaaaaggacgtatggccctggagaaaaaaacccggggcacaaaggtggctctctacaaaggctggcanggctcccgccgaatccccccttcaaggggtatttttatttatgaacttacgcctcccggtctggcccatggacccg

SEQ ID NO: 161700 - DNA, 1047 bp, Homo Sapiens
  misc_feature (110)..(168): n is a, c, g, or t
cgcattcaacttaaatgcttttattgacaatgtcttggaacaataagcaaacaatgcttaaatttttcattcaaattcactttccacatgtcaaaagacctcaaggtagnnnnnnnnnnnnnnnnnnnnnnnnnnnnnnnnnnnnnnnnnnnnnnnnnnnnnnnnnnncacaataaaacgttttcatggaaaactgttaatgtcagaacattcagaccacctcaacaatgcatgatcagtaacattacaatgaacattgatgttgaagaaaaactacagtacatggatatagctatttatttctatctaccagaaaataaagtcgtatcttttcttagtataatattggtcatttctaatcagaacacactattgccaggaacacagtagttattgttaaaatcagctgcactagatacaatttgaaaatatccagcaccaggttaattccaataatgaacccaatagattagttaatgctatgagaagactaaggagaaagagaaaagagacacagacccaggcctggctcaacatgctactaactaccagctctctgaagtgtcactgggaacgatacacactccatgcgttttgctacatctccggaagaggtaaggacttgagtccacacatggatgctttcaagtccttgaggcccacagcctggtgtgtttcacgcacagataaggtcctccctaggtctacaggaaccctctagggaagatgtgtttctcctctctgtaatgcaccagctcgggcagtggcacttgtgggtgccggctgcctccccttccctgccccctcacagggccagcagcgtgggtgagctgagcgagtcagaggaaggctcattgctgctgctgcccttgcggtgggcagctgcacagctggggaaggagcacggtcactgctcgttcgctgcgccgcggccgccggctcagtcttggcttctcagttgctcgctgcagatgcggttggagtacgaggcgccgcccccggccgtaatggccgaattcccgggcatatgtccggtaccgtcgactg

SEQ ID NO: 161701 - DNA, 967 bp, Homo Sapiens
  misc_feature (149)..(211): n is a, c, g, or t
  misc_feature (854)..(888): n is a, c, g, or t
ttccaaggccctagtccatttcccaggttttccttaggaaaccaggctatggcccagttcccctttcctttctggggccccgcgccgccaaaccgaattggttttagaaaagttcttcgaggggcccgaggcggaccgcacaggaaaannnnnnnnnnnnnnnnnnnnnnnnnnnnnnnnnnnnnnnnnnnnnnnnnnnnnnnnnnnnnnnttggaacgttttggaaataagataacgcaatgtcttctatagttactcatttacactgaaacgtgatgggtaacttttagggcgtttgcttccagtcactttcccgtggctccttgatgtgataattccttccataagatacaaccattctcccaagtgatgcgatgacgagtatgtgcgtgactctggagggaaagggtctacatctgtctctgcttgtgcctcggatgggttttacagtagacgtaccaccgaccccgcctcttcaccaggtaacagtccttgcagcgcttcttaaggacagtcttgtttttgaaccccagcgcaggcagcagatggggcaggaggccgggtgagagaagtgagcgctctgctgccccgggttccacagccacgggggctgcacctcgaatggatccaaatagaagtgtggagagggctcgaggcttcaccgtgtgacgactgagatagagcagagggttcaccattttccttataaaaagatttgccatgttgtggtgaatctgagaagacggctcccttacccggccgcacgctctcacccggcgccgacccctgcgtctgcgcactccccggccgtaatggccgaattcccgggcatatgtccggtaccgtcgactgnnnnnnnnnnnnnnnnnnnnnnnnnnnnnnnnnnncgggccgcttcctcgctcactgacttcgctgcgctcgtcgttcgctacagcgagctagcgccctatagtgatcgatcag

SEQ ID NO: 161702 - DNA, 1446 bp, Homo Sapiens
  misc_feature (468)..(468): n is a, c, g, or t
  misc_feature (1365)..(1399): n is a, c, g, or t
gtcaaaagcaatttaatttttgggaggaaaaactgcatacgcagtacaacttatatctcaggcgaaatgtctcagaatcttcctgctcattggacagaaactcagcttcaccacattgccagccgggagaccatggaagggaactggcgccactgcccccagctgcccttcccaggggcaacttcaccaagatgtggaaatcctgggagccatgtgacgccagatcttcctctggcagttcccactggctgtgggaagtggttttcataaagggggccaacttccaggaacatctagggctcgggagcaacccagcattgacagtgaatcagaatccacctagagctggccatggcccaggcagggggtgtcttccccacagcccccaggagtggctgcacctagtgggcgcagcatttggcctgcctcgcgggccccttgttcagagccacagctgcatccccccgntagagcctggccctcctcgtcgcttctctgcagtagctcttgggccactgtattgaacacctccgacacctggtggttcagtttggccgaagtttccatgaacagcaacttctggctgtcggcaaactccttcccttcctggaaggtcacctcccgctcctggctgaggtccgtcttgttgcccaccagcatcaccaggacttctcctgggtgcagctcctcctccaggtccttcagccactgctgagccttgaggaaggaatccttcctggtgatgtcgtacaccagaagcgcagcgttggcacccctgaagtagaggtggcagacgctgtggtacttctcctggccagctgtgtcccagatctcaagcttcagagaggtggcacccacatccaccacctttgtgaagaacgcacagcccaccgtaggcaggatactcttgaagtcgttcttcacgtaccgaagagccaagctggacttacccacggagccacttgccaggagaaccagcttgaacacatcgggtctggctgggggcagccctgggctggggggtcctgtgtgcctgtgccatgccctgttccccaggcccggtcacttgcagggagctgaagagcctgtcatcaccagtccacagcgttgctacctgtctccgctttctcctctctctggtccaggggaaggtttgcttccctccacaggcaggacaggacaggaggagcctctactccaatggaaaacagccgcagagcagaggtcaagagcagcagcctcggaccagagcagtgcccactggaccccagcgccaaggtcaggcctcttctcctcccagaaggtttcagggcccccggccgtaatggccgaattcccgggcatatgtccggtaccgtcgactgnnnnnnnnnnnnnnnnnnnnnnnnnnnnnnnnnnncgccgcttcctcgcatcatacacctcggtgcgctcggtcgtttgcca

SEQ ID NO: 161703 - DNA, 1094 bp, Homo Sapiens
gaggtattgatgactttattattctgcaggtacatgtccaggggcccagcctctgggcccagtaactcagctactctttgtggctttcttcatggctttttttgtgggctgccacgcccatctttatcaccagaatgaggaactcctggaagttaactgcaccatcagtgttgatatccaactctttgaaccagacgtctgcaccctttttcctgatatactgaggacactcggtctctagcaatttcttcaggtcatccctgtagacggcatggaaattcccctttatcagggagtactcctggaagttaactgcaccatcagtgttgatatccaactctttgaaccagacgtctgcaccctttttcctgatatactgaggacactcggtctctagcaatttcttcaggtcatccctgtagacggcatgggaaattcccctttatcagggagtacttgtggtagacgtcgatgatagagttcaaggctttctccagctcggtcaacatgatgcccacggacttgccccacctgaaaaacagaaccttctggggaatcccatgcagggaatttgcatctgccagggcagtacgcagaggattcatgccccaagcgatggccttgtcctggcctgcactctccaaataaccaaaccagcagatggctatggctctggtgggaagggtgggatgatagggatacacgtgtgggaaggggaagggtccattcacacagagacatgtgcacacacacggggcccgtagactttccttaccaccccaccctctgctcaagaaaagtccagcctaggagacaatgtgcccttacccactggaaggtgctggaggatactctccttccttatccctgcctcactccccacctccaggagtatctttgctccagacctccctgagctttctctctcctctctcaggaaggctgctccacttccctgaccctccccaagagaagcccaaagtgcggggccaacccagacagtcccacttaccaggtcttctgaaagacagctgacaagagacccccggccgtaatggccgaattcccgggcatatgtccggtaccgtcgactg

SEQ ID NO: 161704 - DNA, 356 bp, Homo Sapiens
gaggtattgatgactttattattctgcaggtacatgtccaggggcccagcctctgggcccagtaactcagctactctttgtggctttcttcatggctttttttgtgggctgccacgcccatctttatcaccagaatgaggaactcctggaagttaactgcaccatcatgttgaccgagctggagaaagccttgaactctatcatcgacgtctaccacaagtactccctgataaaggggaatttccatgccgtctacagggatgacctgaagaaattgctagagaccgagtgtcctcagtatatcaggaaaaagggtgcagacgtctggttcaaagagttggatatcaacctcgtgc

SEQ ID NO: 161705 - DNA, 758 bp, Homo Sapiens
cccggagcaaaatggctggaatggcacccaccttcccttgtgccactagttctctctgggcagccgacgcagccttttaccagtgcactggtggctgctgcaatggacttggcagcttctagtatctgctcctcaaagttcaaggactcatctgcctccttgggtttggcccggggcttcagctgctctagctttttggctgcagcctcaatggcggctgcagctcccaggagctcattctcagcaatgactgtggggtcctctgggtctacccattctgttcccttcatggcttcagcagcctggatgagctcagtgacggaaccagccacacgctttgaatgtcctgtcaactgctgcttcagttctgggcttggcttctgcagggtcagcagtacatggtccagcagttccaaggtagccattggcacactcccggccatagtgcagggctcgaagccgcacatcaggggccacttctgggtggtaagctgcttccttgcaagcccgaagcatatctgcaatagcacggcggctcagattggctgtggcaatgacatcttcctggcgacaggaattgccagcagcaacggccttggcggttgccatggtgatacccagagccacctgccaagacctctaccccagaagacttcatccgaatgaccaagggtatcaccttggcggttgccatggtgcctcgtgccgaattcgccacccaggcctcgctaccttaggaccgttagagtactgccgtc

SEQ ID NO: 161706 - DNA, 238 bp, Homo Sapiens
ttacacacagtggttgcatctggcatctcggggcacagtcgctgtgtctggttcatggtgaggctcacgttggtcattcggatgaagtcttctggggtagaggtcttggcaggtggcagtttagaggctgaaagcaaagccaagccaggctgtggtgtgggttcctcaaacatttaaaaactgaattaccattttgtccaacacctcctacgaggtacctctatagtctagctgcagg

SEQ ID NO: 161707 - DNA, 346 bp, Homo Sapiens
gaccgcatgtgctggatatatacctggcaggccttcaggctcagcttgatctccacctggctagtctgggtccccacccacatgtagacctcttggccattgtctagcaacatgatgtcatcatctgccaggtcatcttggcaaaagtcggagcatttctcagtcactgcaaagtagcccttctcgttggagcaccggaagagacgtgtgtgtttcatgtactcggcatcagaccctgacgaagccaagttggcagaagacatcctgaacaccatgtttgacacctgctacagcaaggcaggttatcaacgaaggtgaggagcctgagaacttcttctgggtgggc

SEQ ID NO: 161708 - DNA, 505 bp, Homo Sapiens
cttgggatatttaatatattctctggaatatgaaagaccaaagggcaaaaaaatagctaagacacactcttgaagagaaagaacaagactattctgcaggaaaatatgaaaataagctcaactgccgggcgcggtggttttctaaacaaatgagaccacaccatacatactgtccctatatttcatacttgggcaaggggaggggagttgacttttttcttagtgagaataaaaatgaggataaaagtatggttgtttaccaacttatagtagtatcatgaatttcgaatggtcttctggccgttcagaaaactacttaactggtaggaacgaaattctggacactgacattgatatagacactcatatcaaatataatactatgaaatactatgatatggaaataatatgcaatcactagagataaaatattttctacccaagtagagtggattcccggccgtaatggccgaattcccgggcatatgtccggtaccgtcgactg

SEQ ID NO: 161709 - DNA, 575 bp, Homo Sapiens
  misc_feature (87)..(146): n is a, c, g, or t
  misc_feature (466)..(500): n is a, c, g, or t
ggcaagaggggtttgcatgagagccacctggggtacatgttgaaaacttatttggggtctaccccaaacctaataacccaaatttgnnnnnnnnnnnnnnnnnnnnnnnnnnnnnnnnnnnnnnnnnnnnnnnnnnnnnnnnnnnntaagttgtccctcaactgtacttggagaaatcgtgttttaaagcagtagtccacaaagtattctgctcatgtgcccccaaaagtattttgaaaaatcatgtataccctcacccatctaagttgatatctaaaattttatctaagttggtatctaaaatttttcatgggaagttaaatagttgacaaagtatgtatttgcctggtgtcgtgtaaatattggtattttaaaataaaaactgttacatcactattttaaacatatccagtaccccggccgtaatggccgaattcccgggcatatgtccggtaccgtcgactgnnnnnnnnnnnnnnnnnnnnnnnnnnnnnnnnnnncggccgcttcctcgctcactactcgctgcgctcgtcgttcgtctacaaacgagctagcgccctatagtgatcgaa

SEQ ID NO: 161710 - DNA, 934 bp, Homo Sapiens
  misc_feature (819)..(853): n is a, c, g, or t
ctccagctgaaatcttgctttcaggcaagggctttccgccaaccttgcatagttctcagctatggtcttctgaacccagtcctggatggaagtcaccttcacatacacaccatactcagccacaagcacagctcttatcaaagcttaagatcccagtcgcataccaggtgtcctcctccaggtcgtgaacggcaaaggcactgcccgcatcgccatagcaggtgtcttcttggtacttagacatgccagcacagaaggtgtgttcattcagtatgggctgttgcattttctgaatggttcaggaagagatttttagccgtggtcagcagccattgttcattgatcagcgtggcacctgtggtgaggttatggtgggaaaccatcttagcctgccagggaaagctgcctttggcatccaggtgtccacccaggatccgctgcactgggtttgccggattcttgggcttcccacatactgcttcacattcaggaagtttatctccaacagccttatttatccactgcttcccattgtttaaggtgtacactccatctccttctgtgcgcagtttgtagtagttcttacactggtagcgaaccgagtgctccacatagccatgtgcaatctcggggggcttcgggcagccgtcatctgcgatatccgtgacatcattgcctgagtccactgcaaaaagctgtccccagagcaggagggcaatgacagctcccagggcactcatcttggttggtcttgcctctggaagagcccccggccgtaatggccgaattcccgggcatatgtccggtaccgtcgactgnnnnnnnnnnnnnnnnnnnnnnnnnnnnnnnnnnncggccgcttcctcgctcactacttcgctgcgctcgtcgttcggtgcgtaactagcgcccataggatcttataccagtgctt

SEQ ID NO: 161711 - DNA, 865 bp, Homo Sapiens
  misc_feature (74)..(108): n is a, c, g, or t
gatgatagatcatataggggctactcgcgagcgaacgacgagcgcagcggagtcagtgagcgaggaagcggcgnnnnnnnnnnnnnnnnnnnnnnnnnnnnnnnnnnncagtcgacggtaccggacatatgcccgggaattcggccattacggccgggggagcctcgcagcggcagagaacggcgacgcggccgggtctgccatcatggatgttctcgcagaagcaaatggcacctttgccttaaaccttttgaaaacgctgggtaaagactaactcgaagaatgtgtttttcgtcacccatgagcatgtcctgtgccctggccatggtctacatggtggggcaacagggaagacaccgctgcacagatggcccagatactttctttcaataaaagtggcggtggtggagacatccaccagggtttccagtcctcttctcaccgaagtgaacaagactggcacgcagtacttgcttagggtggccaacaggctctttggggaaaagtcttgtgatttcctctcatcttttagagattcctgccaaaaattctaccaagcagagatggaggagcttgactttatcagcgccgtagagaagtccagaaaacacataaacacctgggtagctgaaaagaccagaaggtaaacattgcggagttgctctctccgggctcagtggatccattgacaaggctggttctggtgacatgctgtctatttcagaggaaactgggggatgaacagtttgacaaggagaacacccgaggagagactgttaaagtcagcaagaatgaggagaaacctgtgcaatgatgtctaagcatctactttttaagaagacctatattgcggaatatttaccca

SEQ ID NO: 161712 - DNA, 1064 bp, Homo Sapiens
aattcccgggatccaaatcccaaccagccacgcctcagcctctcccagtctctccctgcagtcctgcagcagcagcccccacccccaagcttggtgctgagccctggtgaggagctgagggggatgggttgctgatgccagaaagatctctcatccagaccctgcacaatcccaccccagacaccccccaacccaactacacaaaggaacatagccagaaatgtaggcagccattatcttcaacattgccaatctatcggaacactccaggtcaagcgcaacccccccacatgcgttccaccacatacatctcacatatacatgtgcaccagcatccgccctctgaaggagctggtgtgtgctggcgagtgcttgcccactgccagtgctccctaactggattggaggaggctatgtaacaaagtactggagcaggatgagctcccaggagtggcggtgtgtcaatgacaaaacccgtacccagagaatccagctgcagtgccaagatggcagcacacgcacctacaaaatcacagtagtcactgcctgcaagtgcaagaggtacacccggcagcacaacgagtccagtcacaactttgagatcatgtcacctgccaagccagtccagcatcacagagagcggaaaagagccagccaatccagcaagcacagcatgagttagaactcatactcccataactagacttactagtaaccatctgcctttacagatttgattgcttggaagactcaggcctgccactgctgttttctcacttgaaagtatatgctttctgctttgatcaacccagcaagctggtcttaagtatcaggaccttctttgggaatagtttttccttttcaaagtttttcaagatgtaggtatatccatgaatgccaatttgcatttaaattccacgtatccctgaaagttttaatccccccattgggtcttaaaaaacttggtgaaactataaaactccctggaatccttttattttttaaaacgcaaaagggttttctccaaaaaccctccattttaatggggcaaatccccttctcct

SEQ ID NO: 161713 - DNA, 1074 bp, Homo Sapiens
  misc_feature (92)..(92): n is a, c, g, or t
  misc_feature (188)..(188): n is a, c, g, or t
  misc_feature (231)..(231): n is a, c, g, or t
  misc_feature (956)..(990): n is a, c, g, or t
tcaaaccgccaccttttttgaaccccttttcccaaaaaagtttcgtgggggatttaccaggggcgttggaggccaacttgttgcccccggcnccagttattaataggcttttagggaccaaaggtccaccatattttattttaaatagcaggcccatttaaatatccatgcttctgtgatgtttagcntatgcaatccaccccacaaacagcttttaaacttacgttaaanccatgggatgagaggcggacaagttgttttggtcagagaaggaaatactcaaaaatgtcacaaaaggcatttcaaatatgatgacatactacttaaataccaaccatgcatctctttttcaaattaaaagagaaaactttttacatattctatttcttaaaaataaaggaccatgtgtcttttttaacttagaaactagtatttcatttctccacactgaaatgaaatttcaatggcaagcagcaaataatgtaggatagtcagtgaaagtatctttgttaggagcatataaaaaccaaggagtaacaactcacagagaaataataataggcaaaaaccaagaggcagtttgacagttctaatatagaacttgcatgacaacttcctttaaagtatagtaaataaagaatggcaatataaattagttatctaaggagatacaagacattctgaagcagcattttcagttacttcatttttcagaaaaacaagtttcacccatcaacatggaattaagacttccagtcttccaaatacattagaaagtacagttaatcacagtaaaacttgcaaataaccaaatttagttctggcctcagccaggactattcacatatttgaatttgttttattttcatccttccttgttatacaaatgtttctacttttaaagccccggccgtaatggccgaattcccgggcatatgtccggtaccgtcgactgnnnnnnnnnnnnnnnnnnnnnnnnnnnnnnnnnnncgccgcttcctcgctcaatgactcgctgcgctcgtcgttcgtctacaacgacgctagcgccctatagtgagtctatacagtctt

SEQ ID NO: 161714 - DNA, 1033 bp, Homo Sapiens
  misc_feature (310)..(367): n is a, c, g, or t
  misc_feature (918)..(952): n is a, c, g, or t
caatgtgaaaataaacatttattataaaaattagttttgacattttaaagtgaatgcagacaaggtgttttccagttcaaaaggtccattgtaagctagagaagtaaattccaaggctggcaataactgactcatattcttcacaagtggcctagacaataaggaaccattcacctcaaattcacagagccatgaatcacctctgcttccccatgaccttttccatatccttcctactctgtcttccaaccatgacacagaactgaaacatactttaaaaatctcatccttggctagcacggtggctcannnnnnnnnnnnnnnnnnnnnnnnnnnnnnnnnnnnnnnnnnnnnnnnnnnnnnnnnntccagttttcttttctttagagcagcggttttaaatccttttcgcttcaagttctctgaaaatttactatgctctccacaacaagagctcccattttccacagacacagtcaatgtcagtcagcttgtattcaggaggacagggcagagggatcccagtggcacttcccatgggaagacagaagagagtgggccccagagatggaaggaccccagtgtcatcaccaaacaaccatttcagccgctctagcctctaattcccactctagaacagctggcctggtcgtcagtacacaaggaaagagcccagaaccaagctcaagatacctattcaaagatccctgccagccaggtgggcagttgagtgcagattcctgcgacccccgccatttttgctgtctacttagaagggaagtcaatggcatacccaggattccttcctgatccctcaaagaaatggggaataaacactttaaacaagttccaggccactcagcagtgcccggccgtaatggccgaattcccgggcatatgtccggtaccgtcgactgnnnnnnnnnnnnnnnnnnnnnnnnnnnnnnnnnnncggccgcttcctcgctcactacttcgctgcgctcgtcgttcgctgcagaccgagtagcgcccatagtgatctataatcttc

SEQ ID NO: 161715 - DNA, 957 bp, Homo Sapiens
cagtcgacggtaccggacatatgcccgggaattcggccattacggccgggggggcaggagcatccagttggagttgacaacaggaggcagaggcatcatggagggtccccggggatggctggtgctctgtgtgctggccatatcgctggcctctatggtgaccgaggacttgtgccgagcaccagacgggaagaaaggggaggcaggaagacctggcagacgggggcggccaggcctcaagggggagcaaggggagccgggggcccctggcatccggacaggcatccaaggccttaaacggagaccagggggaacctgggccctctggaaaccccggcaaggtgggctagccagggcccagcggccccctcggagcccgtggcatcccgggaattaaaggcaccaagggcagcccaggaaacatcaaggaccagccgaggccagccttctccgccattcggcggaaccccccaatggggggcaacgtggtcatcttcgacaccggtcatcaccaaccaggaagaaccgtaccagaaccactccggccgcattcgtctgcactgtacccggtactactacttcacttccaggtgctgtcccagtgggaaatctgctgtccatcgtctcctcctcaggggcaggtcgacgctcctgggctctgtgacaccaccaacaaggggctcttccaggtggtgtcaggcggcatgttgcttcagctgcagcaggtgaccaggtctgggttgaaacagacccaaaagggtcacatttaccaggttctgaagcgacagcgtctccagcgggttactcatatcccattttgctgagcccgaagggacccctcaccaaccacatcttggttcatggtcgctgtaaatggggcgctattggtcagtgttgaggaggggctcgattgaagcccagatgtgccggacatgttaagaagcgtcttaaaccccg

SEQ ID NO: 161716 - DNA, 867 bp, Homo Sapiens
cagtcgacggtaccggacatatgcccgggaattcggccattacggccggggagggcgcgtcggagccgctgagaaagcgcagagaaggcgggccccgtctgaggtctggcagtcagatgacagccgggcgcccacggcccgagcgcccacggcagcaccatgcccgcactcctgtgagcgccccaagctttccaacgccatggccagggcgctgcaccggcacattatgatggagcgggagcgcaagcggcagggtgagcctggggccatagcagggggacgcacggcccagaatggctcctgtacctcaatggctggcctcaacccaccggccaaccagcgcgcccgctgccgagcgcagaggagggaaggaatagccccgttgtggtgggatttaagcgtcctgttccacgctccagaacccttgagatgggaaggaccttggagagcacctgataaagcctttccgttccctattgccgcgatggggagcttgtcccctcgaggcaaagagcatacaggcgtgttgggatgactgggttttgctggtcttcaatctgtaacgttggaattgttttcactaccctgcctcttcttcattctgcctgattctccagaggaagacagaggtggatcagatgatggaacagaccatgaaggaagaacaggagacgaagcgaccgaccacaaggacgatggccgagagaatgtccttacaggagcaccaaggaacaaattctgaagttggcgcgacgaagcttttggctctacaggcaagagaagcaccagcttttcctgcagcctcaagaaagtttacatgaggaacgaaaaccggaggcgacaggaccagagtgacctgaccaccct

SEQ ID NO: 161717 - DNA, 763 bp, Homo Sapiens
aacttacggctaggtagcgggaccggtgtttaattcggcacgaggcagacgagcaggcgctgggcagtgtggaggtcgttggagtcacttccgcgtcaccagctcctgtgcctgccagtcggtgcccctcccgctccagccatgctctccgccctcgcccggcctgccagcgctgctctccgccgcagcttcagcacctcggcccagaacaatgctaaagtagctgtgctaggggcctctggaggcatcgggcagccactttcacttctcctgaagaacagccccttggtgagccgcctgaccctctatgatatcgcgcacacacccggagtggccgcagatctgagccacatcgagaccaaagccgcatgtgaaaggctacctcggacctgaacagctgcctgactgcctgaaaggttgtgatgtggtagttattccggctggagtccccagaaagccaggcatgacccgggacgacctgttcaacaccaatgccacgattgtggcaccctgaccgctgcctgtgcccagcactgcccggaagccatgatctgcgtcattgccaatccggttaattccaccatccccatcacagcagaagttttcaagaagcatggagtgtacaagcccaacaaaatcttcgggtgacgaccctggacatcgtcagagacaacacctttgttgcagagctgaagggtttggtcagctcgagtcagttcctgtcattggggcatgctgggagacattatccccggattttagg

SEQ ID NO: 161718 - DNA, 1115 bp, Homo Sapiens
  misc_feature (626)..(668): n is a, c, g, or t
  misc_feature (958)..(958): n is a, c, g, or t
tcgcacaagcccacgatagtacctatagaccgtgtttaaacaagcaggctggtaccggtccggaattcccgggatatcgtcgacccacgccgtcgcccacgggtcgcgagaggttcgcgggtgcagcgcacaggagaccatgtcctgggggcagcagctgcagccagaccccaagccgggccatccccgccactcgccgggtggtgctcggcgacggcgtgcagctcccgcccggggactacagcacgacccccggacggcacgctcttcagcaccaccccgggaggtaccaggatcatctatgaccggaaattcctgatggagtgtcggaactcacctgtgaccaaaacacccccaagggatctgcccaccattccgggggtcaccagcccttccagtgatgagccccccatggaagccagccagagccaccctgcgcaatagccccgaagacaatcgggcgcgccggcgacgagtcacagtttgacatcggacctttaagagcctcacccacctcgtcgatccctcccccggggcccctcacggcattcctgggaggacttccgccggccaccgccttacgacacctattctcctcgcgcgggcgggttgcacacggcggccannnnnnnnnnnnnnnnnnnnnnnnnnnnnnnnnnnnnnnnnnngaccacttcctcgctaccgtacctctacccttcgtgcgcccgcaatccgcgtccgagcaagtatcgtgccgttttcagtgcggcgagtattcattgcgctccaaactttcccgactcctctcgaagctcgttacctgcaccgacgcctccgtttactatcgtttggtcgcttcccgtccctacccctgcttcgcccttagcccatttgtaatcctcccgtcgctccaatgcgtacaaactagctgctgtgcaacaaatatgtgacgtcgcaccgtcgcactccgcttttnaacggcgcgagcctgagcggttattcactccctacgttacgtctcccttcagccattcccgtttttgccacacggttagctagcgagatggagtgttacgcaaccgaataccgcgacagtaaacggccgaatccttctctacgttaatagtcgcgtt

SEQ ID NO: 161719 - DNA, 923 bp, Homo Sapiens
cggttagccagggtggtggtgctgcgcgacaatgatggtggacaccaactggttgaatctgggagaaggacgggtttctggatgtgcaggcgggtctgtggcaatccggtttcagggctgtcgttgtccagcaccaccacacaatctgcgttctgcgtcaagcctcttgagtgtcaggagtgaattttagggctgacccattacgtcgctcatctcgtcctggtagggaaacactgaataagtgtgcactagcttcttggggtacctccaaacgtgtcacgttccatctgcttctcggtctatgatgtcaaagatgtcttcatgaattttctcaccctgggagaatccgctggcccagttgttgccagctcctcctccatgttccgacaggtagatgttctctgggttgtagagcttggcatagggggagttgaggatggagtggatcacccggggttccaagtccagcagcacggcccgggggatgtagtgctcatcgtctgcctggtagaaaaagacgtccttgcggtcagtgccctcggtggcgaattcctccacgatgccctcggggctgataccatgctcggcgcacagctgtttccagaactcgaacccaatctggttgccgcactggcccagctgcagggtgatgatctcccggggcatcgctcttcagacgtgggcgcgccagccccggcctggcgagagtcacggctgagacgaatgcccggcagccaggagcgcaggacgtggggagcgcgcgctctcttcgcctcttgacgcggatgctcggtctgcgcgtgtgcagcgcaggcctctcctcggccggtgggccggggagcccaacctgggcatcattttctcctcgtgccgaattcgccacccaggcctcgctaccttaggaccgttatagttacttgccg

SEQ ID NO: 161720 - DNA, 1285 bp, Homo Sapiens
  misc_feature (72)..(509): n is a, c, g, or t
  misc_feature (1039)..(1095): n is a, c, g, or t
  misc_feature (1171)..(1205): n is a, c, g, or t
gcttaacctaaatttggccctttttaaaaatcctaaaatcatatggcagttttagaatggtagctggttgcnnnnnnnnnnnnnnnnnnnnnnnnnnnnnnnnnnnnnnnnnnnnnnnnnnnnnnnnnnnnnnnnnnnnnnnnnnnnnnnnnnnnnnnnnnnnnnnnnnnnnnnnnnnnnnnnnnnnnnnnnnnnnnnnnnnnnnnnnnnnnnnnnnnnnnnnnnnnnnnnnnnnnnnnnnnnnnnnnnnnnnnnnnnnnnnnnnnnnnnnnnnnnnnnnnnnnnnnnnnnnnnnnnnnnnnnnnnnnnnnnnnnnnnnnnnnnnnnnnnnnnnnnnnnnnnnnnnnnnnnnnnnnnnnnnnnnnnnnnnnnnnnnnnnnnnnnnnnnnnnnnnnnnnnnnnnnnnnnnnnnnnnnnnnnnnnnnnnnnnnnnnnnnnnnnnnnnnnnnnnnnnnnnnnnnnnnnnnnnnnnnnnnnnnnnnnnnnnnnnnnnnnnnnnnnnnnnnnnnattgccctaagttgaaattcaccctcagggtcgtcttctaagatgcaatttaaattatcttctctacagcaattcaggacaacaaactagcataccccatgttcctcagatatatcttctccagagctcatgccagaccccttgtccagacttcctgggtggtctcctctctactcatctaacacctggcatatagttggaaggcccactgggctgtcacttctagccctgtgctcagcagaaagccatcttacccttcccgatggactattttctgtttttagctactgccttacagcacggttgtctttaaagtggttgttacatagatacaaatgtatttaagataaaaggtataactatgcagcaacactagtggacctaccatccagcttaaggaagttaccattacctttgaaagtccatttccccatcacatcattcccctccctcaaagataaccaccatccagaatttaatatttctcattcccttccttcccattattgtctcatcacatttgttgggtnnnnnnnnnnnnnnnnnnnnnnnnnnnnnnnnnnnnnnnnnnnnnnnnnnnnnnnnntctgcatatattttctgaaaacctgcccggccgtaatggccgaattcccgggcatatgtccggtaccgtcgactgnnnnnnnnnnnnnnnnnnnnnnnnnnnnnnnnnnncgtccggcttcctcgctcaactgactcgctgcgctcgtcgttcgcttaacggccgctagccccctatatgagtcgatcat

SEQ ID NO: 161721 - DNA, 1115 bp, Homo Sapiens
  misc_feature (985)..(1019): n is a, c, g, or t
ttttcctatatgtttaccacgcccaatttaatggcacaagccataaacctgctatcaaaaaaggacccaaggcccctccgtagcagttccttcttcagaatgaaccaggcctgggaggtaagagacctttttcagcagggtcacactaccacctcagcatgacttccccaaagttatctcctttactcacacttgcactaagaaaaaggaccaccaaggtacattaggaagacaaccagattatcagataccactcaccaactgctttagtgcttcttcatcttcatccactttgggactcgccctgccgcagatgagtagaaggtacactaggcaatttgactgagggttcttcttccttgtcgcccacatttaacaactcctggccaattcctcctgctccagctccgtttagctcctgccagccagttcatcctcatccacatcatctcctgaagcccatagtccgagaaatggcatctgagatctgctgggccacctcctgttgttccgtgatgtcagtcatcagttcatctaccttgtcaatgtccatgtcctggtaggccttcttcatgctttgggcagcaagctccatggtacgaaggacttctgcattggtagtggcattctcaatggcctcacgctgaaactccagggtggataatgtcccgtcagtttgtgccagctgctgttcgaatcttttcttcctccgcaaagcctgtagggcagctctcttattcttggtcccatacgttcttggctgtttgtagctcctgttgaatcttctgctccagagattcctgtttcttgatcagtatcttctctgtctccttcagtttctgtattgcttcttcaggggttggccctttctccttcttccccttcccgaagagcctgccgagaccactcatcgcgagctcgcctctcccgcctccccggccgtaatggccgaattcccgggcatatgtccggtaccgtcgactgnnnnnnnnnnnnnnnnnnnnnnnnnnnnnnnnnnncgtccgcttcctcgctcatctactcgctgcgctcgtcgttcgtcataacgctcagcgcctatactgagtcagtcatgttgtggggggctcgctgtg

SEQ ID NO: 161722 - DNA, 1231 bp, Homo Sapiens
  misc_feature (25)..(25): n is a, c, g, or t
cagtgtgagatgagtgacagtgatntgatccccactggagtggcagaagcggaacaccggggcacggctagagggcgcgggttgggggggcggggcgccgcgaagtgactgctgcagaggcgggccgcgtgggggtctgggtgggaggctgaggtgggaccgggcaatcggctcaatcggtgtgcccgccgacgcgccgacagagagaggggctgagcggtggggagggaggcagcgggcgcacgggggttgtgtggccgctcccggcgcttcctttgatggccgggagtgtagagtatgcggaaggatcgtggtgctcggaatgacgggggctgggtgtttggtgggcgttcatcccgctggggaagaggcgcgttgcgtgagaaggtccgcgccattcaaatggatttatttgggggcagcgccaggagagggaacatgccagaaaggggtcctcctgcctgcaggggcgcagccaccatgccgttcgcctttgcagccgggaagttcacccagaaagggggcgggcaggtgcagttccgacaggttctgggtccagcggtaatttggcatgtctgcccccgttgcctaggttgggcttccggttttccgtttgtccttctcatcttcctccctcatcttcctcagtatcgtgcttccctggggaggtcaaggctgccgttcttgagctgggcctcatgattctctgcatcctgttttctggtcaatctctagctgcagcctctctgcctcttcatcagttagctccttgatctggggccctgaggtctctgacttggcttccttggccagtctggccgcccgctccgccttctcccgccgctcggcctcctgccgggctctcttctcccgccgggtcttctgtgccagctgattgtggtggctgaaagtctgtgtgataagcttctctgccatcccttcttctcctccaatgaaaaagtctgttttgcgtcgaaggaagctgaagaaggtgttcacaagctcctgcacgccgccctcgtgctgctgagccatggccagcaacatgccgtcgaaccgctcctcctcctgctctccgcccatcgcgccggctccgatccacgtcccggagctctgcactctagtcccgcgctctctacgctcctgcgggtcgcgccgggcccaacgcctcgtgccgaattcgccacccaggcctcgctaccttagaaccgttatagttactgcccagatt

SEQ ID NO: 161723 - DNA, 887 bp, Homo Sapiens
cgcttttcgtcggtccctttggtggacccgtactaacagcagtcaacgctgatggccggtccatccaatctgcccattgagtccgtccatagccagccttggcttgccttgtaagtgtcatagttcaacttagaggtatacccctgtcagatatcctgttcgcctgtcgagctgagatgaatgttttaatttccccatattctgcgaatttgtcgtgtatgtcttctttcggtggcttcctcatggactccaggttacatagagaatccagccttcacagctgttggggtacggggggaacttgtaatgagtacatgagagacactttaagcaggctcacaggaatagagtgagtgcggactcagattgtttaagctatctctgaacccattcctactgcgtttaactattttattggtttctaactactaccacagacacggatacctcacaggttccattattactcacagcgttgtggtccgggttcatcgccatcctgctccacgctgtcataatcctcacgcatccgcgctcgggacccctcttctataagggacatacacgagatcaccgaaaactcctcctttctcccattgttcctatgaggtgggtggggactccaaaacccgtagctcctgccctactaggccactctaccccattttccccacactcaccggagccaaagccgcgacccttccgtttcttcgctttttctttcagtttgtgaatgctctcgtccccatcctcatccatggcgaaatcttcgcccccagcctcgtgaagatctagcacgtccgccatctcgccttcgatcgagatctcgtctgtgtccccggccgtaatggccgaattcccgggcatatgtccggtaccgtcgactg

SEQ ID NO: 161724 - DNA, 879 bp, Homo Sapiens
gcgctacattagcaggcagtgtgcaattaggctagaatcggcatccctgtaccgagtctttaaaaagaaaagatctgagtcgtctagagattcacatatcaacagctgtatgcttagacttcatttagacggaaagtacataaagtagagacaaaatggacattattcgcaactcaatactacgcattacggtaagagattaaatatagacacagcaagttccaccccagtcctatttgtccaaggctgcatggtcaaatggaatcttgaagagaacacctggacaacagaggacctgtcagcgacgtctccggtctggacttctgctgcgtcttcggccacctctcctcttgccttttggtggaccccgaacaaaacaccagtcaacgctgatgggctgtcccatcaaatcctggccattgagtccctccatagcagcctgggcttccttgtatgtttcatattcaactagagtataccccttcagatatcctgttcgcctgtcgaggttgagatgaatgtttttaatttccccatattctgcgaatttgtcgtgtatgtcttcttcggtggcttcctcatggactccagttacaaagagaatccagccttcaacagagcgttgtggtccgggttcatcgccatcctgctccacgctgtcataatcctcacgcatccgcgctcgggacccctcttcggagccaaagccgcgacccttccgtttcttcgctttttctttcagtttgtgaatgctctcgtccccatcctcatccatggcgaaatcttcgcccccagcctcgtgaagatctagcacgtccgccatctcgcccctcgtgccgaattcggcgcgccgtcgacttcatactctctcgcccctag

SEQ ID NO: 161725 - DNA, 1044 bp, Homo Sapiens
  misc_feature (305)..(368): n is a, c, g, or t
  misc_feature (924)..(958): n is a, c, g, or t
  misc_feature (962)..(1002): n is a, c, g, or t
tccaaagtcttacttaatattgggcataattcgttcattccagattacgtcttggttaatttctgtgataagacccttgaaatgtggcccgggcccccatggctcaccgcccgtaatcccgccactttgggagcccgaggtggttggatcaacaaggtcaggagattcgaggaccctccttggctaacaccgtgaaccctgtctctacttgaaattccctatattacccgggcgtggtggcgggcgcccgtaatcccagctactcggggaggcctgaggcaccaggagaaatggcgtgaacccgnnnnnnnnnnnnnnnnnnnnnnnnnnnnnnnnnnnnnnnnnnnnnnnnnnnnnnnnnnnnnnnngagactgtctccaatataaaagaacggaatgtactggagatgtatttgataaccaaggttttaggtaaattttcacccgtattagttctaattgccaactggaaaaagttgtaggcctaaataatgaaaataaccacattagtgaacattatatctcttagaagaaaggccatattttgctcctgcttctgtaaaaatattatttgtttgaaggggaaataatggtagtgtgacctttcacttaattcctactcccttaatgtgagagagacaaaatgagctgaagaaggaaaattctggagttacactccacaaccttgaacatactgacggacatctctgttttgacaacgatttctccatgccacccatgctctaatgccttgtggatcacggacaaccctctttgcacaagctacagcatcagcgatgttatcttgcagcaaagcactgcaggataaatgacaggcattaaccgctcctggggttttgccatcattacacccccggccgtaatggccgaattcccgggcatatgtccggtaccgtcgactgnnnnnnnnnnnnnnnnnnnnnnnnnnnnnnnnnnncggnnnnnnnnnnnnnnnnnnnnnnnnnnnnnnnnnnnnnnnnnagtgacgcgctagcgcccatagtagtctatttacatggttta

SEQ ID NO: 161726 - DNA, 1139 bp, Homo Sapiens
  misc_feature (266)..(304): n is a, c, g, or t
  misc_feature (427)..(462): n is a, c, g, or t
  misc_feature (1029)..(1063): n is a, c, g, or t
tcagccagtgaaaagatccatttcttgggaatccttgtcaacaagaccagttcagaaatccaggatatatagaagcctactgtaatttaaaaacagtaacaaaaaccccaacaaaacccaaatcaacaaagaccaagataaaggtgtgataaacattaattgtaatggttttcctttacatgcaatacatgcattttaaaatcactaagaaacacgaaattttgtagagcaaagtttgtgtttcacgtaagtgcaaatgaatatannnnnnnnnnnnnnnnnnnnnnnnnnnnnnnnnnnnnnnccatacaaaagcacacagtgttaatctataaaatgacatccacagtggatgatgattgtttttgcatgtccccctgcttagatttttttaaaatatatagtcacaaattgacatccttctttnnnnnnnnnnnnnnnnnnnnnnnnnnnnnnnnnnnnacacacttggctttacggactggtgaacatttttcctgatcaagaggcaaagttccagtgacagctgccacagggccctttagtcctccagcggtaacgactccactgtcactctgaaacaagtcttgctgatctacttatttaagaagcagcccaggatctttcagtgtcatttcataggtttcaatgactagactggttttcaagatgttgcgcttttgtttaagtattcagaaattttcaagtatgcttgtcctattatcgtttccttacttttgtctgtttctactaaaggtgcccaatagccataaacaccaacatcccattcttcactgcatttttttaaacaaaacaaagccaaaattaaactgtattctaggctacagtttttgatatgtatgctgttttatgtaaaaagaaatggaatctgaaaagatagaactataaacaggtgactttataaaaatgtcctaagagaattttatgagttacaagaaagctgttcattttaccatgcccggccgtaatggccgaattcccgggcatatgtccggtaccgtcgactgnnnnnnnnnnnnnnnnnnnnnnnnnnnnnnnnnnncggccgcttcctcgctcctaactcctgcgctcgtcgttcgctcagccactacccctatatgagtctagtacatgtt

SEQ ID NO: 161727 - DNA, 973 bp, Homo Sapiens
  misc_feature (856)..(890): n is a, c, g, or t
  misc_feature (894)..(933): n is a, c, g, or t
tggaaaaggctttcaatagatcttgccttgttgctcccctggctttctgagcttctcgaagttcttcaggatgatttcatatacacgagcataagctcccggatctgccaggaccatcagccggatgtcccggtactctgcctcatccagtctcgtgcaccagctgccgataatcacccacatggcctgcttggctgctttagtcactgcatcaccacgctcagagaaatacttagagatttgactgtggaagccttctagcttggtctggaggctggtcatcagctcaacaccttctcctgggcagccactccaaaattgttaccatcctcaatccgaggtatctgcagctgcaaccagggtggtgaccaggttgagctgctcaatgacatccttgatctcaggcttcaagcgctgcagaaggaccacgatcttttcattgcagttcactgggccacagggaggacctttgtcttcatgcctcccccttcttcttttcatccttgtcttccttctcctgctgtttcttccgctcctctttctctttctccttgactggatcaggcactgggatgtccaatggggccttcagattgctcaagttggcttcattgagagctggctcctttaaaaatgcatccagctcagaaatcttcttggggaaatagctcccgagcaggttctctgtcttggtacagaggtcttcacgaaacacatccaccttggcttgggcctcgggctggaccctgagcatggccatgaccgggacggggggcctagcgccgcacaaggagtggagtgggcccccggccgtaatggccgaattcccgggcatatgtccggtaccgtcgactgnnnnnnnnnnnnnnnnnnnnnnnnnnnnnnnnnnncggnnnnnnnnnnnnnnnnnnnnnnnnnnnnnnnnnnnnnnnncatacaaccgacgctagcgccctatatgagtctatacagg

SEQ ID NO: 161728 - DNA, 1100 bp, Homo Sapiens
  misc_feature (84)..(84): n is a, c, g, or t
  misc_feature (198)..(198): n is a, c, g, or t
  misc_feature (666)..(666): n is a, c, g, or t
  misc_feature (668)..(668): n is a, c, g, or t
  misc_feature (678)..(678): n is a, c, g, or t
  misc_feature (696)..(696): n is a, c, g, or t
  misc_feature (700)..(701): n is a, c, g, or t
  misc_feature (714)..(716): n is a, c, g, or t
  misc_feature (724)..(725): n is a, c, g, or t
  misc_feature (731)..(731): n is a, c, g, or t
  misc_feature (735)..(735): n is a, c, g, or t
  misc_feature (742)..(742): n is a, c, g, or t
  misc_feature (753)..(753): n is a, c, g, or t
  misc_feature (755)..(755): n is a, c, g, or t
  misc_feature (757)..(757): n is a, c, g, or t
  misc_feature (760)..(760): n is a, c, g, or t
  misc_feature (769)..(769): n is a, c, g, or t
  misc_feature (773)..(773): n is a, c, g, or t
  misc_feature (813)..(813): n is a, c, g, or t
tcctctcaaatagtctcctgaggtgacataaagactgaaagagcctatgacttgagtccaagtctcttaaccaacaatcaccanatcgtcactggtgaactcatacgtggggacttcaaggttgagaggagcaggacccaatctgatcctgccagatgcatcatagtgtgacccatggcaagggcagtaataaccacncaaaatctcctgcagatgcatcatagtgtgacccatggcaagggcagtaataaccacccaaaatctcctgcatttgcaatgggtacacagccaagatgagtgcaaacacctatcaggataacccattcaggtttctttactcgatctagatcatgctgtgggtccctcaactgtgataattcaactgcagcttcctgctcaatttccttctgggttctatgacgcacaaacaggggtttgcctctccatttgaaagccatgttcttgccttctggaatatcggataacttgatttcgattttcgccagggccaacacatcagcagaagcactcatgctggaaacgaactgggtgacggcattcttggcagcaatatgcgacacccaccagtagttactcccagttaccaaataggagaaaccgtgttccgtagccgttcggcttgcttttttcttccttttgaaaaangnagcgtgttcngttacctttagtgcgtanaaanncttttcaacggcnnnggcaggtnnattttngagnaggagangttcaacgcgncnanccntgtctatcngttnctcgtcgttcggggagattatacctaatacctagtatagncacggcgactatgttgtagggcacctatcaggtaggccggacccaaacggcacggcgctacgggcctgcacgctcacgcgactcccggctgaggaaggccgcttcaggtccaacacaggctgctccgggtggcgggcaccgtggcctgcaccaagggccgcagcgcgcccgccaccccgcggacgtggccgacaggacgggcgcgaacgggcccgagcgggctgctaccgacaacatgcgaccctcgtgccgatttcaacacccaggcctcgtactgacgtaacttt

SEQ ID NO: 161729 - DNA, 1095 bp, Homo Sapiens
  misc_feature (80)..(114): n is a, c, g, or t
  misc_feature (836)..(836): n is a, c, g, or t
acgtttgttatatactatatggcgcatcctgctttatcgaacgaccgagcgcagcgagctaggagcgaggaagcggccgnnnnnnnnnnnnnnnnnnnnnnnnnnnnnnnnnnncagtcgacggtaccggacatatgcccgggaattcggccattacggccgggggtggcgggaactgaggcgactgtggggacatcagtgatcggtgaagtaccatgcaagcatttcttaaaggtacatccatcagtactaaacccccgctgaccaaggatcgaggagtagctgccagtgcgggaagtagcggagagaacaagaaagccaaacccgttccctgggtggaaaaatatcgcccaaaatgtgtggatgaagttgctttccaggaagaagtggttgcagtgctgaaaaaatctttagaaggagcagatcttcctaatctcttgttttacggaccacctggaactggaaaaacatccactattttggcagcagctagagaactctttgggcctgaacttttccgattaagagttcttgagttaaatgcatctgatgaacgtggaatacaagtagttcgagagacagtgacaaaattttgctcaattaactgtgtcaggaagtcgctcagatgggaagccgtgtccgccttttaagattgtgattctgggatgaagcagattctatgacctcagctgctcaggcagctttaagacgtaccatggagaaggagtcgaaaaccacctgattctgtcttatctgtaactatgtcagtcgaataattgaaacccctgacctctagatgttcaaaatttccgcttcaagccctcctgtcaaataanatttcaccagccagcgatttactaagaccttggccaagaaagaaaaatgtccaaatttaagtggatgaaagggaaatagccttattcttggtttaaaggggtccagaaaaggagaacctttaagaaaaaggcccatttaacctttttctcttcaaaagcgcccctacccttcgaattataaccagggttggcgaaaaaggggaaaattccccccggagaaaaaagggtggatttttcccccaacacctttttgcccttt

SEQ ID NO: 161730 - DNA, 782 bp, Homo Sapiens
  misc_feature (671)..(705): n is a, c, g, or t
tgaacttgtttagctcaagaagcccactgggctccaccaccacattggagctggagtgacaaggaatagcatactgaggaatagcctggcttgccgtctgtttctctcgaagaagctgggacgcgacatttggctctgggggctttgggcttgcacgtagatttttggttggttcggagcctgactgcagtttagggagctgctgcgtggttttcacatgcaagcacctgtactacagtttgcgggggctgtgccattaaggtaggaagctgcctgtctttggccaccatgggatgctgtgatgtgcatgtacatctggcttgggctgtgcttgttcttgctggagaggggtgagtttttgatgcctgatggaaagctggggcatttgcgggagctttgtgctggagctaggtctgcctgcaggtggatggtactgcttctgtattagtctggaagcactcgcagagttttcacttgcagctgagtctgttccagcgggggctggctaagtttctgctgtttagctgactgtgactgagtcagggcagatcggtaaacagacctgtctgagggtctaaagtgtccatctcttcaacctcgccctcctcagttccaagttccccggccgtaatggccgaattcccgggcatatgtccggtaccgtcgactgnnnnnnnnnnnnnnnnnnnnnnnnnnnnnnnnnnncggccgcttcctcgctcactgcttcgctgcgctcgtcgttcgctcaagagtagcgccctatagtgatctatcagttt

SEQ ID NO: 161731 - DNA, 760 bp, Homo Sapiens
  misc_feature (155)..(180): n is a, c, g, or t
  misc_feature (605)..(667): n is a, c, g, or t
cagtcgacggtaccggacatatgcccgggaattcggccattacggccgggaacaaaacatgaacataaaatattttgtaaaaggaagacatacaaacagacactataaccaaataagatgaccgaattaaggccttatgccacagccagagttgnnnnnnnnnnnnnnnnnnnnnnnnnncaaggaattaaagccaaacctaacttttatcaaaataaatgtaaaagtgatgaaagaatctgttaagatatcagatgtaatataaaagatactagaaacaaatgccaatagaacacttaagtacattttatatattcatccattagaatatatagctgtcagaatgatagaagaattacatatgtgtgcaaaagttttgtatccatgtggaaaacacaggaagctaatagtactgtttttctctggagtgggtgtaagggtagagacttaactctttacatccttatggcagccttcgaataccttttaactcccagttcccttaactgggggtgtgtatcctagaatcctcgacccattagaaagtatattgtagacatcatactctttaccctttaacgactacacatgcacttcataagaannnnnnnnnnnnnnnnnnnnnnnnnnnnnnnnnnnnnnnnnnnnnnnnnnnnnnnnnnnnnnnttacagtccatatttcaatttcatttgctgttttattggtaatttttttcagctccacgatccagcctaggatcatatgttgtattgccataa

SEQ ID NO: 161732 - DNA, 996 bp, Homo Sapiens
  misc_feature (901)..(935): n is a, c, g, or t
aaaaatttttaaatgtttaatcacaagtctgtagcatgacatcattagtagagtagagtctgctgacattacaatctattgatctccccagagttaccaaaagtagttcacaatagttaggcttccttctgtccatagttcagggcatattcaaagtctctaaagctgacgtgaccatctgaatctcgatctacttccaatgagatggataaggttcctaggcatggcagaagtagacatatccatggcagagaaaaatggcaggccagaaatgccacagggtgttgatggcaggcaaagtcaagaaagaacttggtaagtcagcttcctgatgacagccggaaggttaaatcatgcactgaaaatgcctctgaatacctcgagtacagtcctttccggtaatttgggagccacctgcctaaatgctgttgtttgaaatcttccaaaggttaaaaagtccacgatagtaggtgtcaaaggctgtgaagatgtgtcttacttcgttccgatatcgttgaggcttccttcttgtttcctgacaatatttaagaacccctcgagtaatataccagaagtatttggatttattgaagacatcacagaatccacttctatcttggagggcttgtaccctgacagcattacgacagcagttttaaagtcctgctctgctgagatatcctttgtgatcttcatcacatgctttaaatacttccacccacttcctgtgttccgagggactggcttcccacgtccgcgacctggctctggcctcggagaagaacatcgcgactactacaaccgagccccagcaacccaaccagctaccaccgctttcccagcctggctccccggccgtaatggccgaattcccgggcatatgtccggtaccgtcgactgnnnnnnnnnnnnnnnnnnnnnnnnnnnnnnnnnnncgccgcttcctcgctcatatctgtggaatcttcagcgtggccgtctgctgggtccagttta

SEQ ID NO: 161733 - DNA, 373 bp, Homo Sapiens
  misc_feature (221)..(255): n is a, c, g, or t
atttttccatctatatctatccccttaactcatggttttatttttgacaaaaatatacaagattccaccaccataaccccacattattgctccaagtgatagagtcagcagcaggctaatagcaggctcgaaatgggtctttggtgtttggagaccagattagaatgccccccggccgtaatggccgaattcccgggcatatgtccggtaccgtcgactgnnnnnnnnnnnnnnnnnnnnnnnnnnnnnnnnnnncggccgcttcctcgtctcactgacttcgctgcgctcgttcattcgcattctcgacctagcacctatatgaattcaattcttttggtggtcgtggtgggggggcggtgttggtgttggt

SEQ ID NO: 161734 - DNA, 723 bp, Homo Sapiens
  misc_feature (597)..(631): n is a, c, g, or t
  misc_feature (634)..(676): n is a, c, g, or t
caggtcctccaggagggctgtgtcccgaagcccccattctgggttcctgcatctgagcatcaggtcaaagtccacgttgctctggggggagatcccgtaggtgatgagcaagggccctgggtttgagcaggtgtcctgctgctctgaagagcccctccgtgcagcgcagggggctgacatgggccatgttgatgcagagcaacaggtccagcgactgtggcaggatcccgccccagtgctcccagccccacgtcacgtccaggtgtagcggggccttcacgttggtcaggccctgggcttgcgtggtggccgcgatgctgtccaggcagcgctggtccacgtccgacggctgccactcggccagggggaaggcccgcgcgaagtgcgctgcgtgctggccggagcccgaggccacctcgaggacgcggacgccacgctgggccggatccaggtactgccgcagcacgtgcaagatgggatccttgttccgctccgcggccgccgccaccagcatcgcggcagcaacaactccccgccgcggacgcccccggccgtaatggccgaattcccgggcatatgtccggtaccgtcgactgnnnnnnnnnnnnnnnnnnnnnnnnnnnnnnnnnnncgnnnnnnnnnnnnnnnnnnnnnnnnnnnnnnnnnnnnnnnnnnncaacgagccttaggccgccccacataataaggttgattcctattcag

SEQ ID NO: 161735 - DNA, 826 bp, Homo Sapiens
  misc_feature (276)..(386): n is a, c, g, or t
  misc_feature (708)..(742): n is a, c, g, or t
  misc_feature (746)..(785): n is a, c, g, or t
caattgtatcaacttgtttaattcagttatgggaatgtttattatgcaccaggcattctattagctgctaggcacataaacatgacaaaacgtgatcactaccaaaaagatgttaccttccataggaagtatgtatgtccaagttctcaaatctcaaaatcaaattaatttcagagtgtgtcatctttaaacgaaagaaaaaccatttttaagattcctctcctttagcactgagccttgtggagccttgaccttgtgagacctctttgctgccgnnnnnnnnnnnnnnnnnnnnnnnnnnnnnnnnnnnnnnnnnnnnnnnnnnnnnnnnnnnnnnnnnnnnnnnnnnnnnnnnnnnnnnnnnnnnnnnnnnnnnnnnnnnnnnnttgctgctgtgttctgtgatgtctcttgatttcaatattgcgagattacaaaaacccagtgacttatcaggttggtcctgaaggggtgtccatactttcttgtcatcacttttgaagttaaagcaaatcttcaacagggtaaaaacgttttcttaatttggcaaactacggtcagatccacattagccgttaagtttccagccagcagtccttgagaaattctccaggaaagaagacagccgtgtcgtctagtgacgcgcatgcgcagtcccccggccgtaatggccgaattcccgggcatatgtccggtaccgtcgactgnnnnnnnnnnnnnnnnnnnnnnnnnnnnnnnnnnncggnnnnnnnnnnnnnnnnnnnnnnnnnnnnnnnnnnnnnnnncatgcggagagctagcgccctatatgagtctatacagtctt

SEQ ID NO: 161736 - DNA, 689 bp, Homo Sapiens
ttttcgccacggaaaccagatacatttattaaatctactcttagccaagcaataaagatgtctacagagttcacaacctgcaacacttcaccagggaatgctaggtaaaggcaacttcagtttaactgagtactccatttcaagtgggtaatgtctgctggttggcagctatccagtttggaaaactgtggaagatgctgttgctacccagattgttctgttcaacaagtgggcctgaagcctgagcagtgtagccagctgtgtggggagcagaggttcactccattgcttctgcagcctcctcacctgactcctcctcctcctctagtaagcagcttcttgtcacagacttctggatagcttcccgctctccttcatcagtgcagttctgcaacaagatcaacagctgtctcctgttgtactgaattaggaacttctgacatgttcttattgtacccgcgaagccgatggagcaggcggctgcgccgaaagttccgtgcaccctggcgatcgtgtcccgtacgaggctgctcagaactcggtcatcgaggcttaggcggcagcgggggtcgtcagacaccagttcgcagagcaggtacctgtgcttgaaccgcaccatggctgcctccgcgctctccccccggccgtaatggccgaattcccgggcatatgtccggtaccgtcgactg

SEQ ID NO: 161737 - DNA, 1178 bp, Homo Sapiens
  misc_feature (16)..(16): n is a, c, g, or t
  misc_feature (57)..(108): n is a, c, g, or t
  misc_feature (112)..(146): n is a, c, g, or t
  misc_feature (353)..(416): n is a, c, g, or t
  misc_feature (713)..(775): n is a, c, g, or t
tttatcggcacccccnccccaccctccgataaaaataaaacaacgttagggcgctannnnnnnnnnnnnnnnnnnnnnnnnnnnnnnnnnnnnnnnnnnnnnnnnnnnccgnnnnnnnnnnnnnnnnnnnnnnnnnnnnnnnnnnncagtcgacggtaccggacatatgcccgggaattcggccattacggccgggactccagccctccttcatcgttacatgtttagttcatagaatcatttaatctctgatttgggtgggcttattctaattgtttttaatattgaatacattatttgcattaattttccctactcatactttgtaaagctgagtaaaaggctcaaattannnnnnnnnnnnnnnnnnnnnnnnnnnnnnnnnnnnnnnnnnnnnnnnnnnnnnnnnnnnnnnngcataaaattaatttttacttttatgtggtcattggtttactgccacttcatttggaaaacttggatagattttcacctttgatatacctttgaatatatgttccctgaaatataactgtgcattgttaactctttcatttctgtagtaaaaggttaatactagaaaggatatgcaattaataactttgattttctcctgacccccaagagcttgtaaggatatgtcatgtatttactggtttttcttgtatctggtgcatagcccagagttccacagtaacaaataatttgacaannnnnnnnnnnnnnnnnnnnnnnnnnnnnnnnnnnnnnnnnnnnnnnnnnnnnnnnnnnnnnncaaatgttcatattttaaaaacttgtcaatgtaaataatatgatgcatcttatcatggacaaggacagtgttttctacctttatcagttctctgtaatacccaaaacagtgctgtatttactccaagtattcagaagtgcttgttgaataaaacagtgttatctttaattcattcctttaaatacatgtttccagtttacttattcaacagattcttacttgggattgactgaagaaaaaaaactttaattatagttgaataagtgttgactaatgtattttaaaaactataatatcaaaattttttatattaaatgtaattctgattttttaaacatttatgctatatgatgcattattttgtttctgtgaatatggagagaataaattagctcttttgctg

SEQ ID NO: 161738 - DNA, 951 bp, Homo Sapiens
  misc_feature (148)..(157): n is a, c, g, or t
  misc_feature (839)..(873): n is a, c, g, or t
ttccaccttttgctgaggggaagcggaaaattccgccggaattcacaggccttattccttgtgaagccaccaagaaaaaatttctgtcccgtgtaaagggctatattttttccccccccaaaaaaagtgtttcaaattcgggatactnnnnnnnnnnaactggttaaggaaataaaggcccagtgtttagcaacggaacatcctaatctcccgtaagaggccctctgtgttcaccctttctgggcaaccgctgaggtcagcaaggcccaggagcaaggagagccctcctatttttcaacacaagcggctgccgtctccttattaaagcccccggatggagagatcatagaccacttcctctacctttcttcacgtcatatttcaatccgtcgtagcgcttcctcagggagtcattttcagggttgagaaggcgaaaaccggaatccagctcattgatgaaggtggagatgtggaggggtcgggagtagtctccagcagtcacgctgttgacagacagcctcgacagttcactggcaagaattagaactcctgagagataatcttctacatccagatgaaatcctttctcccgatctggctcaactctcggatgtcctgctcggcagccaaaaagccctgcagctccacgaagatctcgctcacagacatggcgccggctgcacaacaatcagccagtgtagcaagggcggccaaggaagtggacgccgcaggcaaccagcgcaatcaatcgcaacggccgccgctaccgccgcgtccccccggtcttccccggccgtaatggccgaattcccgggcatatgtccggtaccgtcgactgnnnnnnnnnnnnnnnnnnnnnnnnnnnnnnnnnnncggccgcttcctcgctcactactcgctgcgctcgtcgttcgctacagacgggctagcgcccatagtagtcataactct

SEQ ID NO: 161739 - DNA, 1175 bp, Homo Sapiens
  misc_feature (1047)..(1081): n is a, c, g, or t
  misc_feature (1085)..(1125): n is a, c, g, or t
ctggcccacaaatggcccagtcaaagtattcccggagagttctggagctgataagacccttgtacttcctccccctggggacattccttcatatggaatcgtcaggaaatagcttctagtccatatagtgtcaaggggcttataattaaaagaagaaaccttcgatgattaaaatgggaatttcctcagcactttcctggtctgttgataccacagagtgtcttgcgctttccatccagcaggaaatggctgacatccacttttttccatgttaagtgcttcaagcacatcgtactgcaaaaatccattgtttatctgtctctatctcagactctggcttgaagaaatcatcctgagatatgacactgcaatttgggaggtgtttctgcaaattcttagccagtgttgttttgccactgtttgtcacacatgaaatcacatttcctctgcgatgcctccttttccccatctctctccacctgggggccagctgggaggtctgctgtagcttatcacaacaggccagttatttgtctcttctgaccggactgtgaagtccaggagaaggggcactgagttactcctctttagatctagttttgcagcatcgaggagatcacacgggagggaggcacttctcgattcagtcatttattgaaagcgtgttttaacctggggctcatgtctgtgaacataagtcagggcatctgtgaaccactgattccaatgataaatgtctttcataattagctttgaaaatcacagcttcctaatatttcctggcgccagttcgagtcctcccaaacacagcggcagaggcgacagccaagcgcgcgcctgtacccagtgcgccgctacccgcagctcgctccccgagaggcccacagcccctttccccacgctcctcctgggttatgagggatgccaggtaggggcggtcaccatgaggccccttttctctactctcggcgccgggttccagcccccgttggggcccccggccgtaatggccgaattcccgggcatatgtccggtaccgtcgactgnnnnnnnnnnnnnnnnnnnnnnnnnnnnnnnnnnncggnnnnnnnnnnnnnnnnnnnnnnnnnnnnnnnnnnnnnnnnnaaaaaaaccgcactgcaccatgagtgatcatcgtttgtgtttttggttgg

SEQ ID NO: 161740 - DNA, 565 bp, Homo Sapiens
  misc_feature (68)..(108): n is a, c, g, or t
  misc_feature (112)..(146): n is a, c, g, or t
  misc_feature (348)..(429): n is a, c, g, or t
  misc_feature (439)..(453): n is a, c, g, or t
  misc_feature (478)..(487): n is a, c, g, or t
tctttccctccttccctttccccctgcccttatacccttaccgctcagggcgctagctcgccttcccnnnnnnnnnnnnnnnnnnnnnnnnnnnnnnnnnnnnnnnnnccgnnnnnnnnnnnnnnnnnnnnnnnnnnnnnnnnnnncagtcgacggtaccggacatatgcccgggaattcggccattacggccgggagggtctttttgccttatctgtttgcttattttccaatcaactgcctcgagctttgaatacttaaggctttagagggagaacccaattttcaattatgttggctttttataaagcttgagttatgtaagatttaaataaaagtttgctaccnnnnnnnnnnnnnnnnnnnnnnnnnnnnnnnnnnnnnnnnnnnnnnnnnnnnnnnnnnnnnnnnnnnnnnnnnnnnnnnnnntcttgggggnnnnnnnnnnnnnnnaaaaatttttcaaaacctttttttnnnnnnnnnnccccaaaggggaaggaaaaaggggaataattgttttccaagaaaacccgggccaaaaaaaggggttgggtcccccccc

SEQ ID NO: 161741 - DNA, 857 bp, Homo Sapiens
  misc_feature (747)..(781): n is a, c, g, or t
gccttcctgcttggtattgagtctttggacttgagctggtcactaatggcagacttgcgcacaggattcagaaccccatagcggaagccagcagagtctctcctccatcgtcatgcagctcacctgccacaactcagtgactcgatccaggggagtcacatacaaaagccgtcttagaccggtttcgtagcagctggtactgttactactaaatcgctccattctgactctaaatgcactatggattctctgcaagcacctacagatcactatacgatcgagttactctcatagacttacatgttacattcatggaagtcaagtgataccaatacaagtgctcagtatagctaaaccactgttcaaagctacgatctcatttacgactattaagttcataacatgtacgtaagaccgtgtgatgatcctcatgtaagtcctttaacgttacctcgaatactatagtaagcggacagccaataacatagaacaacatactcaccagtcgccatcacgtccattaccattgatttactacgacaatctcatagtaaatgtagagctatcaagaacacgaatctcggtactatcccagatgtcacccttatttagggctaccttaatcacagttcaacctttaggatatatattacattcaggatataaatatgtattaatctcatctaacttagatatcccggccgtaatggccgaattcccgggcatatgtccggtaccgtcgactgnnnnnnnnnnnnnnnnnnnnnnnnnnnnnnnnnnncgccgcttcctcgctcactgcttcgctgcgctcgtcgttcgctatacgcgctacccctatagtgatgttcattctc

SEQ ID NO: 161742 - DNA, 639 bp, Homo Sapiens
  misc_feature (42)..(76): n is a, c, g, or t
  misc_feature (513)..(564): n is a, c, g, or t
gaacagacgagcgcccgagtttgtgagcgaggaagcggacgnnnnnnnnnnnnnnnnnnnnnnnnnnnnnnnnnnncagtcgacggtaccggacatatgcccgggaattcggccattacggccggggggctttgaccgcgctaagatggcgactcccatgcatcggctaatagcccggagacaagctgacagcaaataagcaacatgtaagatgtcagaaatgcttggaatttggacattggacttatgaatgcacaggaacaacgacaatacctacataggccctcaaggacagcagaactaaagaaagctttaaaagaacacgaaaacagattattattgcaacaaagcattggagaaaccaatgtagaaagaaaggccaagaaaaaaaggtctaagagtgtaaccagttccagtagcagtagcagtgacagttctgccagtgattcttcatcagagagtgaagaaacatctacctcttcctcctcagaggacagtgacactgatgaaagnnnnnnnnnnnnnnnnnnnnnnnnnnnnnnnnnnnnnnnnnnnnnnnnnnnngattcagactcagattccagctcttccagtagcagtagcaccagcacagatagcagctctgacgatgaaccacca

SEQ ID NO: 161743 - DNA, 985 bp, Homo Sapiens
  misc_feature (626)..(689): n is a, c, g, or t
  misc_feature (759)..(817): n is a, c, g, or t
  misc_feature (874)..(908): n is a, c, g, or t
cgttttccacacgtgaggtgtcaggttggcgcccttttcacaactgctggccactgcaaaccgcccagtgagtcgccagcatcagcgggctccagcccacggtccggctgcttgttggggtccgcgccccactccatcagtagactgcaccacggcctcgtgcccgtgcctggatgcacccatcaaggcctgtgatgtccaagcgctcatccctgctgccgcccaacccccagttgctcgcctgaaggctgctgatggtccacaaaggcaccggcttccaggagcagcttcaccacacccagggtggccgccccgagaagccaacagtgagcacactggcccccagccggttctgggcattgacatcagccccgtgaatccaacaggaaggtgtgccacaactcacatgcccaaatctggccgcctgcatgagcgcgctccagccatagtggttgcggctgttgaccgaggcaccgcggcgcagcaggaagcgcaccagcggttcgtggcccccggccgcggcgaactgcagtgcggtgttgcccgcctcgtccgagcaatccacgggcaccggagccccgactgcccccgccgctgcggccccgggcccagccacctcggccccnnnnnnnnnnnnnnnnnnnnnnnnnnnnnnnnnnnnnnnnnnnnnnnnnnnnnnnnnnnnnnnnagcagccgccgcgccgtctccgtgtcgcctggtcacacgcgcgcagcagcagctggaaggccgggggcannnnnnnnnnnnnnnnnnnnnnnnnnnnnnnnnnnnnnnnnnnnnnnnnnnnnnnnnnngcgtcccccggccgtaatggccgaattcccgggcatatgtccggtaccgtcgactgnnnnnnnnnnnnnnnnnnnnnnnnnnnnnnnnnnncgccgcttcctcgctcactgactcctgcgctcgtcgttcgcaataacgagtagcccctatagtgattatcattttta

SEQ ID NO: 161744 - DNA, 868 bp, Homo Sapiens
  misc_feature (318)..(329): n is a, c, g, or t
cagtcgacggtaccggacatatgcccgggaattcggccattacggccgggggattatctatcctcattgccttattcggagtactattatccaatatatgaaatcaaagattgtctcctgaccagtgtcagtttaacaagttcattttcctcgacccagtcacaagatcatatccaacaggtcaaaaagagttcttcacggtcttggatataagtaactcttggcctcagaggaaggaaaagcaactcaacactcatggtcaagtgtgattagactttcctgaaatctctgccattttagatactgtgaaacaaactnnnnnnnnnnnngctttggttggtatttgttactatgagtcgtatttaatttctcttgaaaataatttcctcaaagcccaagtcagtaaaatgttatcagccagtcttccaaaatggtcataaactttataaactggtttgggtaaactgagcagaaggtgatacacagaagggaaaatgtgcactcatgctagtgtgactttggtcaagtcgcgtgactctgcaggctgtttctgtatctattttcacactcattttgcttaaatattacatattagggattgtaagaaaactttaattaaaaattaaagactatatataattaaactactctgccctggacactctctgagaaacagatctactgggccctttttcatgagccattaggtggaagacagcaaagagatcttctcaagtgcttaggattacctctcaacacacagcaagcatgtccctgcctcccatgaatcttaccatgtaaatccaaatctctgcaatcctgtggcaccaaccagtggtgctcattctattgtttaaaaatggccttc

SEQ ID NO: 161745 - DNA, 1100 bp, Homo Sapiens
  misc_feature (409)..(444): n is a, c, g, or t
  misc_feature (987)..(1021): n is a, c, g, or t
gtcccctcaacattctttcccctggggtgtattggctataagtcggtgtgtacagcccaaaaaggagttggccatgtacctggagaatttggtaatttggagctcattagggattatagcccaatccctagactgtagaacacgtggcgtgttcatgcgcgtttacacgtatatgtgaacaggtgtgcagcactcaaaaagggaaatacaggcacatagagtaattatgttgaaactctttgttgaaattaaatggagtattcatttaggtctgagattagcaccactttgttagaatgcacagtatttggcatagatttgctcctcttctatctaaagttagaaacctatgtctgataatacacatacacacacatgcgcacgcatacacacacgtgcgctcacgcgnnnnnnnnnnnnnnnnnnnnnnnnnnnnnnnnnnnnggcaattgagtgacaaccaatacataagttggaagatattttgaaaaagctgaaatttggttttatactcaaacagataactttctctcatttccttggtgggaattacaagcccatacatgtacagataaatacaattattacagatcacctgatctgacttcgcttttaaaccatcttcaaatgtgtgctgtttagcagaaggagccctatggatccatgtctgcccaccatagtcatcagcccaagaccagtatcctcaagaacaaccgcaaagtatactcttggcccacatagatgctcgtctgctttgaaaacaaaggttgtggaggacatcttgtcttgttgggaaaagacttgttgtataattagtagtgacaagaacccctgtggtaatggactaatttctcttcttacaaattgagaagaaatggtgcttgtatactatatagggaaatgagatacttggccaagagaagaatttttgtgatgcccggccgtaatggccgaattcccgggcatatgtccggtaccgtcgactgnnnnnnnnnnnnnnnnnnnnnnnnnnnnnnnnnnncggccgcttcctcgctcactatctcgctgcgctcgtcgttcgctgactagagcggcgccctatagtgagtgtttcagtg

SEQ ID NO: 161746 - DNA, 925 bp, Homo Sapiens
  misc_feature (699)..(707): n is a, c, g, or t
  misc_feature (808)..(841): n is a, c, g, or t
  misc_feature (845)..(883): n is a, c, g, or t
cggtgagaattccaagccgcttagccatgtgccaggattctccctaggaaaacagcctatgtgccaggttccgtgtcccctggggggggccgcggctccaaaggaatggtggtagaaaatttcctcgagggtccgaggcggcccgcacagggttttttctgacttcgggggtttccgttgaaggtcgcgaattttgtcttgtactgagcgagctgctggcttgtcttgatgattggccaatattaaaaagggtaaagtgcatagctgtggatgctgaagagctgagtggcagctcatttgtagcagcttgtgaaatcatcctctgaagaggcactgtgtaataccaatattaccccttgagatccttggtagtagcggctccagtatttccggatgttatcagcccctccaagttcttttacattcaagatggcattctggaatggcactgctttaatactaaaacctgtggtcgacacgacgttatcggggctttcactgcagagtttggacaacagactggttttgccagaacctgtgaggcctatgcaaaccaggtcatattctggtcgtgcaggtggtggtcccttgcagcaaagtgctctaaaacacagataatccatgtacagagaacgcctcagttatccggagatcagacatccggcagcctaaagcatccggaacggctccgaacccggnnnnnnnnngcagcgtctctggctgcgagcgagcagctcctgaaaaagccagcaacccccggccgtaatggccgaattcccgggcatatgtccggtaccgtcgactgatnnnnnnnnnnnnnnnnnnnnnnnnnnnnnnnnnncggnnnnnnnnnnnnnnnnnnnnnnnnnnnnnnnnnnnnnnntgactaaacggcgctagcgccctatataagttatacagctgt

SEQ ID NO: 161747 - DNA, 944 bp, Homo Sapiens
  misc_feature (826)..(860): n is a, c, g, or t
  misc_feature (864)..(904): n is a, c, g, or t
caaaatcgttgtcgagtccagctggcgtctggaacccgctccttatcttcgataacctcagtcggagtaggtattatcggaagtataaggggacagagactggtggtggcaggccatgctttcttggcctggtgccacttctttgctgtttgagcacgaagaggacatcctgcgtatgaagcagagacaagggcagatccagaaggggagatgtacttgcgcagcacattcacagactgaagcgtgagcacagagcaccctttaggtaacttcccttctgagtgcagggccctcacagctgcatacagagcaatgtgattgctgtggccacttactccccctgcatcgaaagtcaccaccagattgatgccattcacttctatgtgctgaaggaggactctggccacgtgctctgtgtcccactgcatgcctgggtcatctgggaaatccctgttgtcaataatcattacactggagagtggaatccccaaaacatcacagctctgcaaaagttctttcttacgagtctctccttgattgtagtaatttcctgcagagaagcaaagcaggtacacccagtgccttaggcgggccaagcctagcactgtgggagcaaaaaacatggcttcatcgtcagggtgcgctatgaccagcagggtccggctttcggctcccagccgtcctccctgctcccgactcttcattcgttctgaggagtcccaaacccagaggaagccccatgccaagaccgccaacgccacacacaggagccacccccggccgtaatggccgaattcccgggcatatgtccggtaccgtcgactgnnnnnnnnnnnnnnnnnnnnnnnnnnnnnnnnnnncggnnnnnnnnnnnnnnnnnnnnnnnnnnnnnnnnnnnnnnnnntacgccgagtagcgccctatatgatctatacattttcgcg

SEQ ID NO: 161748 - DNA, 880 bp, Homo Sapiens
  misc_feature (765)..(799): n is a, c, g, or t
ttctctgcaaaacttaacacattataaatcaaaccaggttaaattaacaggaaaaccaacctgattctcaataaagtcttgttttccaaagattctattaagaacaagtaatatacatgtacaagaaattacaagaaatgatgatcacggttagttacagatgcaaaataatatctaatattccaagcttgtgaacataataattaaaatcaaattcataagctacctcaaaattatgtacattttagataagctggtcaagtattatttgaatacacaccatatttggtaaacctaaaattatattaccttttctcctcctttaatatttgtagctacatgccaatatggaaaaaaatgtattttcatttatgtattaataacagagagtaacagaatttctactgtgtatgtttcacagtgtaaaagaaaaaaagttaaggtatattttcctttaagaaagaagaaatattgccaagagtttaattaatatcaacttacttataaaaacagaaaaaatatgttttgaaacaggtaccataaaattattatatggtctccctactgatctgaaactacagaaggcatttaaggaagggatgttaggtcaaaaacaaagtctaacccaagttgctttaaaaatttgatttgcaggaaaactagttgcttgacctagtttaaagctagttacaaaatccgttttcttaatggtcccccggccgtaatggccgaattcccgggcatatgtccggtaccgtcgactgnnnnnnnnnnnnnnnnnnnnnnnnnnnnnnnnnnncggccgcttcctcgctcacagactcgctgcgctcgtcgttcggctatgcacgcggcgccctattatgatcgtatacgactt

SEQ ID NO: 161749 - DNA, 1044 bp, Homo Sapiens
  misc_feature (81)..(115): n is a, c, g, or t
aatcgataactcactatagggcgctagctctccgcagccgaacgacgagcgcagcgaagtagtgagcgaggaagcgggcgnnnnnnnnnnnnnnnnnnnnnnnnnnnnnnnnnnncagtcgacggtaccggacatatgcccgggaattcggccattacggccgggcaaagtgccgggattataggcatgagccactgcgcctagcctgttgcagctttttaaagcaggaaaatatccatataaactgttgggttagaatctatattagaatctttcaaactaattgaaaacaggaagactatcatctaagtagcgagataatctgggtttcaaaaagttattccatggtacgtggtttaaaaaatagttttcaagtgttttaatttttaaagtgtaactaattcttcaaatatgttatgctgttaaaatatgtattccataagtactttttgtatatgtattcttaaattttaaaagagtcaactgaatgcgcaaagatgattataattttggatgtagacatttagactagattcccagtcctctccttcctaagcttggtctttgtttttcctatagggaaaacacagtccaataagttccaaaaactatcctcaaagtagtattgtgctttgtagtaatgaaggttggctggatggatacctgacatggtggcagggatttcagccttttaaattagtactttggtcgtctggctattaaaattcgttaattttaggcaagaaccattgttgtgataaacctgcgggttcttgggatgcttcaggcacacgttaaccattttttaattcccctttgggtcctctccttggtctaaaaatggccttctatttattagacctaaagatatccccccgggtgacaagatccccgggaacaaccctttttttccgcaccgtgtgcatctttctacagttccttccgggtattgtttactctctaaaaagtttacccttaactcccacggggtacccaagtacgaagagatctctcaactatcttatactctgttaagaccggtca

SEQ ID NO: 161750 - DNA, 1048 bp, Homo Sapiens
  misc_feature (937)..(971): n is a, c, g, or t
gccgcaaaaagttgttttttaaaaccccaaggtaaatggttccatgagcactcaggggggggtggcctgtgtccagtaatccccagcccctggggaggccaaggatgtgttgatttcctgagctccagagttcaaggcccagctggttcaacatgatgaaaccccgtctaatgattctgaaggatccaccactggtctgatataagtccacgtacatgtagcattgcacagttacgttcagcatgatctgagtcttttatctcatgttggaaagccaacccatttattgtcacccatggatgatgactgctgttacgaaacacaccaatccatgaggaaggtaaaatgctggccagaaatttcatttcttcttcattatctatagaaagcagactagaagagttctttgaagcacaggcctgcaaactctcttcccaagttcttctttccttaccaatgtagtaacaactgttggaatatgtaatccactcctcaggacaatggccacaaggacgtgctaataaacatatgaattactatctttctgcgttcttgtattcggggaagaattgttctgctccaggaaaggaataagaactattgtttttaacacagtggccatcaggacaatgcaaatgattcctaggacctcggcagtgagcttctctggaggtggcagtaaacctttgcagtgatatgttttgtcattcccttgatgattcggagaagcattttgaaggtttaattctacttggaatatttcctgtttggttcctgaaatggagcttttattgcctttaggtttcctttgctgcctctttgggtcctgggccagactcacttctgagtaggttcctctttgtttattcatctctgcagctgtgtccccggccgtaatggccgaattcccgggcatatgtccggtaccgtcgactgnnnnnnnnnnnnnnnnnnnnnnnnnnnnnnnnnnncggccgcttcctcgctcactgactttcgctgcgctcgtcgttcgcttcaaccgagtagcgccctatatgattatcca

SEQ ID NO: 161751 - DNA, 360 bp, Homo Sapiens
  misc_feature (226)..(260): n is a, c, g, or t
cccgtcctgcacttgttccctttggtgctttgggcatggtgacgtacctcgtggccacggagcagctccgcactctagacccaggtaatctcaccaaccgcaggagcagcagctcacaagagcacccgggccgaatcccacgtggcgcctgagaagcccgcgccgacccaaccgccccggccgtaatggccgaattcccgggcatatgtccggtaccgtcgactgnnnnnnnnnnnnnnnnnnnnnnnnnnnnnnnnnnncgccgcttcctcgctcactactcgctgcgctcgtcgttcgctgcagaaacgacgccttagccgcccgctatttaggtgagttctgacttaccaagttttt

SEQ ID NO: 161752 - DNA, 672 bp, Homo Sapiens
  misc_feature (251)..(251): n is a, c, g, or t
  misc_feature (570)..(604): n is a, c, g, or t
aaattgtaatggtctaaacaccaccagtaaaaggatgaacactgtcacatggaataaaacacaagccaacccacctatctatttagcctacttacctacctaaaacccaaccacccacctacttactgtgaaatacatacatacacaaactataaaggcatacaatgattaaaagtacaagggtggagaaagatacagcataaaacactaaccaaagaaataggttgaaaatatttattaatatgaaacanaatagacatcagaacaggaaagattatcaaaggataaagagaaacctcatgaaaagacagttatttccccaagaacacataataatcttataggtatacgcacctaatcaaaggttttcaaaatgaataagacaataaatgaggtatgaaaaaacaagtaggcatatctaaaattagtttgagatttgaacactgctaagaaattaataaacaagtaaaaatcacaaatgatatggaaggcctgaacattactatcaaacaacttcatcccggccgtaatggccgaattcccgggcatatgtccggtaccgtcgactgnnnnnnnnnnnnnnnnnnnnnnnnnnnnnnnnnnncgccgcttcctcgctcactactcgctgcgctcgtcgttcgttgacgagggcgcctatagtaaacagtt

SEQ ID NO: 161753 - DNA, 984 bp, Homo Sapiens
  misc_feature (12)..(12): n is a, c, g, or t
  misc_feature (867)..(901): n is a, c, g, or t
  misc_feature (904)..(943): n is a, c, g, or t
tccacatcccantgcatttatagggctttttcccctgggtgggttttgaagagaaccaatgaggctgggagggttggcctgaagggtttttcccacacttcattacattcatagggtttctctcccagtgtggattcaccgatgaccaatgaggtgcgacttccagtaaaaagcttgcccacattcatcacatcgataggatttctgtccctttaaaactctttcatgttcaacaggacaggaagacagaggtggatgttcctcaacttccttatattcctcatatctgtcttttgtggattttttcttatcctcatctattatttccaagaaatcactttctagtctgctcccttcttcatttgagggttgtccttctaactctttgaaggtatcttcacaaacatctccagtctctgttcccccaggaaccaccccaaagagtccccctgatgtgctattagatgactctgatcctttaaaaatttcctgcttcggagtcagctctgaactctccatcatgttcctacctgccaaagaagccatgctacggtcattttccagcatcatgttccagtgcagggctctctgactgagtgcgagacctttccatttcttctgagtatagtcctcagacaggtcctcatacgccacagtatcctggggcctgaccatccgaagtacagttgcccctgcttggtctcctgagttccccacttgaggaagggtaggaactggagaagtacattgagcgactccgccgccgagagacaatcatccaaacgccgccaccgcagccgaccgccccgcgcctaccccggccgtaatggccgaattcccgggcatatgtccggtaccgtcgactgnnnnnnnnnnnnnnnnnnnnnnnnnnnnnnnnnnncgnnnnnnnnnnnnnnnnnnnnnnnnnnnnnnnnnnnnnnnntctacagacgagctagcgccctatagtgagtctatacactt

SEQ ID NO: 161754 - DNA, 370 bp, Homo Sapiens
cagtcgacggtaccggacatatgcccgggaattcggccattacggccgggaaggtgctattgttttgtcagagtataaatattgggtgtcatgtttggcaggtaagatcagtaaagtggttttacaaaagattttatatccacttgcttcagagaagccaagtgtcaactttaatttttacatataaatagaagatagaaacctatttatttcagattacataatttgtttattattgcagtcaggcatttgtttggattcagggcatactgggacatccattattggagctgaatgtcagggtctatgatttctggaaactggaagtccaaaatcaaagcactggtaaatcctgtctggcgaggacctg

SEQ ID NO: 161755 - DNA, 589 bp, Homo Sapiens
  misc_feature (481)..(515): n is a, c, g, or t
gtccttattgttcttgctttgtcccaagtagatgcaaatgttgtgcaaacccacttgatcttaagatgttgttgagaacactggagtcacgtgtccatgggtccttcaggctggcttttgatgggagctgggatgcagatgatttacggagggttataatctgtgatgctggtctgaagtctgaatattccaagttgctgactgcaggcagagcctcctgtcctgccctcagttctacaggaaaatccagacaacttcccctccactttgtagttcaaagctagagggacaggcacaggtcctctttttttcttaactaaccggtaaggcccatctttttctgcctctctgccgtgtcgccttaaagactgctccttgctatcttggtcacacgtctgggcgggaagccacgaagatcacgggaaggggccccggccgtaatggccgaattcccgggcatatgtccggtaccgtcgactgnnnnnnnnnnnnnnnnnnnnnnnnnnnnnnnnnnncgccgcttcctcgctcactgactcctgcgctcgtcgttcgctagcgaccgcgcagcgccctatatagcgttctt

SEQ ID NO: 161756 - DNA, 451 bp, Homo Sapiens
  misc_feature (78)..(112): n is a, c, g, or t
agatgatagatcatataggggctactcgtgatagcgaacgacgagcgcagcgaagtcagtgagcgaggaagcggccgnnnnnnnnnnnnnnnnnnnnnnnnnnnnnnnnnnncagtcgacggtaccggacatatgcccgggaattcggccattacggccggggagttaggctcgcgccggcgcagtgtcggctgccggtgccgcggcctttgtctcgcagtcaggagggagcaagtgacgtttgaggacgtggtagtggacttcagccaggaggagtgggggcagctgaagcctgcccagaggaccctgtaccgtgatgtaatgctggacaccttcaggcttctggtctctgtgggacattggttaccgaagccgaatgtcatctccctgctggagcaagaggcagagctgtgggcggtggagtctagacttccccaaggcgtgtacccag

SEQ ID NO: 161757 - DNA, 658 bp, Homo Sapiens
  misc_feature (582)..(616): n is a, c, g, or t
ctcagcagaatacctgtaaccattttttgccaatctttgaagtggcttttatgtgtagcctgacacgtaagcagaattaaccagacaggtacaaaactcgaactttgtttaattaaaaaagtactttgctggttttacacttaataatgttattttctattttccccattatcttagacattaacttagtgtattcttttcctgcaaatccattttctttcggtgtaacatctagctgttgctgcaccatcatcgctgaggtaggcacatccttcactccctctcatgccaaacctgcaacaaagggattaaccattatgtagtcatgtgatttcttccttgcccatggacacctttaaacaaaaattctacttgtctaaagtgctgcaaggtgtactatggcacagttctctcttgctagtgttgagatacctataccaatttggatcaaaagagtttcttttccaagaatttgtacatgttaaactggcattaggttggttacatgtaatcagtggagctatcagttcgcccggccgtaatggccgaattcccgggcatatgtccggtaccgtcgactgnnnnnnnnnnnnnnnnnnnnnnnnnnnnnnnnnnncggccgcttcctcgctcacaacactcgcggcgctcgtcgttt

SEQ ID NO: 161758 - DNA, 1096 bp, Homo Sapiens
  misc_feature (972)..(1006): n is a, c, g, or t
  misc_feature (1009)..(1050): n is a, c, g, or t
ccattggagccttgtcccccctctcctgctgtcgcaatcctgtcgtctggcacagattctatcccccggctttcaacaatcagggagttttcccctgctgtccgccttgtccccatggttcctgaggaatccaaccagtcttcccgactcccggagtttggctccaatcctcccggcggtctccagaatatctgatgtttgtgattttttgttgagcgagaaccagatatcattctatgtccagggccacaaaacttgtccttcaaatccttctcaagattgtacttggcagagcggttcatccgtatctgctcggaagcctcctccaaggtacgggtcacagagccataatgccctggatgatctcagcctcctttatcagctcatgctccactgtgtcgtgcaccaggtccatgccacatagcgcttctccctgtatgcccaggcatgtctcagttgatgatcgacagagggctcatttccaggtctccagggctttttccaatctgatcttatatatgagtagatcatcagttacattcacaagctgctcaagtttgtcatctaactccttcttccagaactggacttcctcgagtctctgttctagatcttcttgttcacagtcgctttgagattattcttgtggtcttttcaattatcaatccacaagcctctggctttctgcgaccaggcgttctgatcgggacctcttgagcgatctagcatctgtggtactggttcttgcttagcaatgtgaccactctgagggcaggaacttggcgtgagagcgttgtaatagttatagccatttgaggtcttccaaattcgctcagcgccacacagaaccactacgcaagctcgggatgtggagcctccttaccccatactggagtttgcagctcttgcagaacagagagccccggccgtaatggccgaattcccgggcatatgtccggtaccgtcgactgnnnnnnnnnnnnnnnnnnnnnnnnnnnnnnnnnnncgnnnnnnnnnnnnnnnnnnnnnnnnnnnnnnnnnnnnnnnnnnacgacacactaggcggtccccctatttagttgagctcttataccaa

SEQ ID NO: 161759 - DNA, 877 bp, Homo Sapiens
  misc_feature (42)..(76): n is a, c, g, or t
aacgacagagcgcagcggagtcttgagcgaggaagcggccgnnnnnnnnnnnnnnnnnnnnnnnnnnnnnnnnnnncagtcgacggtaccggaccatatgcccgggaattcggccattacggccggggatactaatgaagtggacccatggcctaggaggagctgcagggagaaagcctgttgcttctcctctttcactgagttaagaaaaggggaaaagaatgaccttcattctagagggctgtgggagaaacagtatctgagcaaagctggatgaggagctacagaaggatattatggggaagatagagataaaaattcatattatatatgtgctttatatgaaaaataagaaaagttcagattttgttattttacagaaacatgaaaattgttactgtctgcatactatatataaagataagaaagttcaagtttcgtactattattttacagaaaggagatactcccttgcatattgctattcgtggaaggagccggaaactggcagaactgcttttaagaaatcccaaagatgggcgattactttataggcccaacaaagcaggcgagactccttataatattgactgtagccatcagaagagtattttaactcaaatatttggagccagacacttgtctcctactgaaacagacggtgacatgcttggatatgatttatattagcagtgccctggcagatattctcagtgagcctaccatgcagccacccatttgtgtggggttatatgcacagtgggggaagtgggaaaatctttcttactcaagaaactagaagacgaaatgaaaaccttcgcggacaacagattgagcctctctttcagttctcatggtcataagtgttcttaacctc

SEQ ID NO: 161760 - DNA, 1056 bp, Homo Sapiens
  misc_feature (289)..(352): n is a, c, g, or t
  misc_feature (376)..(428): n is a, c, g, or t
  misc_feature (533)..(542): n is a, c, g, or t
  misc_feature (591)..(631): n is a, c, g, or t
cagtcgacggtaccggacatatgcccgggaattcggccattacggccgggacacttttttctctcatttccttcattttttgagccgtaagtgtaaggcattttgctggtattattacaatggttatgaggagtttctttgcttgcccaaggtcacatagctagcaagttaaagtagattcaaatccaggcctgctagataccaaattattatttaagagtacttttcactactcctaaataatgacacagatacgtttgtcttacacatttcactttattgtcaagtnnnnnnnnnnnnnnnnnnnnnnnnnnnnnnnnnnnnnnnnnnnnnnnnnnnnnnnnnnnnnnnnaatttacttcattatcacgtcttnnnnnnnnnnnnnnnnnnnnnnnnnnnnnnnnnnnnnnnnnnnnnnnnnnnnnactcttggtttgtaatacctctttccttatttgctcctttctcatttgatctcaatgttaatccaactgttttccacatctgattcactaaaattttagcccttnnnnnnnnnnttcctgtttttcctatctcctttgtgtccattctcttctccttgcctcnnnnnnnnnnnnnnnnnnnnnnnnnnnnnnnnnnnnnnnnnctctagatgttgttttgacatatgagttaatgtactggtacaattttgcatctgtaaattagagcttcagaatcaactgagtgtatttattctttatttttaggcctaaatttatcttaccttttattgattttataatatactatactctttcattttagtctgcatatgttagccaaagaagatatgcccctgttttaagaaatctctgtaaaaaatgtcaagtgtgacaagaattcttcaagaaacaagctcctctagtttgtcttctatatttagagcttcaacagttacctatattactggtaactcccaaatataccttcaaacttgttttttgggcccaagttttttgcttcatatatatctgttttgaatatcccataaataattgcatctaaagcatacctccactccattgttct

SEQ ID NO: 161761 - DNA, 780 bp, Homo Sapiens
  misc_feature (662)..(696): n is a, c, g, or t
  misc_feature (700)..(738): n is a, c, g, or t
gatagctgacccacaatctctactgttctttggcttacattggtagaatccaaggcaaatttgtaaatgtgaaaacatcattgcagagtagtctaaagaaagtttatgctctttgtataggctgctcctcctgaagcagcactctcctccttctgagatgagccatatgtggagccagtggatggtggactcttacccacagggctctttttggatggactcagggacccagaaccatggtcgaactgaccttggtgtgtcccagactgatacccggcaccactcggcagagttgagcccatctgggatgtgctggaaagtggaggactaggttttggcacggggctaggacggggtgaccgccgcctcaccaccacagactggagggggcttttgagagctgggcttcgctcccgaggactcagctcagaaactgctgaggcccgtgatgcagaaccagtgccgtaggtggcatctggccatggcttcgagctctcagatgcttttgtatcttgagaggtgcctccagagaatgtctgctccttgacctcatctcctggttatccccggcagcctgagatggccggctatccttagaagaggactttttccccggccgtaatggccgaattcccgggcatatgtccggtaccgtcgactgnnnnnnnnnnnnnnnnnnnnnnnnnnnnnnnnnnncggnnnnnnnnnnnnnnnnnnnnnnnnnnnnnnnnnnnnnnnaggcactaagcggggcccatagagggtagtatcaaatgcttc

SEQ ID NO: 161762 - DNA, 899 bp, Homo Sapiens
  misc_feature (783)..(817): n is a, c, g, or t
  misc_feature (861)..(861): n is a, c, g, or t
cagtatactctatacggtttgacagaactgtcaggttgaatgagatacatttcagatggtttcacctcctttcctgataatttccgtcacattctttgcccagacaaccacagggaatattgcaaactgaccagtgcatggggtgcgacaatattccatttgagctgagacatcagattctaacttttgtattttgcttctcaggttttccaggattgaacgaagcacacgaaggttagttgggatattactattcacagtctcatctatatataattggtgcttttccagttctgaggagtactcattgactacattttcattatcttttacttgcttctgcctcttttgccacaggtctttcagcaaatacatgtactgaaaggaagaagaggaggtctgggaaacagcttccacattgttatttaactcatcaacactatttctgattggcctttcctgttgtagcaaagcctcttgcaactgacatcctgtaggacacaacacccccaggtctgggtcagcgtgaagacagcctccagcatcaggctgggagcctcttctctcttcttgtcaaggggtcgatgaccacgggcactgaagaaaccctcctcattgtcgttgacaccttgggacttaactagaaaaacacacaatagtagcaataatagatgtttcatggttttaagtttgtggaagctccaagaaaccatccttttcatgtagacttcccccggccgtaatggccgaattcccgggcatatgtccggtaccgtcgactgnnnnnnnnnnnnnnnnnnnnnnnnnnnnnnnnnnncggccgcttcctcgctcactactcgctgcgctcgtcgttcgctnctaagacggcgagcgccctatagtgatctatacgtctt

SEQ ID NO: 161763 - DNA, 923 bp, Homo Sapiens
  misc_feature (847)..(881): n is a, c, g, or t
ggttccaaggaagcattctatgcccccccagggcttcacagctgtcagttcaagtggaggccatcaaatcttttcctctgcccaggaaaagactgaccattggtctccaaaagatgctggatagcattgccagatcacatctaacaactccgactgcagtttcacacaggtggtggtcccaaaatttgtaaaaaagtgaaagtgatgtgtgaagatagggctgagatgagaggaaatggattcaagcctcattggaaaagctgagttagtttgtttactttaatttgagcatagacaatggggtcaaagtctgcagaatggttctcagccaagtgattgctcttttcttctgagagtttgaaagttgtgctggcataggtaagtgattccctgggatggatgaaagcttggctggaggatctgagtgaggatctggggcctggggcttggagtgatctgccatggtgccagaaagaagagggacccatctcagcaatgggcctggggaaatgggaagcctctcccttcgatattttctgtagctctttatgatgaggaagataaaggctatcagcagcagtgtcagtagaaccccagcacaaaaggcaaggattaaatgttttttgttgtggtggttagagagacagggtgcagggctagttgttggggctgctgtggagagagtgccttgtctttcagtgtcgggtttacatgtggagccattgcctcccatgctgtcatcccctttcaagaaaaagtccggtcatagcacgacgcagtcgtctaagactgagcccccggccgtaatggccgaattcccgggcatatgtccggtaccgtcgactgnnnnnnnnnnnnnnnnnnnnnnnnnnnnnnnnnnncggccgcttcctcgctcacaaactcgctgcgctcggtcgttc

SEQ ID NO: 161764 - DNA, 1225 bp, Homo Sapiens
  misc_feature (1110)..(1144): n is a, c, g, or t
ccatcaggtttatctcataggggtttcggcaaatggggaattcaggaacttctgtaccctaagagggaaagtagcgggaatatagtaaattctgcctgtttttaggtagcgtgagaataatatcctccattatctgcacaaaatcctgtgacagcaacttatctgcttcatccaatactatcatctggacatgatcaaccttttctactcctttcttaataagatccaggattctcccaggggtagcaatcaccacgtgcactgtatcatcaagcctcattatgtcatctcgtaaattggttcctcctgtggttgccatcactttggcccctcccatgtgtttgctgacctggatgcaaatttgactgacctgtagagcaagttctctagtgggaacaatcaccattgcttgtatattgtccttcttcaggtctagccgttcaagtaagggaatgaggtaggcaccgctcttgcctgttccattttttgctctagctaagatatccctaccagataaagcaatgggaatgctctcctcttaatagtggtggtcatactctgtgcttgctgctgagtgccattattgattgtgttggtgtttttcagctggttcatctgttgctgtgtctgtgtgccccctcctccagggccaccagtgggtttcacagggcctctcagctgaccattttgactggacagacccattataacagggttctctgttctggccgtgctcatgctgttttaattgcaaaggtctttcaaacttcaaaacttttgaaagtcagtagagaaactgtaataacagtttattaggctctccaaaatgaagagataaatataagtcttgctcaataaatgagtcctttattgcaatgcaggcaagcacctgtaagtctctgaacggtaagcagcagtaacttgctctcttgcacggaatcaactttttatttttaaaaagccctctaacaagcttgagttatatctgaattcactcacgtcaatctcctccgctgcccgctctcgtggcgccgccgaagtcgccgcctggctgagctccccggccgtaatggccgaattcccgggcatatgtccggtaccgtcgactgnnnnnnnnnnnnnnnnnnnnnnnnnnnnnnnnnnncgccgcttcctcgctcactgacttcgctgcgctcgtcgttcggtgcggacggagtagcgcctatagtgatctatacatctt

SEQ ID NO: 161765 - DNA, 457 bp, Homo Sapiens
  misc_feature (338)..(372): n is a, c, g, or t
  misc_feature (376)..(417): n is a, c, g, or t
cccttactgttattttaatgggcttcagaagaagtgggataataaatgcatgtggtcagtctgacaggttcatcctggaagtctcaacaggcttcagaatatctctatttatatctcctaaaggaagtgagggtacgtagttatcactgctgaaacatgattttttattgtgataaatgttatacatccacactgaatgaatcataagatgaatgcgcctttcctcgccatccaggtgaagggcgtttacgggctgggaaaatgctgatagcccacaccttgtgactcccggccgtaatggccgaattcccgggcatatgtccggtaccgtcgactgnnnnnnnnnnnnnnnnnnnnnnnnnnnnnnnnnnncggnnnnnnnnnnnnnnnnnnnnnnnnnnnnnnnnnnnnnnnnnnaataacgacgtagcgccctatagtgactctatactctttt

SEQ ID NO: 161766 - DNA, 444 bp, Homo Sapiens
  misc_feature (199)..(230): n is a, c, g, or t
  misc_feature (325)..(359): n is a, c, g, or t
aatattgggggtggaggaaaaaaaccccacgcgcgcttaatgctctcatcgagcccgcggatttctcctctgggaacacaccgctattgggccacacgtgttcaacataaccccaactgggtgccccgcgcgccgcccacaccgcgaatgggttctaaaaaagctttttcaaggggcccaaggcgcggcccaacaaaannnnnnnnnnnnnnnnnnnnnnnnnnnnnnnnagcttttcaattcaggctgctttattctgttgtggcaggagttccccggccgtaatggccgaattcccgggcatatgtccggtaccgtcgactgnnnnnnnnnnnnnnnnnnnnnnnnnnnnnnnnnnncggccgcttcctcgctcactgacttcgctgcgctcgtcgttcggttgcgacggaggtagcgccctatagtggtcgatacattctt

SEQ ID NO: 161767 - DNA, 649 bp, Homo Sapiens
  misc_feature (533)..(567): n is a, c, g, or t
tttgagatggagttttgctcttgttgccaaggctggagttttctactttgaaatggcaaccacatagcggacaggtgcatttttcagccaaacaagcattggcgttaactgcaaacaagagttaaatggcaagaactgcttgggctgtcatgggctggcctggggtgggtgggcaagactgtccagagagaacctcttccaccccagcctctcactcctctcacgtgctcatgttcttccacttttctttcctggattggaagtgcaggctgattccaggtcccaaacacacctcaagccagagttttccaaattgtgatttgaggttcattcatgagtcttgaaatcattagtgagttgtaaccagcaatttttgaaaataaagcatagagtagtttagaaaacaacaaagggcatcacatgaagaaagtataaacactgttttgtaatttaaacatttctttttcagttgtgtgtatatgcccggccgtaatggccgaattcccgggcatatgtccggtaccgtcgactgnnnnnnnnnnnnnnnnnnnnnnnnnnnnnnnnnnncggccgcttcctcgctcactaactcgctgcgctcgtcgttcggctttacgcggagccccatatagtttatcttaaaaatgtg

SEQ ID NO: 161768 - DNA, 970 bp, Homo Sapiens
tcaaactttaggcctaccaagcttttgtacaaacccaggtttaaaacgacggcaagtactataacggttttaaggtagcgaggcctgggtggcgaattcggcacgagggtcatggcggatggtcaggtggcggaactgctgctccggcggctggaggcgtctgatggcggcctggacagcgccgagttggcggctgagctgggcatggagcaccaggcggtggtgggcgccgtgaagagccttcaggcgctgggcgaggtcatcgaggctgaacttcggtccagcaagcactgggagcttactgcggagggcgaggagattgcccgggagggcagccatgaggcccgtgtgtttcgaagcattcccccagagggcctggcccagagcgagcttatgcgactgcccagtggcaaagtgggcttcagcaaggccatgtccaacaacgtggattcgggtggacaagagtgcggctgacgggccccgggtgttccgagtggtggacagcatggacggatgaggtgcacgcggcaggctccagctggtccggggggggacaggctgacgaagctgggggacgacggagaggagcgagcctgagggaagaagggaaggactggcgggcatgaacgctgagctctgcaagaccgtaccgggcagcacgccaacggccagagaacaacaggccgccagcaataatgcaaagacaaagagacacagacgcgtgacaccccggaggcctgaatcttacaagcatgagcctctgcgggaccggggaaccacgggacaacagatcaaagggcaaccagtaacgaaaatagcatgtgggggaacacagaggggaaggaaaacagccacccgaaacagagggggagccaaacagactacagcgcgagcgatgcggcacagaggggcacagggagccaccagagcaacagggcagagggcatcaatccgcagagacgaaacgcgg

SEQ ID NO: 161769 - DNA, 953 bp, Homo Sapiens
  misc_feature (839)..(873): n is a, c, g, or t
gatttttagtaataggacctttctgatttactggttaaacattaatgatgctccataataatgggcaacaaaatcggagtgtctggcatagtaccttcctcttctcagactcaaaatcctgaaaaaccatcatatttacttccaattatgaccagaggtaccggaaatgggtcaattaattcatgatcctgaggatgatccttcggcatattattccagatcttctgtctcatttcagaaactgctttagcatttgtctttcccagtttcattatcactttgtctacatggctttttgtggcttgcaagagattttccatggtgggccagagatcattaggttttgaaagatccagaacgagaacaagagaaaacgtccgtaaggtgtcacctgtgatgggtatgctgattaagtccaataaagaggttcctccaccgagttcccaaaagtgagcgatatcttttggtgtgttgtgcccttttgctcttcttccatatgtatattccaaagctaaggttggttttggtggttcatctctgtcaagacaccttagaataatagtagtctttcccccatttttactgccaatgaagaaaacaaatttttctgcaatttcagctccatcaccttcacttccattgaattccccttgttttccacttccagcttttgcacatttcccacgagagtttcactgggcatcttcgacggcctggctgccgcaaacgtcacaggctcggagtagtgaccagcctagaatcaggcggcgagctccgcaaggagtctccccggccgtaatggccgaattcccgggcatatgtccggtaccgtcgactgnnnnnnnnnnnnnnnnnnnnnnnnnnnnnnnnnnncggccgcttcctcgctcactactcgctgcgctcgtcgttcgcctcgacgagctagcccctatagtgattaatgcaatctt

SEQ ID NO: 161770 - DNA, 705 bp, Homo Sapiens
  misc_feature (41)..(54): n is a, c, g, or t
  misc_feature (298)..(310): n is a, c, g, or t
  misc_feature (584)..(618): n is a, c, g, or t
atataaaatggtagctgtatgtatgtaactctgaattaaannnnnnnnnnnnnncagtcactctggttctaaatccttattgggccaagctggagttttgaagtgacagaggaaataactgaaagatgacttgtcaatctggaacaaagtctatcatgtaaaaactgcagcaggttaactaggtgatgcgtcttcaatggggtagtgaggctagttgttcatgtctatggcttatttttgatgaatgttcctcagatatcctatggacgcttatgaaggcagtcgagtggcatttgcnnnnnnnnnnnnnttgcagtcagagcacagacaccctgaatgaagccctggcatgatgtaaacacaaaagaaagtgtctcagcaaggctgagccctccttctcgtgtcatgcattgcttccttttccgaaggccatttttagatcatagaatgagcacctctggttggtgccacaggattgcagaggtttggatttacatggtaagattcatggtatttagggagatgcttgctgtcccggccgtaatggccgaattcccgggcatatgtccggtaccgtcgactgnnnnnnnnnnnnnnnnnnnnnnnnnnnnnnnnnnncgccgcttcctcgctcactactcgctgcgctcgtcgttcgaaaagcagcgcattgcgtccgcattattgtaggtcagtatacgtttt

SEQ ID NO: 161771 - DNA, 1007 bp, Homo Sapiens
  misc_feature (865)..(899): n is a, c, g, or t
  misc_feature (902)..(944): n is a, c, g, or t
taaaacagtcgttttgggtttgtcttaggaattgggttcaggagtctgagccctttccgggttcttctaatcgtcaaaggagaaatgtgacctgctgctgagttggagataaataatccctggtgtccacagccaacagaatcaccaccaacaatgggataaaaattggtagccagtacttgtcacgcggagcttttatacagtaatgttgagggcctcagactcatagtccagctgccacactttgcccgtacagtaagtaggttccactgtcttcaaactgtggcaatttgtaatggagatgttttggtttctcataccagtacttgagagcttcaccatccttataatagatcaccttgtacacatcccagttcctccaaccatggcacctgaggaagaggggctggccctccatcaccacctcagcagaggcctgaaggagcagccagtcactgaagacttccaggtacacaggttcactctcattaacttgttggtgctgacatttgtattctccactgtcttcaaatttggcattcacaatattcaaacttgaatttgtctcttctgaaaggctgccattgtggaaccatttggtggaactgacttcaaagaaattgttcccattacatgtaagagtcacattctctcctttaaatattctattccatggagggttcaaggagaccttaggtttctgagggactgctaacacgccatctggagcgaagaacagtaaggctacacacagtagagtaggggattccatggcaggagccatcttcttcatggactcctggtgcttactgtccccggccgtaatggccgaattcccgggcatatgtccggtaccgtcgactgnnnnnnnnnnnnnnnnnnnnnnnnnnnnnnnnnnncgnnnnnnnnnnnnnnnnnnnnnnnnnnnnnnnnnnnnnnnnnnnaaaaaaggcaggcccgcatttggctggctccacttatttgaggcgtttaggattaaatgtctt

SEQ ID NO: 161772 - DNA, 926 bp, Homo Sapiens
  misc_feature (151)..(151): n is a, c, g, or t
  misc_feature (312)..(340): n is a, c, g, or t
  misc_feature (812)..(846): n is a, c, g, or t
ttgaactttggaacttaaggtaacaaggatgccagtctattcggctttaagaagtagaaagatatctgaaacaaaagtatagacttcctgatggtgtaaaaaggggcatcttctaaatggaaatttataatttcttgcaaggtaaaattanagaattgagctttgggatgtctgattacaaggctactagctctcttctctattccctcaaacctctcccttcttgaattacttctctgctgctaataagatgctagggctgaataaaattgtcccttaggaagcccttagtcatcagctaagcacagcccnnnnnnnnnnnnnnnnnnnnnnnnnnnnngtcgttcacattgaaatcattttgggagcgagaaatgcagtattaaatattttgatttcacagacctttaagcttccttgctagcaagggagttagattaaacagaaataatattgtccaaaacacaacttgttaaatagaatgcattacacaagaacgctgaaagatcttgcatagcacaaggtcaggtgtgcaaggaattgtacttgttcattcttctgtaatacaacaatttttttaagattctcatttagcttagttccccatcagatctaagtttaggaggatttatgtgttgctgtggcagtgtgtgtggtggaggagaggggggcttatagctttcccggtcacgtgtccacacaggatctctgacatccattgtctagtttggcccttaatccccggtcagtacaagcagctgcccggccgtaatggccgaattcccgggcatatgtccggtaccgtcgactgnnnnnnnnnnnnnnnnnnnnnnnnnnnnnnnnnnncggccgcttcctcgctcactgactcgtgcgctcgtcgttcgctgtgacggagtagcgccctatatgagtctatacagttt

SEQ ID NO: 161773 - DNA, 1203 bp, Homo Sapiens
  misc_feature (112)..(112): n is a, c, g, or t
  misc_feature (180)..(365): n is a, c, g, or t
  misc_feature (432)..(432): n is a, c, g, or t
  misc_feature (1089)..(1123): n is a, c, g, or t
cagggcaccgtggggaatcccagctccaattttctgccacccctagtttccctgggggtgggactcaaaagatcccctggatttttacctggctccgtgcctcagtttcccntataaaatgggtgataaaacctttccctcacagagggtgttgagggagttaactgcccttactagcannnnnnnnnnnnnnnnnnnnnnnnnnnnnnnnnnnnnnnnnnnnnnnnnnnnnnnnnnnnnnnnnnnnnnnnnnnnnnnnnnnnnnnnnnnnnnnnnnnnnnnnnnnnnnnnnnnnnnnnnnnnnnnnnnnnnnnnnnnnnnnnnnnnnnnnnnnnnnnnnnnnnnnnnnnnnnnnnnnnnnnnnngttgcagttattttaacctggctgttttttcttgagttaactaaaagcctggttgtcaccatccctnccttccctcccgcctctaatctggcctgcccccactggaggtccccatgtctagtcgtccggggtaccgtctccgaaggttgctggagaaagggaagcttctcttccagcttgtccaggcccctgcaggcgaggctgttcatagtggccagctggggctgcaggtgctcgagcagcggctgggcgtggtccagggcacgggtggtcaggccgcacacgcagttctcagccaggcggcaggcggagcccagcagcgggtgcctgtccttggctgcactgtaaacatcgcagaccgcggtgcacgtggccctgaccaggggcagagccaccacacgctgcaccacgttctgctggtcctgctcccacacactggatctggggatctgagccgcctcttcttcagacatcgtgctgcaaacagggtcaccctgcggggcaggattgagtaaggggagcacctgcccaggcatcagatcctgtcaaattgggctctgtgacttgagcaactctcaaacctcttggggcctcagtttcttcatctgcataatggggcattctgtggagctcagacaatgcatgtccagagctctgtacacagaaggtgtcccccggccgtaatggccgaattcccgggcatatgtccggtaccgtcgactgnnnnnnnnnnnnnnnnnnnnnnnnnnnnnnnnnnncgccgcttcctcgctcactacttcgctgcgctcgtcgttcggctatgacgccgctagcccctatagtatctatacagttt

SEQ ID NO: 161774 - DNA, 1103 bp, Homo Sapiens
  misc_feature (636)..(648): n is a, c, g, or t
  misc_feature (652)..(671): n is a, c, g, or t
  misc_feature (954)..(988): n is a, c, g, or t
  misc_feature (992)..(1026): n is a, c, g, or t
  misc_feature (1064)..(1064): n is a, c, g, or t
  misc_feature (1068)..(1068): n is a, c, g, or t
gtttaacacagtcacctgagtaagttagattcttaggcattctggccctgggtttaatcaaatctacatggcagaattagcatcccaagataagtggcattaatcctgcacaggtgccccacggtggacacctggattaggagggaattaacgggattgacccctaggagcaaacagtgccaggacacccacagcccaaagttggaaggagcacaagtgttcactgatggatggaatggataaacagaatgtgatctaaccataccatgaaatattatccagcctttaaaaggggaggaagttctgatgcatgctacaacatgaatgaacccttgaggacattatacaagtgaaataagccaggcagagaaggataaatgctgtatgattctactcatatgaggtacctagagtagtcaaactgatagagaaagtagaatgttggttgctaggagctgtggggatgggaagatgggaagttgtttaatgggtagagtttcagatctgcaagatgaaaagggttctagtgatggatggtagtgatggcttgcaccacaatgtgaatgtactttactaactgcacatttcaacatggttaagatagcaaattttcattgtgttttttaccagaatttnnnnnnnnnnnnngggnnnnnnnnnnnnnnnnnnnncaaaaaagtcacaggacaaaacaaggtgagaatggtctcatgaaaaccaaagatatagagtgtttctagaatgaaggattcattgaatgctgctaagaaaaagatgagatgaggaatgaaaacatcagggggactaatgaacaggggcactactgctgaaaccatacagtgtctttaagatgcagaagtagggttgaaaccacatctgaagtaggtgacactctcttcttcccccggccgtaatggccgaattcccgggcatatgtccggtaccgtcgactgnnnnnnnnnnnnnnnnnnnnnnnnnnnnnnnnnnncggnnnnnnnnnnnnnnnnnnnnnnnnnnnnnnnnnnncgattttccggggtctaattgaaacggacgccttaagncgcnccctaatagtgaaaggtcgtattaatcaagttttt

SEQ ID NO: 161775 - DNA, 980 bp, Homo Sapiens
  misc_feature (863)..(897): n is a, c, g, or t
catgatatttgcggccaagttggtatttcgggaggccaaaatttttctaggtgttgatttgataaggtcccaaaggcttgtatcgccagcatcttgccaatgcaacctggtttttcgtgcattgagacctgtgtacagtgatggtatctcggcctggtccaggctgacctgcctcacagttgcaccgttgccaacggctttgccatcggaattgttgttgaatccttgacaccactgaatgatctcttctttgtgggcatggtttctttttgcgtggttctgcctttaagatttggcgccaggtctgccttctccttgagaacgtctttgaagttgagtccactgtttagggttgactgcctgtacttcagcagagcttccttctgtccattccttcccaaggcctcagttttcactggtccagcgtggaagccacatctccacttggagaaatcagaatgtacccacttgaccaggtcttcaagcttcacaatcaccttttcggaaacagcaatgacttcatcctcgccatggtcgctatttctgccctggggagtgtcttctgggaggaaataaagtttagagctggataaaagttgccggctggtcctctcttcccacaacagctggagctccgctatgcaaatcggatcctttggcgtacatcttacaaagaaaaagtcgccaagggacaaaattcttggtttgccttcaaggtggaattgaaaagccttgtagaaaatgtaaggtccgtgcaagccacacggtgagccgacccactggagtgagttgggctccatctcgacgttctccccggccgtaatggccgaattcccgggcatatgtccggtaccgtcgactgnnnnnnnnnnnnnnnnnnnnnnnnnnnnnnnnnnncggccgcttcctcgctcactgcttcgctgcgctcgtcgttcgctacagcgagtagcgccctatagtagtctatacatccttta

SEQ ID NO: 161776 - DNA, 954 bp, Homo Sapiens
  misc_feature (834)..(868): n is a, c, g, or t
caaaaagattgccattgtttcttctcgaagcagcatgtttcaaatcagggaaaggcttctcttccctagtcctctatcaggaatatgaggaatataagccaccagccaggtcattctttgaattcactagcagatttaaatatgaaaagataattttccttgctagcagctgcaccttttcattatcacggttgtatttacttgttggtgatgttggtatagaaagatcagtttcatcacctactgcatactgtttgccagacagaaaatccagtagttgactaggagatactgtgttataattttcacaattagaagtcaaagccctacatttttgataaacatcaatcagatctaacatattactgttcttcaagaaatcatcataaatcttcctaacgtcctcataatggtcagtcacgtccatgttttcaactggtaagttcaatttctcatggagcaagtatttccatgtcaataaaacatcactgagagagactgtaaattctccactgtgctgtttgttgttctccgccatagaaagctgcaatgccaagagcatggagtctgcaccacatagagtagttctctcagagttacaaagagcacgccgattttttcgaaactctttaatcatatccgagacagacttctgattaaacacagccattatgtgattaggggtagacccgaagacgtactcttcagtgtgcggaaggatccccaacgggatgccctcccgcggccgccgcagtcgccgctgtcgccgctgaatacagttcccccggccgtaatggccgaattcccgggcatatgtccggtaccgtcgactgnnnnnnnnnnnnnnnnnnnnnnnnnnnnnnnnnnncggccgcttcctcgctacactgacttcgctgcgctcggtcgttcggctagaggcgagtagcgccctatatgatctatacattttta

SEQ ID NO: 161777 - DNA, 607 bp, Homo Sapiens
  misc_feature (60)..(82): n is a, c, g, or t
  misc_feature (478)..(512): n is a, c, g, or t
agaaaacaaagtatacacttagtgacttgatacaaatgaatgaatttgataatctacagnnnnnnnnnnnnnnnnnnnnnnnctcaaagccattcttcttatgtgaatctctggtgtctctgaattataagaattgtgaattatgattaataacaaaatgcatgacaaggactcattaagggataggcattaataaactgcaatgcacacttactggagtaaggcctttaaagatgtacaagaaaaagaaagaaaaggcattgaaaaattgcgttgcctaccaaacgctaaagtttacctaagtccattaatcggcacacacaggcaatgggtatgtaaaagggaccactctaaactgcttttagagggtagctcgatctaacaccagaaagagtaggggcgagagcaaggaggaactcccgtatcccccggccgtaatggccgaattcccgggcatatgtccggtaccgtcgactgnnnnnnnnnnnnnnnnnnnnnnnnnnnnnnnnnnnccggccgcttcctcgctcactgacttcgctgcgctcgtcgttcgctgagacaagcagcgcccatagtagtcatcagtttttttggccctctcccc

SEQ ID NO: 161778 - DNA, 1132 bp, Homo Sapiens
  misc_feature (271)..(271): n is a, c, g, or t
  misc_feature (461)..(656): n is a, c, g, or t
  misc_feature (1019)..(1053): n is a, c, g, or t
ggggcacgtggggtacggtgggagtattttcccccctcaatataatacggcccgcaggtcagctttcgggagtcaggtctttggaggcgcccggggagaaaatttcctcctctgcaaacccctaggggatgggcccagcaggggttttccctctgggaggttggaaaaagggggcggcgccttatggacacctcctccaaccctgggggttcattgaggaggccacagagttctcctttcctccaaaactagtccaagggcaatacaatanaaccggaaaacaggaaaacggcaacacggattgcttccaggtccaagccattcatgggaggtcaattcgaaaaaattataccaaaatttaggctccaaggcaatggatggggttccaccaccttgctaatttcccagccactttccggagggttgaggccaggccagatcaccaggctcagggaggttcnnnnnnnnnnnnnnnnnnnnnnnnnnnnnnnnnnnnnnnnnnnnnnnnnnnnnnnnnnnnnnnnnnnnnnnnnnnnnnnnnnnnnnnnnnnnnnnnnnnnnnnnnnnnnnnnnnnnnnnnnnnnnnnnnnnnnnnnnnnnnnnnnnnnnnnnnnnnnnnnnnnnnnnnnnnnnnnnnnnnnnnnnnnnnnnnnnnntccatcactttttaggttttgataatggtttgtatttgctgtattttacacgccactcaagaacttctttacagcgctgacatactccatcatgaagttttgcattaattttcttggtctgcacacttttatcgaacttgtcatttttgaagctaaacgtattctggtgcttctgaggtctggaacgagccacgttgcctttctgggagctcatcgccgaaatcaaagccacccctcgccgggagcaggcaaaaggatgaggggaaagaaaaccaacgaactactcccaggaattgacgcttctgtcaatcccccggccgtaatggccgaattcccgggcatatgtccggtaccgtcgactgnnnnnnnnnnnnnnnnnnnnnnnnnnnnnnnnnnncggccgcttcctcgctcactgactcgcctgcgctcgtcgttcggcataataacccgcctagccgcccatagtactaaag

SEQ ID NO: 161779 - DNA, 1337 bp, Homo Sapiens
  misc_feature (78)..(112): n is a, c, g, or t
aaagacttgtaaatcatataggggctagctgtcgagcgaacgacgagcgcagcgaagtagtgagcgaggaagcggcgnnnnnnnnnnnnnnnnnnnnnnnnnnnnnnnnnnncagtcgacggtagcggacatatgcccgggaattcggccattacggccgggaacactggtgctagtatacatcaccctggtgcgcaagagcaggcatactcagcccactgcagccgactgttgggacccgaaggactggcccgtgtagtatcccaagttcctagcaaagcttcatcactactttgtcactaagcacatcctaagccacgtgagaaaatcaccagacaacaatgatgctgtttatacagttgaagaaatctatagcaggtgattacactagctgcactagcagcgccaggaatcagcaggccaagagcatccatacccatagtgaagcagcgtacgacatacattttcaggcaagagctcctcccctagtgatacgcaaaattcaaatagacattagcaagaagcaacctgttcacacaagatgcaccaaatagcacatgttacagaacagcaggacaccactgagcacagcaacggcaacagaacaccatgtaacttctctagcaacacagattcccacatcgacacaactcacacttctcaccgacaagtacctggaccaccagcacctctcccaccttatttgcagccccttaacagaacgcatgcgctcgacggccggcgccgttggctgcctcacgcccctgtaattcccagccatcccggggcaacggcagccgtgcacgcgcttctcccctggcaggtccggcgccttcccgcacgaccacgcactgggccaaccattgggtgcacccccctggtctcttacttcaccccttcgaccccacttacgcccggcatgtctggtgggcactgttgcgcctggcgcttccccaggcttactcggaaacgctcttgaagccacgggacacttccgcttgcaccccgcggaaggtgacgactgccctcgccgccgcggcattcaacacccaattcgtcccccgcacttggccgtttccagagcactgtgtgccaaccaaagggcgccaagagaacttcccacttgaacgcaccacagattacgcggccaagccctggaccgagccgtcttctacggacagaatggttcttgcatcatacacagtgtcacacgctacaaattccgacaccgacaaactcccgggatacgccacgcaggaaaaatcccccgcgacaaccgagcctgtgctcaacaacaaatgtccccacaccgttgtaacccaccgacatttacagcg

SEQ ID NO: 161780 - DNA, 413 bp, Homo Sapiens
  misc_feature (289)..(323): n is a, c, g, or t
  misc_feature (326)..(368): n is a, c, g, or t
caattattgccgctctaaaaatgcccccaccatcttgaaccaagttgttcaacgcgtacagattctatacgtgtatatactcccccatcccatcataaaaatagttgttgcccactaaatatagttttcctatgaagaaacatcaacttaatcttgtattaccaacaaatatctatgaccttaaatcattttcattctgggtactaaatagtgtgaattatagttgttttctcttccccccggccgtaatggccgaattcccgggcatatgtccggtaccgtcgactgnnnnnnnnnnnnnnnnnnnnnnnnnnnnnnnnnnncgnnnnnnnnnnnnnnnnnnnnnnnnnnnnnnnnnnnnnnnnnnnaatgacgagctagcgccctatagtgatctatcgattccttttttt

SEQ ID NO: 161781 - DNA, 533 bp, Homo Sapiens
  misc_feature (175)..(289): n is a, c, g, or t
  misc_feature (431)..(465): n is a, c, g, or t
tctcttcaaccttgaaacggacacaccaccattttatcagctgtcctcttaaactacctaggtgattgctctctttctttttaccagaagggaagtctcccatgtatttgcttacatgtatgttttcatctaattttcacagatagaaaacataggcctggcgtggtagctaatnnnnnnnnnnnnnnnnnnnnnnnnnnnnnnnnnnnnnnnnnnnnnnnnnnnnnnnnnnnnnnnnnnnnnnnnnnnnnnnnnnnnnnnnnnnnnnnnnnnnnnnnnnnnnnnnnnnttagctgggtgtggtggcgtgtccctgtcatcccagctacttgggaggatcacttgagcccaggaggtcaaggctgcagtgagctgtgatccccggccgtaatggccgaattcccgggcatatgtccggtaccgtcgactgnnnnnnnnnnnnnnnnnnnnnnnnnnnnnnnnnnncggccgcttcctcgctcactgacttcgctgcgctcgtcgttcggctcggacgaggctacgccctatta

SEQ ID NO: 161782 - DNA, 585 bp, Homo Sapiens
  misc_feature (471)..(505): n is a, c, g, or t
cccatgggttcttaaccaaatgtctgaagctgctagacatctgcaaagaaggggataagtttagatttcctactgattttggaagaaaaatagttgttcctaaggaagccagagtcatccatgagcagggacctgtcttcagaatcgaagaagcataatgtccttaatgcttacactcatgacaagttgagagtcagcaaaactggcaggtggaaggggaaagagaaatggagagtttgaacatctgcagtgtactttggaataaagtggctcaactgctttcagaaatgaattgctggagtactgggagaaaacccagttctctagagtcagggggtggggagagagaggcctcccatccccaggaaccctctgggctgagctgtggcccagaactcttgttttggccttatttttcatcccggccgtaatggccgaattcccgggcatatgtccggtaccgtcgactgnnnnnnnnnnnnnnnnnnnnnnnnnnnnnnnnnnncggccgcttcctcgctcactgacttgctgcgctcgtcgttcggctcgacgagtagcgccctatgtgagtctattacaatt

SEQ ID NO: 161783 - DNA, 951 bp, Homo Sapiens
  misc_feature (832)..(866): n is a, c, g, or t
tgtccttactactgtgagatcagccacatttccccagttgaagcctcacttgcggcgagaaagctaaccatgcttcgatcgacaggcagccacccgccagacttccagcgcgcaccgatgcgggctgtagcccccttcttggggccacctgacatgccaccgcgttgacacaccgcgcctggcttcaaggagcctgcacatgtcaccggcggccagggcgacaccccgtcagctcccccgaggtcagtccgggcggcggttcccacctccccggaccctgtccacccctctagggttctcgcgcgggaagagccgttccaatcgcgacaggagaggccactacgcgaccgggtcgcaatgacaggcacccctcctgttgtcagcctcaccgagaaacccaccccaggctgccagcacccttacccaagcttctgtttctcctccctactcatgggctcggcccccgccgtccacacggaggtggccgacaccaggcagaacgcggccgtcgccgccactagtctccatcgcgctcgctggggaaccggggacccacagccccggccgccggcttcgctcatggccccgcggttccgcgcacgcgcagctgctacgcccggccggtgagacacattgctggacgctggtggccagggggctgctagccgtgccgagacggggcgggatgcggagtaacacggacggccgccggcgccaaactgtttcccgaagccaccaagccggtccccagcgccagcgctgccaccgccctccgccctcccccggccgtaatggccgaattcccgggcatatgtccggtaccgtcgactgnnnnnnnnnnnnnnnnnnnnnnnnnnnnnnnnnnncgccgcttcctcgctcactacttcgctgcgctcggtcgttcgacaataacgacggagcgccctatagtgagtctaaatccaagtt

SEQ ID NO: 161784 - DNA, 585 bp, Homo Sapiens
  misc_feature (190)..(429): n is a, c, g, or t
cagtcgacggtagcggacatatgcccgggaattcggccattacggccggggacctgtttctgggcagctctctgaaaagctggaatgttggaggcatgctctattcttttctcccagaggaaaaagatgtgaagaggcattctgtcttggcactgagctgtgctaacttgtggggagaggctgatgcagnnnnnnnnnnnnnnnnnnnnnnnnnnnnnnnnnnnnnnnnnnnnnnnnnnnnnnnnnnnnnnnnnnnnnnnnnnnnnnnnnnnnnnnnnnnnnnnnnnnnnnnnnnnnnnnnnnnnnnnnnnnnnnnnnnnnnnnnnnnnnnnnnnnnnnnnnnnnnnnnnnnnnnnnnnnnnnnnnnnnnnnnnnnnnnnnnnnnnnnnnnnnnnnnnnnnnnnnnnnnnnnnnnnnnnnnnnnnnnnnatacccaacaagcaaatagcagaatggaattaaacccataaaggatggcttcaaaggcaatgcttaaccactatactgcctttaaaaattgtcctaacagttcaacttcaattacagaaagtttataataattagatgttaatacttttatgctta

SEQ ID NO: 161785 - DNA, 993 bp, Homo Sapiens
  misc_feature (229)..(476): n is a, c, g, or t
  misc_feature (495)..(513): n is a, c, g, or t
  misc_feature (884)..(918): n is a, c, g, or t
cctccaaagtagaatttgtttcctgcctccaggggcctttggcacaggctgtttttttctgcctggaaacacccttccttttggacctctgcactgccagctgcctcctgttaatcagatctcagcctaaaatgttgtctctccagtgagaccctccaggggactgcacgagtatcaaatacctttgtcaagaaataaaacctccccaggcccgtgcgcagtggctcannnnnnnnnnnnnnnnnnnnnnnnnnnnnnnnnnnnnnnnnnnnnnnnnnnnnnnnnnnnnnnnnnnnnnnnnnnnnnnnnnnnnnnnnnnnnnnnnnnnnnnnnnnnnnnnnnnnnnnnnnnnnnnnnnnnnnnnnnnnnnnnnnnnnnnnnnnnnnnnnnnnnnnnnnnnnnnnnnnnnnnnnnnnnnnnnnnnnnnnnnnnnnnnnnnnnnnnnnnnnnnnnnnnnnnnnnnnnnnnnnnnnnnnagagggaaactccgtctcnnnnnnnnnnnnnnnnnnngacctcccttgctttcccctactgatttctcttggaaatgacagcaatgttaccctgattactctcgcagcccataccctgcaaatggaaatctgccaacttcaaccaggaagaaaagactggaatgcaggttgctttttatagcatttcaaggaaagatcattcattcactgcctatacatccttccttccggcatcactgtgagactctgcatgcacattaatttcatccattcctcttgaaaaagtgaaggacttaaaccagaaaagcggccacaggtcacaatacaagatggttaacgtcactctgttaacagtgccccggccgtaatggccgaattcccgggcatatgtccggtaccgtcgactgnnnnnnnnnnnnnnnnnnnnnnnnnnnnnnnnnnncggccgcttcctcgctcactgacttcgctgcgctcgtcgttcgctgcgacgagctaagcgcccatagtggtattc

SEQ ID NO: 161786 - DNA, 1025 bp, Homo Sapiens
  misc_feature (910)..(944): n is a, c, g, or t
cggggcgtgcgccagggtgggtcccccgcccgtggtcctggtgccgcctgcggccccgccgtgttgtgggggtccatccggccgggctggagcccggtgcacctggcggcttgtgcctccgaggggtgccctgtcccctcgcggcagagggttttttcccagagcggccactgtggtgctttcgtagagtagccgttctaatgcagcggccctcaggagttcagtgcaagtctccactgttctcccccgagtcatgggtgcgcaggagggtgaagttggccagcagcccggggggcagtttccggaggcggttcccgagacaggtccagatgccccagagctttcagcccgtgtagccacgagacctccaggacctccagctggttttctttcaataccagggtgtccagggtggctgaggcctggaagaggcccggggtcagcccggtcagggcgtttcgggttagatccagcaccctcagctgcggcactggccgcaggaattcgggcgagaggctttccagcccattgctggagaggtgcaattcttggagcttagaggcgccctggaggaggttggctggcaggtgggtcaggttgaagaattccacggccaggtgcacggtgtcggctggcaggtagccggggatttcggcaggtggttgacaggagatggagctgccatggtctgagcggaacacctggcagtctttggggctcagggtgaccccccaggctgaggctgccaacagcagcagcaggaacagagttctagaaacatggggttgaatgccccctgggctttttggtcgctgtctgctccaagaggacactggtagctctgctcttttgcttctcccccggccgtaatggccgaattcccgggcatatgtccggtaccgtcgactgnnnnnnnnnnnnnnnnnnnnnnnnnnnnnnnnnnncggccgcttcctcgctcactactcgctgcgctcggttcgttcggctgcaagcgagctagcgccctatagtgagttatcatc

SEQ ID NO: 161787 - DNA, 1442 bp, Homo Sapiens
  misc_feature (44)..(78): n is a, c, g, or t
  misc_feature (257)..(319): n is a, c, g, or t
  misc_feature (411)..(433): n is a, c, g, or t
  misc_feature (985)..(985): n is a, c, g, or t
  misc_feature (1315)..(1315): n is a, c, g, or t
aaagcggacgagcgcagcgagtttttgagcgaggaagcggccgnnnnnnnnnnnnnnnnnnnnnnnnnnnnnnnnnnncagtcgacggtaccggacatatgcccgggaattcggccattacggccggggggggccggtgcgccgcctagaaaaacttgtgcggggccatttttggggcagtaagatcgagcgaggagcccaagagcgagcgcgcagcacgaagctcgagccgcctcccccgcgcgaccccacctcgnnnnnnnnnnnnnnnnnnnnnnnnnnnnnnnnnnnnnnnnnnnnnnnnnnnnnnnnnnnnnnncgaccaccagccgcgctaaccgccgaccaaccgccaccgaggcgcctgagcgagagcagaggaggaggaggcatgagtgaggcgggcgaggnnnnnnnnnnnnnnnnnnnnnnnctcccgcaggctccgacggaggcggccgccgcggctccccaggaccccgcgcccaagagcccggtgggcgtggtctgcgctcgcggcggttggccctggtggttctcccctggaggctggggacccgttggccggtgtgacctggagtggcctacaaacctaatcgtggagggaatgtaattgtgcaggtatcccggggacccctggaggggaacgtgtgctcacggcctgacgcttggagagagtggttgacgggcccctttgctgacgcgcattcactaccagtgatcggggcgttgccagatgaaatggcgcgtgtgacggccggggaggcgagaggaccgagcatgcaccgagggcgcaccctctccacacccgggtcacgggtaccaccgccggaatcacgagggccgcgggcgggggggattgggcgagtacccgcgaatagtggaaaatagcgtttgttgagaggggcgttctccatagcgcgaatgcctccgacggggggggccacacccagcccagaatggggcgccggcactgtccctcgangcgttgggtatcccgccgccgggccgctggcaggcggtgccgccgtgctgtaggcatctagccggccgaccaccgcgcccacgacggagtcagtattacggtgcgtgctcatgcagggggcgacccgcacatgtgtccctacaccgcgtggcgcgccttacatacgcatacacctcatctgccgactatatcactcgcttgggtgggtgccacctcacgccaccgcgccatagacagtggggcgctgccggcgctcttgctccctgtgctcgccgcgacgggtgtgggacaaaaaactagtccaaccgccgtgtgtgtgcggggcggtanaatcttattctggtgatgactcgaacacttcatgcaaaacagaggcccgcggggttcgcgcggctggcgggggtcctgagcgtcaatagcgacgcgcgcgccacgcgcggctaacacctggcggacg

SEQ ID NO: 161788 - DNA, 1004 bp, Homo Sapiens
  misc_feature (881)..(915): n is a, c, g, or t
  misc_feature (919)..(962): n is a, c, g, or t
ctggtaccccttgatgagggtgctggaaggtgtccagaggacccttgtgtctcaaattgggggtttggcacctggatagttcctgggaatgtatttacccagtgtctgcgtcggtgggggagatgtgcctctgtgccaacacaccgctggatgattggttctagcccgtcagccgggggactgtcccaccacttctgtctgggtgcagagacacagcactgactacacacaagtcagcccaagccctcgcgggggcttgcatcctggactgcatgagaaaagggatcgtgatgggcaacagggctacgaagacaccccaggggcgcctgctggcagagcagggctgaagttttagaagcagcctccagtggtcagcgctgggggtctgagggtggcagtgctggggattatgatgaggaggctggtcatcactgttagagcaatgccaccagctgggatttagggatggattacaataaatgttaagctttagccagattattaacaaatgtaagcttttaaacccccctctggctgatgcagggcagaggagagggcaggagcaggaggcaggtgggggtgaccgctgtggttcatgtgagtgacatcaggggcgaaaccagagagatggcaggcaggggtacggagggcagtggacaggccgtaggcagattccagggcagtttgggaggtggatggtcacaacctgagggcaggctggatagagaagagccagagagtgggaggaggcaagacagaggggagcgccctacagacacttgcaaggctctgggggacgagccctggcctctgcatcctgtctctgcagccccggccgtaatggccgaattcccgggcatatgtccggtaccgtcgactgnnnnnnnnnnnnnnnnnnnnnnnnnnnnnnnnnnncggnnnnnnnnnnnnnnnnnnnnnnnnnnnnnnnnnnnnnnnnnnnnattaagccgctagcgccctatagtgatctatcaagttctttt

SEQ ID NO: 161789 - DNA, 1041 bp, Homo Sapiens
  misc_feature (674)..(674): n is a, c, g, or t
  misc_feature (919)..(953): n is a, c, g, or t
  misc_feature (957)..(999): n is a, c, g, or t
cgtacttgatgcagactgaagtgaggttagcagtattgaaggtttcaggccagtttatggcatgagtaggtagttagcaaatatggagtgtttcccggatccccgaagcgttgccctggcctggacaccctggttattgacctcttgacatgagtccaagagcaacacatgcgaatcagtaattggagttgccgagccagaatgttgagtgccgccgacccggagagaatgtcgaaactgtgaatgtttgttgcaggcctgctgtgctaagttatttgctatgtgtctgtcagacctgtatggacactctaggaggagcagatgtgtctctgctatacttgacggagaaatgatctgcctctatcttggaaagtcacccacttagactgggaacctaagaaatggatgaaaaggtatgatatgaatggccacattcctaggccagtcatgaaaggtcacctagtgttaatgtagaagtcactagtgttaagttaaggagatacacacgaaaagcacagagactagtttaacacccatgtacctaccatgtcagatctaataaatagttagtatttatacaattttatttccaaagagccaaggattatatgctgaattctaaaaccagtcaaacagctaatgaggatactataatggttaccaattaattaagnctatgatttcttcatatggcacatattctacttgtattcctgatatttcttttttaaacctcatagatatgtcaaagtcacacgtgcctagattctgaacacagctcatttcatgacatcttgcactgtagctggttaattctcatctttttcagaatagaacatgcactagaagctcgtggcaggaacggctccccggccgtaatggccgaattcccgggcatatgtccggtaccgtcgactgnnnnnnnnnnnnnnnnnnnnnnnnnnnnnnnnnnncggnnnnnnnnnnnnnnnnnnnnnnnnnnnnnnnnnnnnnnnnnnntaacgcgctagcgccctatagtgagtctatagcagggtcttt

SEQ ID NO: 161790 - DNA, 964 bp, Homo Sapiens
  misc_feature (886)..(920): n is a, c, g, or t
caaggcaagaaccctttccacccttggccatgagcagaccaaaataatactggctgggcggtaaggaacgcggggccctggtagagcaaagtgcggaccaaagactttgcgtctggttgcttttaccttgcctagtagggtcttcgttctggcgccatcttcatgaagcctcacgaacccgaagagacggctgtagagagagagacacagagcttgttaatggtctgagaaagccagtgacttgctccttcccgagtccaagagcgacagcgacagattggtgagtgccaagctgaggatgaccccgtcatcaacgtgggcaagctgcgtccaggccttcccggagagtatcgctaaccaaccaggcgggtgatggaggtgcgtacctgtccatgccaccaagcgcctccctttcctcgactgtcaggctaacagactcctcttcactctcgcggctcgcttttccttccgccattttctttgcctcatcaccgaaggcaacagcggcggtagtgagcgaccctgcgcaggatttcatggaaacaacaaatttccaagtcccacgacgatacccaaccttaatcgagtagttgaaaagacgccttcaatcgctgcttgagactgtgacgccaattttatcgcctcctcagcggctgcaaggaaaaaagctgaggcaaagacttaagctaccgaagcacgggcagcggaactcggctacctggatcacatctgggaaactacagggaaggcagaagctcgcagtgctggagagcacagcagaatttcttaaaatcacaaactttgccagcaccagcacaaagttgtaattgtgtcccccggccgtaatggccgaattcccgggcatatgtccggtaccgtcgactgnnnnnnnnnnnnnnnnnnnnnnnnnnnnnnnnnnncggccgcttcctcgcatcactgactcgctgcgctcggtcgggta

SEQ ID NO: 161791 - DNA, 571 bp, Homo Sapiens
  misc_feature (63)..(107): n is a, c, g, or t
  misc_feature (497)..(531): n is a, c, g, or t
cggtgagccaagatggtgccccggcaactccagcctgggcaacaagggccaacgtcagtctcnnnnnnnnnnnnnnnnnnnnnnnnnnnnnnnnnnnnnnnnnnnnnccaccaaggtagaaagtttcaagggaacttaagattcaacttcctccatgagcttgggtagcatcctgttaaccctaggggtgtaagccacattcttgcccacaatatgactagtgagagtatctcatggaggcaggaggtgacatttgtcctgtctctggccccaggtcaccctgtactgcacttggtggcttcgtccatagggagggggtcctatctcatagactccaaatcttcatgatggctagggaggatatctggatttgctcacccctgtattttcagagcctcacacagtgcctggaacatggtaaacatttaatactatctgtcaaaaaccccggccgtaatggccgaattcccgggcatatgtccggtaccgtcgactgnnnnnnnnnnnnnnnnnnnnnnnnnnnnnnnnnnncggccgcttcctcgctcaatgaccttcgctgcgctcggtt

SEQ ID NO: 161792 - DNA, 1091 bp, Homo Sapiens
  misc_feature (808)..(819): n is a, c, g, or t
  misc_feature (953)..(987): n is a, c, g, or t
  misc_feature (990)..(1027): n is a, c, g, or t
tgctgtgcgcctctcctgtatcgcttcgtggttgccagtttccgtcctgtggtgcccctgtccctccatgttggcctggtggagtctatgatagtcttctcttatgtggcgtccttgtgccgctcacttggtcccagggacgtcccgctggtagtagtgtactctgtcggagcttgtcgtattatattactttgttgtttggcgccccatttggcccgattgctgcacattggagtggtatccgttaactcgtttttccgagagcccctccattgctgcccgtattcgtggtgaaaagtgacggccttaccccgctttgcctgcagtagatgaccagatggcgcaaatctgcatgcccgtacttgttagagaccgtctggttatcacttagtcactgtgcccacactgagttgataattgaaaccacggatttccccacgttggcactcactgaattcttttagtgtctgggagaacaatgtgaatgggtataagacaagaacggttatggcccggagcttttgttgaaaatgtcttatggcataaaaatttaagagaggtacgtcccctatgtgtgctttgtcacggagttccaaaagtgtttcacacacgaactagtctaaaaggatccatacccatacgaggtgatatttaatgtaacttgatcattaaaccctatgaattggccacggcacctgtggttcatacctataatcctagccttttgtgagacccaggccagaggatggcttgaggcccggagttcaagacccgccttgacaacatcgcaagactcttcctctacgtnnnnnnnnnnnnttatccaggcacaatggcatgcacctatagtcctagctactccagaggtggaggcaggaagatcgcttgagcctaggagttctcccggccgtaatggccgaattcccgggcatatgtccggtaccgtcgactgnnnnnnnnnnnnnnnnnnnnnnnnnnnnnnnnnnncgnnnnnnnnnnnnnnnnnnnnnnnnnnnnnnnnnnnnnnttccggggacaaataaaaaaccgggaggcttagccgccccccctataagtgtatagtttttccc

SEQ ID NO: 161793 - DNA, 839 bp, Homo Sapiens
  misc_feature (188)..(315): n is a, c, g, or t
  misc_feature (373)..(438): n is a, c, g, or t
  misc_feature (710)..(744): n is a, c, g, or t
  misc_feature (747)..(787): n is a, c, g, or t
ggaattactggaatcacaggtctaaaataatcattataatctggatgaaaaatatgtcacattcattctgtcacttttccttcttttgcctatggcaaaaaccactatgatcacaggactctttttcctttgaacatgggcaggctttcagaattctccatgcaaggcgaggcacggtggctcacacnnnnnnnnnnnnnnnnnnnnnnnnnnnnnnnnnnnnnnnnnnnnnnnnnnnnnnnnnnnnnnnnnnnnnnnnnnnnnnnnnnnnnnnnnnnnnnnnnnnnnnnnnnnnnnnnnnnnnnnnnnnnnnnntgcacgcgtgtagtcccagctactcagaaattgaggcaggaggactgtttgagccctnnnnnnnnnnnnnnnnnnnnnnnnnnnnnnnnnnnnnnnnnnnnnnnnnnnnnnnnnnnnnnnnnntctggaataaataaataaaatagaattctctatgcaaccattgtcaatggcatggacttggtttacataaaacgaaacctgtttgccattcccgatgcagattaaaaaaggtgacaaaggtgacctggagaaggaaggagttgaggtgagcttcagatgagatcgggagtgatcagggtggtctggccacagactagctgagcttcaaaggataacatctgcccggccgtaatggccgaattcccgggcatatgtccggtaccgtcgactgnnnnnnnnnnnnnnnnnnnnnnnnnnnnnnnnnnncgnnnnnnnnnnnnnnnnnnnnnnnnnnnnnnnnnnnnnnnnntatacgcgagtagcgcccattagtgatagattacaaaacaaggggttttttt

SEQ ID NO: 161794 - DNA, 934 bp, Homo Sapiens
  misc_feature (308)..(308): n is a, c, g, or t
gcttttcaactgagtttaatttaaaattattctgggttatcttggccaatgtaattgcaagggtactttaaatgtggaaggcagggactccatgtcaaattgaagcagcataaaaagtctacactggtcatcgttggctttgaagatggaaggaagccaagatccaagaaatacaggctgtctccagaacccttctctttagctgatgttggaaaattccatagccatcaactgagttaagtgtgtgctccacagggcatttgagacacagaattatttccaaagggtctggtccaattgtattttgnatgatctccgacactgagagtagtacccacagctggtattacaggctacaggagtttcaaggtagggaaggatggctgtgcatgggcccagccctgtggaggctgatggtcttcagccactccaaggccaccagatctgccactgaagtaggaccttgcttccaatggtgacaagccctacagcagatctacaggcagaccttaacagatacagggcaattttctcttgcttcgtaatttcctagttttaagttgggtgaccattgtacaaaacgttcacaactgacagttccacagacctggggacagatctaccttctctgcttggatcagaggcagttttcttatttccttgcctcgaggtgctgtgtcatacagcagcaggaacagacagtcagacacaaggactcgaggcaatggcggcggctgtgtatggggattgactcggcacctgggactcaagacgagataaccgctttatcagattaaagactgcgattggcaaactgttgtcacttttggtattcttttctccttcctgttcccagggctcctcagaacctcgcgcgtagttaccatttaacatctaccttttcctccgcagacgaggttcttccacgtccgcg

SEQ ID NO: 161795 - DNA, 1060 bp, Homo Sapiens
tttttccaaaaaagcggtaaaagaccggagggaaacccctttccaagtggcctcgccattcgagaatctttgtagggccaggtgaggtttagtaggtgagccaatattttgacctgccccggggttaaataaaattgtttgatgatctggccctttacagcagtgtgagaagatctgacagatgtactcctgggtatagcgggacctgctaagcagtgccatgaggtgtggtatcactgtggcatctgtatacagtagctcctcgtggatgtgacaggactggtgaagatggtacgcacgtcatcggagggcaagcttcaataaacttcaggtctggggacagtagtccttgcaataaggcagggataatatggcagtccagtagagacttgacattgttttcagtacccatagcaagacttcccaacaccactgcacattcagttttcagctctgtgcttgaggtttcttgctgaagcaagtacaacaatcttggaacagctcctaaaacgatgagattggctttctgcttgttgtttccaattacagcatttttcatgtctatgacaccttgtagaactttctggggatcagggtcaaatagcctgtcaacatagtggcgactgctagctgttacttccattctcagagtcggacagctcgaatttgttgcaaaatccttcgaagttatctcccagtaactttcattcctggtccgaaaggacgctcatgcggattggggtctccaacaagcacgccatcttgagccttcccacccggctgctgcaggcgccggcgcgggggccggcactttcgacagccaactattggccaacgctaggcaccgctccctaaaggcagccagatagacgagaactggccacgctctggacaccgctcaagtaccggaaaggcccgcagaaagaagggcaaaagggaatggcgtcaggggctgtcctacgaatcgttctctcagaaacagcagctactctgagcctgggcctcgtgccgaattcgccacccaggcctcgctaccttaggaccgttagagttactgccg

SEQ ID NO: 161796 - DNA, 1226 bp, Homo Sapiens
tcctccatcaaggagtctcccccccaccggggggctagcccgcgggtttaaggggcctctcaaccctggccgggggggaaatattgcgtcggaacaaagtgtgggtgaaccagagggccctcttccacaagagggcttctcttcccgtgaaaagcaatttcccgccccgagagggccgccccaaaacacttggcaacccccacaaggttctaatatattcggcatacccccctttggttccggatacacgtgccgattaaggcctcttttccctggccctggaggagaagggaaatttttcgtaccggatggcttccaaggaaattggagggaccctgggggaaaggcaaggcggccccgatccagggatccccaaaaaggggcaaagaagcccggcttcccacaccggcgaggaatgagtgccagacaagccaggtccaagggcctcaaaggtggataggagggcaagcagcagcagcccgcagggggaccttctccatgcaagctaatattttttgctactgacgctgagggtcccggcagacgaaatccaggatttcctgcacaggggacggacacgggagctccaaactcagagctgagcatgagccctaggcagcgggccagtcccgaaaacctgtgccgaagctggagaaggacatgggcatcaccattttctgaggacagcagcatctccaccccagggccttcattctgcacaggagcagtctctgctccctcgtacagggcccccagcagggtgtgcagtgaggccagcagactgtgtagctcctgctcccagctctcggtgtgcttcaggccttgggaaaagccagcccctaaagagggcagccgggaataacactcacaggccaactgttggagctgagggctcaaggcatccaccctagacagaaaaaatgaggccagcttgcctttgagagaaccacaagcccgagggaaataggtcatacaagccttcattccttccaatgctgactgctcacactctggcctgaggcccagcagggaggtgagaaggccagggaggtggttcatggagatgtcccggaacagtgcaggcagctgggctgcatatcggaggaggtccctcaggacagccacggccagctccattgtggcaggcgggtcctgggtctgtaacacctgctgaatgccggacgcgtgggtcgacgatatcccgggaattccggaccggtaccagc

SEQ ID NO: 161797 - DNA, 870 bp, Homo Sapiens
  misc_feature (14)..(14): n is a, c, g, or t
  misc_feature (68)..(69): n is a, c, g, or t
  misc_feature (104)..(104): n is a, c, g, or t
gctggggaaggggnctgaggaaaagggggatgtcaacccaaaggagtattttgcactttccccagagnntgagagggagcaaaagtggctggggcgtggccctnggcggggagctcccctggctgactgggaaagacagcttgtcctctactttgccctcaacacatctaccagagccccagacactgaaatggggctgggatcgtgaaagaggaacggcagctcttcagccatccaaggagcggctgcccttgttcttccggctgagggggaaggcagacttgctctggggttgcgtcatcttgctggccaagtagacaaagggctccaggagggagcgccggtccgccactgacacctcccacagcttcaccttctctgacttggcccagtgctgagccacatctgggtctacacgccgctgctcctgtaagtcacacttgttgccaaggaccacgatggtgacctccttcttgtccttggatttgtcaatctccttcttgagcagctccacacgctgaaaagactctctgctatctgtgctgctctcgcaccccccggtctgtctcaatggagcccacgtagatgtcctcctgcgtctcgatcatctccgaacccactacatggttcccatacagaagctgctccaggattgaagttttgcccacagacgcctggccacacacgaccaccttgcagctcttccccatgcttagttttcaacctcccggggcccccgcagcaccagccgggccctccgagctcgcggggaccaggggaggggcagcgccgccgcaaaggctccagtcttcctccagagtcgcggacgcgtgggtcgacgatatcccgggaattccggaccggtaccag

SEQ ID NO: 161798 - DNA, 920 bp, Homo Sapiens
  misc_feature (57)..(57): n is a, c, g, or t
  misc_feature (81)..(81): n is a, c, g, or t
  misc_feature (88)..(88): n is a, c, g, or t
caagggttgactatctccgtctagtgcagaggtgtctgaggttatcatgtggtcatngagcagtctgcagtcgttttcctnatcgagnttcctgtgcttgtgtgatctggagagttctttgctacagtgatagggacatgccatagctgagcgctgcatgtctgtactcgaggacacagatgacaggccaaggacttcacgggaacatttggaccaatagaaataaatcccgatccccagcaggatcagaaaaaccaggattcccagaaccaggaagatgatggcgttacgggacatgcctgagtgctcactgggaggtccctctttgacctggacggtcagttctgcctggcgagctcctagggcattggtgacgttgcagattaaagttgtgttgattggtttgtccacaggacggatcaggagctgggcgccctgggccacagcaaagggtggcaggggacccatggtcgtgctccaattatagcctgtgggctctgggttgctgcgagcatcgcaggtcagggtggcctcattctggccaaggtaccagttgttatcatagccagagatggatacctctggggggtagtacacggtgaggttcacagtcagcagctgaggcttctcaaagctctcgtgctccaccttgcaggtcacattcttgccgtccacctggcttgagggcaccaatatccagaggctggtgacagtgactgtgccagacaggaaccctggcacctggctcgtattgggcatcccgcccaggtctgagtgccaggtgatttgggctggcgggcgaccccctgtggagacgcagcgggccatgggcactggctctccagtgagctggaccttctgaacctcagccctcgtgccgaattcggcgcgccgtcgacttcatactctctcccccctaa

SEQ ID NO: 161799 - DNA, 1002 bp, Homo Sapiens
  misc_feature (889)..(923): n is a, c, g, or t
atacgttctgggttaattacaaggtggcccacctctgtggtctcccacgtggtaacaaatgtcctttgtgtgttgtgtgattgcccaagggtagaagagggtataccctggtgaataactgcggaacagtgttccacaaggtgtgccctcaagtttgcttcccgttgaatgagcactatccagggggtgcgcacgagaagcgttcgcaggtttgtttagcgcgctgctgtgacacgatggttcacactcgggtaacacccctttttatggaggttaacgttgtttaagggtgagtgtgtacactcttagagctgtaggtgcctgtcacaaatggttgtccctccattaatttcgaaccttgtgatccagtagagctccgagtgaccctatgacccaactcccccacactgtccaatggtcctgataggtataaagaaggaaaagttgttaatttgttaaccgatcgttagtctttgtcccattctgcttaaaccgttagaccatatatttccaagtttaccgaaccgtttaacctgcttgcccatgtttcttagaccaagtacctgtactttgcaggattattatgcatacatggaaatgacctgtcctatctctgcccaaataagcttggaattgaaatatgaaaaatttccccaaacttggggcagaccaaatttaaaagacaaagctctaagttaaaattggtcatcaggccaaagagcaggcatatcctactaactttcgaccaggaagatttgttcctagctgaaaacattttagcctctctcagatgaagatagttcttttcgttctcctgtctatacagcgggatctactccccggccgtaatggccgaattcccgggcatatgtccggtaccgtcgactgnnnnnnnnnnnnnnnnnnnnnnnnnnnnnnnnnnncgccgcttcctcgctcatctgactcgctgcgctcgtcgttcgattaacgcggagcgccctatatgatctatagatgctt

SEQ ID NO: 161800 - DNA, 833 bp, Homo Sapiens
ggccgttcccgccaccatttgtcataatgtgggccatagcacagcaggatgagcagcgagaagctccatcttgccagcagttcaaaagagtgacagaagcattcatgtacttggaggcgggcttgtagccacggttgaggcgggactgcagctcgtgctccagctcgttgaagtggcggaggtagcagcggccatagagtgaccagcagcgtgctcccagggcccccggctcccgcttcagcacctcagcatagctgaagaaggcatagaggatttgccatatgaggatgagggggcacagcaggaagttagcgatgccaatccacaggatgcggttgctgaggcgctgggccagctctagccgttgccccccacgtttgtactcggccttgaggctccattcattgagaaacagagagccaggtccccagaagaggatcagctcaaagttgtacttgagaccacgggtgaagaagacagcttccccgaggccaggcaggcggaagcgcagaggcaggagggatttgttaaccagtgccaccatgtagttctggaaacggaggatgcggtggtagatgtccagttctgtcagctcacgtttgtggatgcagatctggtgctccttctgcgtctgcacgatccgggcctgcacttcttgccacgtgcaatacggaagggcagacatagggatgcgcagagcgtgcaggtagaaggagtggatctcccagtagcagcaaatgttatagatgaacttgataagccggtggatccagaagacaccagcaatgaccaggcctcgtgccgaattcggcgcgccgtcgacttcatactct

SEQ ID NO: 161801 - DNA, 1180 bp, Homo Sapiens
  misc_feature (645)..(788): n is a, c, g, or t
agctatgttgacatatagaccagtggttaaaaaagcaggctggtacggtcggaatcccgggatatcgtcgaccacgcgtcggcgcggcgtcagcgcggacagctcgcagtccctgagcctctgcaggcagttcttggagccctcgggcttttgcggctctcggggagcggggcagtcaagctggtagtttttccccaacagctcccggcatgggcgctccaggagcctctgatgaggcggacgtataagtggccactcctctgggaatcccacggcgggggccctcgcgtggacacccgcccctgttagctcagggctccgatgcgatccgttcgaccctgcatggccggatttcaacccgaacgcgtccctccttcaagatcaagaccctgaacgtagttcaacaaagtagttggtgatgattagcgtgcctgactgtgccaggatagcctctttagtaaaacagccacgaactgtcatgaaacagatgctcagttcctttcttcatttcactttaattcggtgatgcctactgtgtctgtctgacgacatctctcctggggtctgtgattctgctgatggtcttcagtgcctactgagaagggttcctggacatcatcaggtatgaaaagctcaaagctctcnnnnnnnnnnnnnnnnnnnnnnnnnnnnnnnnnnnnnnnnnnnnnnnnnnnnnnnnnnnnnnnnnnnnnnnnnnnnnnnnnnnnnnnnnnnnnnnnnnnnnnnnnnnnnnnnnnnnnnnnnnnnnnnnnnnnnnnnnnnnnnnngtgttaaagctcaaatgaaccagcccacgtgatgctgaccaggaagcacaaggctgagagccagtgtccaaggcaacggtgcccatggggccagaggcagctcctgcctgtgcagctgtatttagggctgcgttcccctccctgtcctgccagttgacgtcagtgtggggttactcagctaaggccaccacggtatatccacaaagccgtggtagcaggcgacattaaggctggtccagccattgtggtcagtctcctgcgccttctcaacgctcacccctcgccgcaccagcgtccgcagcagccccatgcctcctggacgccctcctccgggacgctctccaagccctcgacgccgtgctcctcctcgtcctggaaagggtacagagtcg

SEQ ID NO: 161802 - DNA, 1465 bp, Homo Sapiens
caggtggaggccttggtgttgaatcggcacgaggggctgaggacgccgttaccctcggaaggcagccctgcggtccctttgccgcccgttccctcccggacatggaggacgtggaggcgcgcttcgcccacctcttgcagcccatccgcgacctcaccaagaactgggaggtggacgtggcggcccagctgggcgagtatctggaggagctggatcagatctgcatttcttttgacgaaggcaagaccacaatgaacttcattgaggcagcgttgttgatccaggctctgcctgcgtctacagtaagaaggtggaatacctctactcactcgtctaccaggcccttgatttcatctctggaaagaggcgggccaagcagctctcttcggtgcaggaggacagggccaatggggttgccagctccggggtcccccaggaggcagagaatgagttcctgtcgctggatgacttccctgactcccggactaacgtggatctcaagaatgatcagacgcccagtgaggtcctcatcatccccctcctgcccatggccctggtggcccctgatgaaatggagaagaacaacaatcccctgtacagccgtcagggtgaggtcctggccagccggaaggatttcaggatgaacacgtgcgttccccaccccagaggggccttcatgttggagccagagggcatgtcccccatggaaccagcgggcgtttcccccatgccagggacccagaaggacaccgggaggactgaggagcagccaatggaagtttccgtgtgccggagccctgtcccagcactcggcttctcccaggagccagaggccctctccagaaggcccgatgcccctgggtgggggcgaggacgaggatgcagaggaggcagtagagcttcctgaggcctcggcccccaaggccgctctggagcccaaggagtccaggagcccgcagcagagtgctgccctgcccaggaggtacatgctgcgggagcgggagggggccccagagcctgcatcctgcgtgaaggagactccagacccctggcagagcctggacccctttgactccttggagtctaagcccttcaagaaaggtaggccttactctgtgcccccctgtgtggaggaggctctgggacagaagcgcaagaggaagggcgctgccaagctgcaggacttccaccagtggtacctggctgcctatgcagaccatgccgacagcaggcggcttcggcgaaagggtccgtcctttgcagacatggaggtcctgtactggacacacgtgaaggagcagttggaaactctccggaagctgcagaggagggaggtggctgagcagtggctgcggcctgcagaggaggaccacctggaggattccctgggaagacctgggggcagcagatgactttctagagcctgaggagtacatgggagcccgaggggagcagaccccaggaa

SEQ ID NO: 161803 - DNA, 587 bp, Homo Sapiens
  misc_feature (433)..(526): n is a, c, g, or t
cactacccaaagcagtgcttcactacagtggcagacagacctgaaaattttcatctgaagcagcagagtgaactgcagaggcaggtcaccaaccagtgtggaggctaaaagcgggcctctttggggattccaggtggaagtgttggacatctgtagtattcctggtctcgaatcatcctgatattcttcattttgttattcacattggactaggcaggaacaaagatcaccacaactggctcgccttcaactatgttagatggcaacttgccttcagtatggtgaaacacatcagttaagaccggggttgtgcatggcaggactttctacaaggacacccagtctccttaataaacatgagatgctctctttccagaatttctcttgcctgacacagcataggaagatgctgaacggccacacagtgatccannnnnnnnnnnnnnnnnnnnnnnnnnnnnnnnnnnnnnnnnnnnnnnnnnnnnnnnnnnnnnnnnnnnnnnnnnnnnnnnnnnnnnnnnnnnnntgaagaatatttcattgtaattactttttatactttataggtcaagagctctgatttaaat

SEQ ID NO: 161804 - DNA, 932 bp, Homo Sapiens
  misc_feature (230)..(265): n is a, c, g, or t
  misc_feature (577)..(609): n is a, c, g, or t
ttgggtggcattccgtgaagaggaaggtggtaagtaaggtttcccttctactgccttcttaagttgcaggagggagcttttctcctcccctctggttgggagcactgaggacagtgaggagggcttttaccttgttaatcctttccttatttagctagctttcctttttgtctagggcttcctcttgagaccctcttccatccattgggcctttgaaaggactaatcagnnnnnnnnnnnnnnnnnnnnnnnnnnnnnnnnnnnntcgcatactcatgcacattttccttcatttccagatcctttatttcagagcagcccattttcctctggattcattgatgaatacaagtacccacacctttggccagtaatgtcagttacctgctgcaggttctgtgtatgaggccttcatgaacggttaccttctccatacactggggaagcatttgtcagactctgcagactgggttctagagaggcagagtctttaagagtattcatttcttctggaaggtggagctttacccaaagtggaagttagccttgctcaaagatgtgttttgtggtaggtggnnnnnnnnnnnnnnnnnnnnnnnnnnnnnnnnngaaacatgtattggaggtaatttgacactgctgctggcagtagttctctattcaccattttaaagcccattcaggttctctcttcctgaaaagaactgattgctgtgttacatgaaatgacattggagtcagatggtctgttttaaagatttccatgacagcctcttttcctgagttggagagattggaggtggtctatccgtacgatgtggatcaaacggtgggtttcttattaactaagaaaccatgtacttctagtgggtttctcagaatataactccaggttcttcgaatgcttttcttttttaatggtgagggaaagg

SEQ ID NO: 161805 - DNA, 568 bp, Homo Sapiens
ggttgtggctgagaatgctggagatgctcagttctctccctcacaaggtaggccacaaattcttggtggtgccctcacatctggggtcttcaggcaccagccatgcctgccgaggagtgctgtcaggacagaccatgtccgtgctaggcccaggcacagcccaaccactcctcgtccaagtctctcccaggtttctggtcccgatgggcaaggatgacccctccagtggctggtaccccaccatcccactacccctcacatgctctcactctccatcaggtccccaatcctgtcttccctcttcacgaactctcaaagaaaaggaaggataaaacctaaataaaccagacagaagcagctctggaacaaaaagtacaaaaagacagccagaggtgtgcggagagggtgaggtggccgcgtggacgtgggtagataatcgcatgcagcactggaactcctgatgaggggtggggtccccacttctcctcaaggtttgagggattggggggagggggtcagctgactcagagaagtaggatctctgcactggaacttgaggcttccccaa

SEQ ID NO: 161806 - DNA, 831 bp, Homo Sapiens
ggtttaaaatctgtaaaattagaggattgcactagagaaacttgaatgctccattcaggcctatcattctcgtagagtgtgttctggcccatgggctgtgtcaatcatacttaataaaatgataggcctgaatgtagcattcacgtttctctagtgcaatcctctaattttacagattttaaaaaaccaaggcccagagaaggtaacacctatttcaagaacacgcagccagcctgtgcaaaggctcatatccttactgacattaaaaaggaggcaaaagagtaattcgattcagatttgggagaacaaaggattgtgtttatacagatggctgggagttgaggaggaaggtagacactggagaagaaggaaaagctgtccagtgcccagttgtgcagatgttttcactcagccccagctgcctgctggattccaagcaagctgaccagggcctccaggagcctactgggtttccgcagcacaaggccttatgctggtgacagagatgctctgccctctgcatctcagagcgcccgcctcacactcagacatcgtctgctccttgccgttcacttccacacaaatgctaaacccttcttcctcgcactccgatgcttctcggcagacacatttgctgctctcagcatcacattttccccacagtgggcaggcaccacaagctttctcagctgaggcaggcagagtacagctgtccctaccagtaagggtgtaatttctaccctgacagtggagaacatgcatcttgcaaactgtcagaggcagtatccttttgcttctctcatcttgagcacatacatccaaggaagccaa

SEQ ID NO: 161807 - DNA, 1219 bp, Homo Sapiens
  misc_feature (47)..(72): n is a, c, g, or t
ctattgggtatttgttttgtttcttgtactttttctctctctccttnnnnnnnnnnnnnnnnnnnnnnnnnntaccttttcttcccctggattttcaccctttgggctgccttgctcatctttatgccccagcactaggtacggggcccaacacgtggtaggcactccatcagtgtttgctgaattgaaaacattgttgactgtggcttctatcagagtgtctaccttttgcagctcttcccctccctcatttaatttgctgcttttaatctacgtggtctgagaatttgtgaaaccagtgttgttagaagtgtatataatctgaatcaataagctctgaatggtggccaagggcctctcttatggcacaaagatgcatggacttcatgacagctcttttggtggctcagaagccattttttatagaatcatggaatctagaatattcctgctggaaagaacctgagagttggtttggaccaattccctggttttccagcagatgaaacaggcccaaagaggttaaatgactgggtgaaaatcacatagctgtctggtgccagagccagcctatagtagagtcccctgaccccaagcccggtgctcattccactacctctcacacttcacaacaatttcctcaacacttgagggcccagaaagtctgatctctccagaatgatcagcccagaggaatgctgagaaatcacctggaggagggagcagaaagagaaggtttttaaggaggggcttctgaatacttgggagatacggaacggaccaaggaccacactccagggtgcattcgttgctccctggagcaccacttctggattacagtgtgccaggtcctttggaggccctaccccttccccattcattgccaccagtgagaaatgggggtgcccctgtgtaaagaaacctaccaaaggtttacatttgcaccttagcctcaatagctacgaaccctagagaagcagctagctgggagctcatgtgcaactcctgatctcaagagaaagatggattttaacccaaaattatgagtgagctgttaactctaaaatgtacttgggagataggccagcgagaggtcatgggccaataagtgttatccagtaaaaagacagtacactgcttttcttttaatgtttgctttcctttgcaatatgtttgctatttcctgtggcctaaaagataattagatgttaaagttttg

SEQ ID NO: 161808 - DNA, 928 bp, Homo Sapiens
  misc_feature (586)..(623): n is a, c, g, or t
ggtcctaggtagcgaggcctgggtggcgaattcggcacgagggtcaagtactcggagaagcaggagcggaatttcgacgatgccaccatgaaggctggccagtgcgtcatcgggctgcagatgggcaccaacaaatgcgccagccagtcgggcatgactgcgtacggcacgaggaggcatctctatgaccccaagaaccatatcctgccccccatggaccactcgaccatcagcctccagatgggcacgaacaagtgcgccagccaggtgggcatgacggctcccgggacccggcggcacatctatgataccaagctgggaaccgacaagtgtgacaactcctccatgtccctgcagatgggctacacgcagggcgccaaccagagcggccaggtcttcggcctgggccggcagatatatgaccccaagtactgcccgcaaggcacagtggccgatggggctccctcgggcaccggcgactgcccggacccgggggaggtccctgaatatcccccttactaccaggaggaggccggctactgaggctcccagcacgctctctccccacatcgtctccccatctggnnnnnnnnnnnnnnnnnnnnnnnnnnnnnnnnnnnnnncttcccccttttgtcagctgagcagtttgtggtttctatgccccgcagtttcaggaaatattcacaaaagaaaaatacattttttcccccaggggggtgggcaaaggacagtggaagagagtggctaggaaaatggaatccccccggggaaagggggaccggggcccgggaatgataaaattatcttccggggctccccaaggtggaattgggattttggccctaaagggaccctttcccgggatccaagcagggaactttttcaggaacacccctccccagaaaccctttggcccccccggggt

SEQ ID NO: 161809 - DNA, 717 bp, Homo Sapiens
ccgtagacctgtccgctctgtttggcgccctgcgtgtagcccatctgctgggacatggaggagttgtcacacttgtcggttcccagcttggtatcatagatgtgccgccgggtcccgggagccgtcatgcccacctggctggcgcacttgattcgtgcccatctggaggctgatggtcgagtggtccatggggggcaggatatggttcttggggtcatagagatgccttctcgtgccgtaggcagtcatgcccgactggctggcgcatttgttggtgcccatcttccccgccagggcgagaagagacacctgcacctgcgtcatgttcccactctccaacaggttcgttggcctccgaacaggtccacagggttcatcgccgtagcatgaccatggccttcgatgaagttggacaggttttctatgctggtgccagttctgcatggagcggttgatcttggggacggagcccggctgtagcttgttcatgagtgtgcataagatagttccatccttcaggcccttctggaagtcggggccgatggagaggccggtgagtccctcgatccaggtgcggagctctgcctccttctgggggtcatatttggacaggagccggttcttgacctcggccgacagcccgtacgaggggcccttgttgaactgcgtggagctcatggctggcgggcgggcggcgggacgggcctgcacaggacg

SEQ ID NO: 161810 - DNA, 836 bp, Homo Sapiens
tttagtgcaaaacaataaatttttatttgttcacagttaaacacaagcaactgccttgacattttagaacattctaagaaggacagcaaactcttttgattccaattcccattcactaagattgtaccattttatcgtgcagttcatatttatggcatctgatgtggattgttgacatgcttttaggattgaggcgggaaagtttagaccttttgacaagagctgactttcttcaatttaactaaaagcagtccgttaaaaaaaatcagtttctttcactgatgggacccctttaaactgcaagtttgccacacatggttcattcatgattgagttataaaactagattatgtcttagcaaaatctgttcctccgtaatatatttgtggtccatagaagtcttctgaaaagtgattactgattcttcctagtgcaaaatgcgtggctgcctctttcataagccaaagtacttgctacacagagcagcaccataccctcctgtccaaacactgtaagaggtggggaaagggagggaagggttggtctgggggttctcagactctcagggtttccactgaaaggtccattccaatggttaaaccagcctacttatctcagaggatggataatgtggcgctgcgaagtggggaggaagctcctctgccatcattaactcgtttcatgaccagaagccatgggcacaggtgctcggctcttccaggcaggcttcccttgtagctacagctactcttccctcaggcgagcagataaggactgcaggacggcatggaagagacaggaacacgctcccctgggcacatcgaagagtcccccaa

SEQ ID NO: 161811 - DNA, 625 bp, Homo Sapiens
  misc_feature (75)..(75): n is a, c, g, or t
  misc_feature (87)..(87): n is a, c, g, or t
  misc_feature (112)..(112): n is a, c, g, or t
  misc_feature (116)..(116): n is a, c, g, or t
  misc_feature (121)..(121): n is a, c, g, or t
  misc_feature (123)..(123): n is a, c, g, or t
  misc_feature (175)..(198): n is a, c, g, or t
gcagtcagacagctcttttattgactttgtctgcttggtgcgggggttgggggggtgtcaaagctctaaaaaccnccatgcccacanaaatagtacacaaaaacaagcacanccanctccnanggcctttaagcttcctgggccatacagcacactcgtgcgtgcgcgcgcgcgnnnnnnnnnnnnnnnnnnnnnnnngtcaccttcctccaccctgggagccagcccccaggaggagtcttttcctctaaccaccctggggtcctctgacatgcctagtcctgttacttgcccagacctgatgccagcaggcttgggcgctgctctcttgctaccttccctggggcaagggaggatgacaaggcctctggggtgatgagagtgcctggcagacagctgtgcccccagcaccggcccaaggccatgctcgcatccaagcagcagccgggctgccataacgccaccttgctccgggacatccggaagagaaaaggatggccaggtagacgggaagacaaccacacctgacaccaagccaacaacgacattgtcgacactgagcgggctcagcctggacacatgcccccgtgctgtaggcagagtcgccaacagacccgtaccacac

SEQ ID NO: 161812 - DNA, 979 bp, Homo Sapiens
ctcgagaggctccacgtgatggggcatgaggatgatgaggctggagagcttgtgggccaggggcatctccacgatttgcagcttttccttctcgtcgtcgtagtagttgtagaggcctgtccggtgcatcatcatgacacccacggtataggaccgagtcaccatgaagccacggttgtccaccatcttgtggtggaatttctcatcccagtgtggcttgaagaacatggcgttgactaacagggcgccgtccgtgccgttccacgtcgttggtgacctcgggcagcttgccgtcggtggtctgcgcggcccactcgttgatggactgcagcgcgctgcgcttgtcgcggaagttgatcttggagtgctcgcagttgtagtgctgcttgctgctgcgcacgaagtcatcagcgaagctcactgagctgggtccgtacagtcggctgcccagcttccaggtcacgttgcgcgccgtggagttgctgagtgagcgcagcagctcgcccaggccggcgtgcacctcctcgtcgcgcagctgctcggcgctcagcactgccttggcctgcgacgccgtggtcgccttgccgcccagcgacacgagccccagcgacgaggccaccaccacgggtgacaccaggatgttctccactgcctggtccttggccatggcctggtacaagctgaaggccaggccggcgctgcgctcggcaagcgtggccgccttggggctcaacttctccgcagtgccaggagctgctgcggctgcaggtttcttcacctcggcggccagggccgcctccaggaggcagaaggcgctgagaagcaggagggagcgcatggccaggaagtggtttgcgtgcaccacggtgggcctgggtcgggctgggctagcgccgggacgtgactctcgctctcgagccgcgacacgattctactcttagcccgctcccctgctcccgggatctatataggcagtccc

SEQ ID NO: 161813 - DNA, 653 bp, Homo Sapiens
  misc_feature (196)..(219): n is a, c, g, or t
  misc_feature (400)..(400): n is a, c, g, or t
gcggccgcggctgtaggctttttttataaggaaatgttggagagttacatcattgctaatgtagaaatgttaagtggaaaaatatacagtttggtaaaataaactagattctacatttatttgtgggtttttttcccctcctttctttccacagcacttttgatatcaagcaagtggcttcctttttgagatattnnnnnnnnnnnnnnnnnnnnnnnngtaaatgaagcccaactacctaaccctttcttatttgtatttgttttagtattgtgaagttgtgttaaatagtactagctagaaatacaaatttctggttatcatttctcttccctgtggcacttgacattttaattgtcttaaagtttttgaagtacatcttctggcccccttgagaacngccagaggcaaaagatgtttgtttcttattcattccacttttgtctcctgggatcccttctgtagcctaaagtatggctgggaaatggacttgagaagattggcttgaattagatcataatcatgtgtgatcccatcatgaattcattggaatttgtgttgcatgtaagcgcaatctttccctgttgtaaatcttccttttttaatgtacatatattttgaaaaatatgaataaacatgaaattttaaaagct

SEQ ID NO: 161814 - DNA, 532 bp, Homo Sapiens
  misc_feature (436)..(436): n is a, c, g, or t
tttaatttttcatagaaacagagtctcactatgttgcccagtcctaataaacactatgtgatgaaaagaaaaaagtaaatcaccctaaagttaagtctttaatgttaagtctttaatgagaaatgcaaataaagcatttctcaatagattatgggaagagaatcaactgaagaataaacatctttagtaaatcttttgctcatgtgcattaaccaatactcttgaaaaccaggattaatttactgtaccttcttaatattcctttgaaattccttatggcgcacaggtagcgtagaaaataactgcttcacgctgactgtggtccctctggggtgggggtggggggttttctgggatgattttcccatcgtgatcaaaaacaccagtctagtcccacccttcgccgatgcgttggaggtagaaaatggtgacatcngctcagtgcacaaagtgagctcagagcttttccacgaaagccaaaaggtttaacccgagttaggtcggctatctcttgaatcttatatgtacgatg

SEQ ID NO: 161815 - DNA, 518 bp, Homo Sapiens
aggatggagcaatcctttatttttacacactttgacaaggaggtttgtcgtaaacaacctttccagtggagaacagagaacaggaaaatcagcctccagacatcagcagctgctctgttcagggccgaggctcccccttgccaatgtggtgaggtggaggggtgtactttccttcctttatcagcttatcccgctgcttcctgatggtacctgcacgtctcatcgttttctgccgaagcaaacactctacgaaatcatcatattctatcttgcactctttctctgcccgagtataaccgattccatgtgcacattctatccattctttttcaaaagcatggcatcgaccagccatcttgtagggctgttcaccactctggattgtcaaccatcgatctatgttaaggccgaaccttttctggatgtccaagaaaggcatggccgatgctcgtgcccttgactcttctctggccgccgcttcagaacgactagctagcgacgcggacgcctgccgtccc

SEQ ID NO: 161816 - DNA, 1171 bp, Homo Sapiens
  misc_feature (690)..(729): n is a, c, g, or t
  misc_feature (731)..(732): n is a, c, g, or t
  misc_feature (734)..(737): n is a, c, g, or t
  misc_feature (745)..(745): n is a, c, g, or t
  misc_feature (1043)..(1043): n is a, c, g, or t
ttggatttgattttagttgtgtgcttttcatttgcagaagttagtaactgcagctcacctactgcaccaaagttctcgattttaggagcccagctttagtcatttgaacatgcttctaaataaaataaaacaaaaccaaaactatacttttgatctataataagagctcaataactttgtcaaggaaagctctaatatatgcagtgatggtttatgaaagggtgtggcaattttaaatttatattgtgtgtgatgttcaaataaagtggtatctacattcatgtgatttatgggtcagcatgaccattaattactgagtagaaattgactaaactttgatttcctttttttaaatcgtgttgcatttgattcctgagcaaattccctcaaagtgaactcttgttcttaaattttgaattttatggtgagattgtaaagatagaggcaattgaaacattgttccttatttatgaactgcttgaagtgaatacttaatttaagtttgcactttaataccaaacttaaaaccaaacactcatttaaaagtaggttaagtgatcatggatcattgttattagctttgtggctttgtgaaattctaaaggaatcaaataattcatcatgatttaaattttctagagattttgatttttttataatgtttctttcctgtagattgtgttcttgttnnnnnnnnnnnnnnnnnnnnnnnnnnnnnnnnnnnnnnnntnncnnnnatttaagncgttcattgtcctctgacctcacccagcaaatttggtgtcgaattcaccttggaatcgcatgaaatcccggggaaaagtgaattcttaaggggggttttcccccagccccacttttccggaaaacggccccccaaacgtatattccagccttccccccaaatagaattggccgttccgccttacttaccgcctaccacaagtaactactttaactggcacaaatgttgtccctcggccccttttacaatgcgccatcctagtgcggggcctgctgcgctcataatcctcttgtcgcanacgcccttctgccacaatctatacgtactgcgtgggacgctcatcggtcacgtgcccccctcacggacactggtgcaacgttctatcagagggaataagcgtcaacactcctccacatgaaccagata

SEQ ID NO: 161817 - DNA, 1331 bp, Homo Sapiens
aaatgaattccttgttgtttaatataggccaacccatattcatcatactcataggctttctcttcatgatggaccctctgatgttcaagtaggtatgaagtatggcagaagtcactgccacatacagtacacttacagggcatctctttgtgaattttctgatgttgagtaaggtggacactacgactgaagactctttcacaactgctacatttgtaagatttggctctggtgtgaattttcttatgctgaattatgcctgagcttggactacaggatttatcagacgcttcacaggatttatcagatgcttcacatttgtaaggtttttctctagtgtgtattcttttatgtcgactaagacttgagctctgactgaaagacttttcaacatttctttacatttgtagggccttctctctagtatggattctttgatgtctagtaagggctgagctctgatggaaatttttccccacatacatcacatttataggttttctcagtgttagggatgctctcccatttattaaggtggggagagatccattaagctttccttacattcactactctgaaaatcctctgttagatttaagtgttcatgtttaccagaggctgaattctggttgaagctcatgtcatacttatcattgtcatcggtattctgtattctaagaactctctgatctgcatcaatagtagagtccagactgaagcttttttcgggttcatgacattcattgttcttctcactggtgaaggtttccttgctgattgttatttgcctaaactctctctccaggtacagaaatttccttagaatttcctgaagtctttctaatctgtcctcagacttatacacttctctagtctcaggaacttgggtaatatcgtgtttgagtcttcctactctcactttgtatgaatgcacttcttccgaaattttctgcttaggaatcaacagcttgttatcttctctggtctctccatccccagtgagtccctgttccatgtcggtgtcctgcacaaactgaggctctggggacagacactcagactgggtctccaaagactgaaactggacccttggtgaccctgctgcttcctgggctggtatttcctccatcactgctctggaggacaatgaccatcacagctcgcaccagggcacggtcgccggctcctgacggcggggccctcggtccgcgaggtgaatgaaccagggctgaagagaaacaggccctcctcgcacccgggcctccgcgcactctcggggaagcgaactaccgtcggccgcggccggacgccgatcccgggaattccggacc

SEQ ID NO: 161818 - DNA, 966 bp, Homo Sapiens
  misc_feature (368)..(380): n is a, c, g, or t
ggttgtttgtttttaagaatgtttattccgccgcatttccaatatttctcccttggatgggctctattaggcaccccaagggcgaccctagtttaaaataggtcctaccccccagggaccccgtgtgaatttcggacatcgagtgagtgggcctagttcaagtctgcccccagtcagcctggccccagggcctctagaaggagggcacccacctcccctgtgcaaatgctgcagttcttagtcagtttcacttttttgttgtgagccagcctgagctcccttctgttttggagccagaggcagggcaaccagacaccttggaaggttcccctgaaccctgggcccaggcctcggaggtgattcaccgnnnnnnnnnnnnnttgtggttggaggagcttggctcccgccgcgtctgggaggcagagactggctctagaatggatgaatgaatgatgagtgggcgagccccggctggcagggggcacattgtcactggatcagcgccacagctgggcagccctctccgccggtctcctctatgggggtggtgaacttctctctcctgcggcatcgtctccagaccaaaaagccagaaagcagccccagcacgaaggtcaggctcagagcgcccccaaggatgggccaaagcagccggaagggggcaggaggtgctgcagcgcagcccaggcagaagtcgctgtgcggtcgcgccctgcaagacgcgcagtccatgcacttgtccaggtccgcgctccaggagctgccgcgggagcagggggcggtgcctggcgcttgctccccggccacggagcgcagcaacgccagccagagccccagcacgaggagccgcagcaaccggcgcagcgagccccgagccatagtgcacgtcctgcgcccgccgctgtctgcgcccgccgccgccggccgacgcgtggtcgacgatatcccggaatccggagcgtacca

SEQ ID NO: 161819 - DNA, 1023 bp, Homo Sapiens
  misc_feature (614)..(614): n is a, c, g, or t
  misc_feature (629)..(629): n is a, c, g, or t
  misc_feature (670)..(670): n is a, c, g, or t
ggggacacttgaaactacaggagaaagaaggatctagcgaaatatggctacagagagccctgctacgcgtcgggtccaggttactgaagctaaaggagatgtttaactccaagtttggatctattcccaagttttatgttcgagcaccaggaagagtcaacataataggagagcatatagattattgtggatattctgttcttcctatggctgtagaacaagatgtgctaatagctgtagaacctgtgaaaacgtactctctccaactggccaatacaaatcccttgtatccggacttcagtactagtgctaataacatccagattgataaaaccaagcctttgtggcacaactatttcttatgtggacttaaaggaattcaggaacactttggtcttagtaacctgactggaatgaactgcctggtagatggaaatatcccaccaagttctggcctctccagctccagtgctttggtctgttgtgctggcttggtgacgctcacagtgctgggaaggaatctatccaggggccaagttgatagaatttagtcctctgagggcaaccgatgtaaaactccccagtggagcagtggtttgtgattggccacagtntgtgtggagatgaantaaggcagcaacttccccattttcatatccagggtgatggnagtgtccggctggctgcagaagctcctggctaaataacaaaagcttgcaatggggacaaagtactgaggctggaggaggtgcaggctaaactagggattagtctagaagaaatgctgttggtcacagaagatgcccttcatcctgaaccctataaccctgaggagatctgctatgtctgggaattagcctggaggaactccgaacccaaatcctgagtccaaacactcaagatgtgctcatcttcaaactctatcagcgggcaaagcatgtgtacagcgaaggctgccacgagtgctccagtttaagaagatatgtgaagaacacctgaaaacatggtccagctgctgggaga

SEQ ID NO: 161820 - DNA, 1300 bp, Homo Sapiens
cccaggctgagcttgaggctgggctgacggcttctctcttctgaagggtcctgaggatgcatcccatcacacagaactgagcgagtggacgtaggggcaccagcaggcggagcagctcgcaggccaggctgagaacaagcatctgcgcattcccaggtgcaggaagtcggcgctgcaggatgggggcggagcactgtgggcagacgggaaggatggtgggacggtcacagagtccgaattgagaaattcgccgaagagatcaggattggagcagggctgggagttgttgccagcggcagggggccctcctcttggggtgctctgcacgctcaggggaggggccgggcttgccaggagcagcgggtcctcgctgagcagatcctccgggggcccctgggaggcggcctcagggggcccaaggaggcagctgagcaggtcggtgttgctggagggggccttgcaggcctgcgggggtacagctggtccctgcgcccacctcgggagtgcaggcccaggaggtcgaccccgtcttcctgtggcacaaggctctggcagcacagccggtgtctccacctcagataccaagtcctgctgcaccagccctgctgccaggccgggggggctctggttcggccctgggttcctggccctcgctggagatcggggatcccccttcatctgacacctcactctcgtctctgtcctccatcagggcagactcgctctccttggaagaggcattttctgcaccagtctctgcctccttctcttcctgccagtccagcgtgtgcaggaagcgactggcgtccgcgctgctgcttggcggtgagtcagagtctgtgggttcggcttccggggaccctgccccagcatcatactgagccgtggagccaggctgccggggaagctccggcttcccaaacttagacagaatgtcttgctgctcctcccggctggaaaacaggattttggggttcagccccctcatgctcgagttctcccatggtggggcttcccggctcggcctgtccctgggctccacctccacttccaggttcacttgaaataaatccgggtatttttcttgaatgtcacacgcgtccaggtcatacttggcaaatttcacagtggtggcgttccgaggcacaaccccgtgtggaactgaatctggaacatcttcatggatgccatcttggcctgcagccgccgccccgagtggaccgggcgtgatagatgacgatgagcacgtctccttgcaccgtgccgtctagagcgtaatcggtaccagctcgatcgtata

SEQ ID NO: 161821 - DNA, 1330 bp, Homo Sapiens
  misc_feature (41)..(53): n is a, c, g, or t
aattttgtcagaaaaataccaaacacagtgatttaaatttnnnnnnnnnnnnngtcacaaaaacctgtttttagcagaagtgaatgaccaatgggccagctccttggctcagacgtgattactattggttttcctaattaatccacaaatccacagggaagtgtaagtcaacttcaggggggagtggtggtataaaattaaaaaatagaaaccaaataccccacctggtatgcccccttttccctaagcccctttaccctccctcacatgttcccacccccactccacaccccctcatgaccccaacactcaaatctccatcagatctaggtcagcttcttcaaagccatagaaagactcggtatcactttcaccctcaaagagctggtgaagactttcaggctcaattgtctcttcaggagatgatctgggtcgtggagtggaagactcagaatgttccccactcagcttcagttgctcctctagggaggcaattagctcctcctgcatgtcagcatttcttgtaggtgagttaatgttgccatcggggccaggcagaacactagccaccaggaaggagcgctgaactagctctggacagtccccaatgacacctagcacttcacccagccagacaagcaccagctgaagcaggacatcagaatcacatgcagtatctgccatttcccgagcctgttccttccattttttatgcaggaagttcttgacagttcttttgatgcatacatctaatggctgaattttggagctacagcctgctgggaccactgcaggcaaagtgctagaggcactaagcatagccagtacctcttctgacaagtgagtgcgatgacagtccatcacaagcatgcctttgctgcgctggcaagctgtgtgcttctgccacactcgagttgaccacagctccatgatctcgtcatcactgtagccactctcctttgcctctagcaatatggagtctggcatgttagcaggctgatccatctgccctctgtagaaaaccagggtgggaaggacagtgccatctgccagaatggctaggactacatcacaccaaggttcccctgtgcccactgtctgcagggcattctcctttcgatcatcactgctcagcacctctgtatccaggaacaaagagatctcatcaatagccacaatcatagacaagggtaagtcctggttgtgaatctgccgttgtacaaaatcaatgaagagtcctgcattctctgctacatccttaggtagggtgtgggccacagctcgccgggcatggggagtcaggtggtgccgcagcatgaaacgcacccaa

SEQ ID NO: 161822 - DNA, 551 bp, Homo Sapiens
  misc_feature (198)..(214): n is a, c, g, or t
aagtactatggtttttagataatcgagaaaaacacagttgtaccttaacatctgttgagaaaatacaaataaatatgatgctaataaatggccactgataactcagtagccatctgaatagtcatgcggtttaagaatacatccttgtataatttgacatacaaatttgtcatttcttgcacatgcacaccattgttnnnnnnnnnnnnnnnnngccagtaatagtgtctggatcggtcaggagcacggcctctgagtcccctgtaatttagttaagctaaattaatacctcataccaaatggctccaggaaaactgtctcgcaggtctgaagggagcccaagaagaaaagcacttggccaacatcgaagcaactctgaccacagcaggagagaacttgaaccaatgctacccctgcatctgaaacacaaggataggtactaggcagaagccctctttcccagcggagggagtgtgagctgctctgccactagagaggctctggaggcgtacttagtccaacttttttgtacaaagttggctttttaaagg

SEQ ID NO: 161823 - DNA, 1628 bp, Homo Sapiens
  misc_feature (1299)..(1361): n is a, c, g, or t
ggaccggtccggaattcccgggatgggaaatccaggaaggacagcacgacctgcttcagggccaccagaatggcagtggcagccaggccccttccggggggcacctctatggctttggggccaagagcaatggaggtggcgcgagccccttccactgcgggggcactgggagtggcagcgtcgccgctgcaggggaagttagcaaaagtgccccggattcagggctcatgggaaactctatgttggtaaagaaggaagaggaggaggaggagagccacaggcgaatcaagaaactgaaaactgagaaggttgaccccctgtttacagtgccagcgccaccaccgccgatttccagcagtctcacgcctcagattctaccctcctacttttccccatcttcatccaatattgcagcaccggttgaacagcttttggttcggactcgttctgtgggtgtcaatacatgtgaagttggagtagtgacagagccagagtgtcttgggccctgtgaacctgggaccagtgtgaatttggaagggatcgtgtggcatgaaacagaagaaggtgtcctagtggtcaatgtcacgtggaggaacaaaacgtacgtgggaaccctactggactgcaccaagcacgactgggcccctcccaggggcatatctctctccaggatttcattatcctgtttatgggaagatgtcagggagagaagagacagagaaagtcaataccagccctagcgtcaacacgaaaacaaccactgaatctaaagcactgggatttgctccagcagcatgctaacccaataccgcagcaagtctcctgctcctgtggaaaagggtaccagctgagcgggaaacgggagggcagaaaagggaaagggatcgccactcccccttcggccagcggcacctgcacacgcaccaccacacccacgttggcatgggttacccgctaatcccgggtcaatatgacccttttcaaggcttgacctctgctgcccttgttgcctctcagcaggtggctgcccaggcatctgcatctggaatgtttcctggacaaagaagataaagtcgcaaatggagacatttattttcataatgctaaagagaataacaagattggacatgtacattgtcatgtgactggatcacatggggaagcgctttatacagacatcagttccatggtgttaatttgaaatgccttaatggcaggcaaaaaccagtcatttcatttttgtaaattacagattttatcacagagtaacaaatgtcgctgtaattaaacttctgtttnnnnnnnnnnnnnnnnnnnnnnnnnnnnnnnnnnnnnnnnnnnnnnnnnnnnnnnnnnnnnnntctttactttttgtatcagtaaccaggctcgcacacacagggtctgctgccacgtcgcaaaccactcagtaaaggaaattaaaaatgtatttgtcatgttaaaaagtgttagccacaaaaggctacttactttcttttccttttcctttaaaattgtaaataaataatgttatgtatcagtgtgcctgaaccttgcatatccttcacatatttcccataagcccctcagaaaggctaactgtgatgatgacactttgggtacaattt

SEQ ID NO: 161824 - DNA, 1557 bp, Homo Sapiens
  misc_feature (1435)..(1460): n is a, c, g, or t
  misc_feature (1536)..(1536): n is a, c, g, or t
ttcaattctttgggaggtggcggggcagggacgggagaaaagatgaggcagaggtgaaagcacatgaacacaacaggggggactggctaaccttggcacaaaagcagcacagcaggcccggggaaagggtgggggcaggaagcagccggcctccctctgaccctccctgtcgcctggcagggcccagacatccaaatggtcacttcccaacctcttcagaggtcaggaagcggggaggggcaggggagagcggtcatcaccacagagaccttcgggggagggagggcagagcattatgacagaggctgaaatgcaagtctggtggccaacagaacgtagcttcccaacttctcccttcgctggtctctagggtctcacagccacttgccctagttctccttctctggccctggaaccaggaggaccttgcccacattcttcttctcctgcatctgtttcatggcatcagccaccttctcgaagggccagactgagtcaatgtggggcttgatgtggccctggttgtacagagccaggaggcgggccaccacaccactgaccagctccacctcaccatccaggtagcccaggtggaagccacacacagcccggttggcctgcagcagctgcagagctgtcacgctgaactgattccaccatgtccgggccagggccatcaggttccgtttggggcccgtcagcaggttggccattccataggtgacgactttgcccatgggtttcaggaggttgtagcccttggcagtatctgacccacccagagggtccatgacaatgtccactcctttaggggaaatcttcttgatctcatccacgtagtcagtcgtgtgatagtcgatgggatgtgtgaccccattctccttcagtgcctcgtgcttgctggccgaggccgttccgaacactgtcacattctccactgtacggcacagctgcacggcagccatacccacaccccctgcagccatgtgtaccaagacgctgtggccaggctgtaggttgccgaagtcaaagaggaccatgtaggctgtaatgtaattgacgagcaaggcagcagcttcctcaaaggtcatggcctcaggaatcaggaaggtctggaccgagggcacagtcacctcttcctgccacatccctgaccggttcaacaccatcacccggtctcctgccttgcggtcgctgactccctcgcccactgcgatcacaacacccgcgccctccatgcccggagtgacaggcagaggcgggagacggtcgtacagcccctgcctagccatgaggtctgcgaagttgagcccgcaggcccgcagacgcagcgtcagctggccgggcccaggggccgggggcgctgccggccggctctgcagcttcaccttgtcgtagcctccaaagccggtgagcactaggcagcgcagcagtnnnnnnnnnnnnnnnnnnnnnnnnnncccttcggaggccgcgggatgctgggggtcgctcgctgcctcggttttcggaggcggcgaagaggcgtcttccccnggtcgctgcctcggctacctc

SEQ ID NO: 161825 - DNA, 785 bp, Homo Sapiens
tttctgattacacacatatatttaacagtacagttttacacagaatgctaagagcacttttcttcatattttacggaagggcttgaaacatacagactattcgtaatcatacaatagcacatccaaatctaactcctaaatagatgatgcattataatttgtttagaatttaaaggcttaatggcaataatcaggggaggaagaagagtatgtttattttacataactgacggaaaaataaattcaacaaatagtaaatagaatttaatatggtctcatgcgccctgaaggaggtggtgcccgatttggaggggtaattgctatgtccaagtaatctcctatctggaacttctgcgactgcagggtcatggaatcatcagtcccctttctgccagacatggtgctgccaatctccttaactcgatagccaggtcttttaacatctgtaaaaacgattgcaaaattgaagtgagtgcccttctttctagcttctgggtagacttcttttactaagcttgtcagttctttcaaagttgcatccatccaagtgtagatctgcaactcgctggacggtacatttccccgggagaactcgtccattcggtggtggcggccgttattggtggtgaagacccgtagcaacagtgggcatgtcttctcgcggtcgatcggtttctctggctccttcttaatttcctcctgggtaacgcgcgactccaccgccatcttcctcctacggcctgcgagacgctcgccctgacctccgaccccggcagcgagcccaa

SEQ ID NO: 161826 - DNA, 730 bp, Homo Sapiens
  misc_feature (525)..(584): n is a, c, g, or t
  misc_feature (595)..(611): n is a, c, g, or t
ggcacgaggtggattgagaatgggggctgtctagatcaggataatgttgaatttgaccctcacttgaggcttttgtacagaggatgagaagacggtaaattcaagggttaatcagaaattaacaccaacatgacttggtgatgagtgagatgtgaaacgtgagaaaaacatcaatgatgaaatcaagcttctgacttgcaacagtgagtataccaagagctacaggcttggaagatgaataaagttgggagcattctgttttttcatgagtgcccatgggacagacagggagaaatggacagttgaaagtacaagtctagacaggcacagtggctcatgtctgtaaccctagcactttgggaggctgagataggagaattactagggttcaggagtttgagacgaacctgggtgacatagtgagagctcatctctacaaaaaataaaattagctcggcatggtgctgcaagattatagtccctgttagtcgagaggctgaggtgggagaactgcttgagcccacnnnnnnnnnnnnnnnnnnnnnnnnnnnnnnnnnnnnnnnnnnnnnnnnnnnnnnnnnnnnaccctgtttcnnnnnnnnnnnnnnnnntgcaagtctggagaaatatagctgggagtcagtaatgccagttttagctgagggagttaagatcatttaatcagtgttaaggaagaaactcaatagtagtgaccaccaatacttaccaa

SEQ ID NO: 161827 - DNA, 1088 bp, Homo Sapiens
tttattagatgctctagaattcttgactattagtatttaaagaagcctaagtataaaagtcaactcataaattacttcgacatacagcttctgaattgcaatctcaaaagacagaaataaccgagagttggctataaaaattataaatggaactaaaaatttaaacaataaaatgatcaaagaatggtttgatctacaattctaaacaacctgatcaaagtacaaaggataagcaaagtaatgtttttttgaagttcaaagttgaaaagtagaaagtcggaacacaagagatattagaaatctaacccttgactaggaaagtttactttatctattaaacacacttaagaacacccattcttatttctacagaaacccaaacctttcgggtgaccgtgatcttgttcgtctttttttgcgatcaccagatgaagaagatctagaacgacttctctttctgttcctctcaggagaagatgatgaacttgaataagatctttttcgtggggaagaagagcccctgtgggacctggagctggatcttcattgattgagaaacaaatcaaacatttcattaaaagaagaaataaggaagattatttagttatcagatagctccaaaaataaacaggatttataacaactatgaaaattttataaggaagaatacttactgcttattcaacagaagacttctggatcaaccatgaaaacattctacttaaacattttaattttgtctctttaaaattctatcatgtgtaattaaaaccctgcttactatatcaaaatagaatttaaactttttttaaggcttttcaaagtatacacaaatattatagtattataaaatcagcagataactgcattaacaggactttacgtttaggaactacatccttccatttgaggattaaaatatgtatcttatataccacttcctgaggaaaataaacataattccatgtggaattattcaactcattaaactgttatggaaaaaccaggtatatggcacagcaacaaaagactagtaactgtacttaactgctaaatattcaagaagaaataaaaactaactttaccaa

SEQ ID NO: 161828 - DNA, 1193 bp, Homo Sapiens
  misc_feature (199)..(243): n is a, c, g, or t
agtaccgcgcccgatcggcatactgctcccgctcataccgggccatgtcgtacagagaattccgcgcggctgctgaagcttgggacaactcactctcatgcccgtaaccgtagccctctccaacagtggggactggggctgtagcgcgacgcagggggctccgatcccgcccgtaatatgaagtggaagctgcagtaannnnnnnnnnnnnnnnnnnnnnnnnnnnnnnnnnnnnnnnnnnnnctgaggtcggcaacaggtgtctatcgtagggatcgagagaggtggaggtgaggtgactggccatggctgtattctggacttgtggcagctgggacagggtctgctctgcgtaattatacacggaggcagctgcagctgccactgcctcataggaccgggcagcacggcagcgcttgtagtaggcatcgagcgctccgtacgcgttgttgtaatacattgattccccgtagctcatggtgtaaggtgttcgcactgctccgtattgttcattatattgctcggtcaagtctgccacgcggcctgtacgatctattgggcactctttggaccagtgcccttctttcccgcaccgatagcagccgctctggtctcccatcccgggggcagtcctaagccggcttgtggacaactgcacgtgcattcttttgccttgaaactctgtgttgtcaaggcccctgatggcctccactgcatcctctgcccgctccatgtgtacgaaggcataatctttcacgatgtcacattcgatgaccggaccatactcctcaaacttggctcgaagctccttattggtgcaggtgggactgatgttgcccacatgcaactttgttgaggttttgctcttattcttgctggcttccacgttgatgttcaccccatgaagcttgtaatggtgcaggttgcgtatggcatcctcagctgccgtcttgtcttctatgtgcacaaagccgtaattcttaatgatgtcacattccagcaccttcccatactgctcgaagagtgagcgaatctcctgctctgtagcctcccggggcaggtttccgatgaacagcttcaccatcctgacaagagcctccgggtggcggcagcgacggcggctcccacgtcagagagaaccttacaaaatggcgacggccgctcgagcctggacgcgacccaacttttttgta

SEQ ID NO: 161829 - DNA, 1376 bp, Homo Sapiens
aggaaagacattttgcttttttattttctgtaaaactctgtaaataaaatacaaaaccaagggatgtggctgggcagcggcagggtggccaagccccagacactgatttgtggcaagggatgtgctgagccgaggctgggaggcacttgactgcaggcactgactctccaaccccaggggcaacagaagaatatattagattttcattgctaggaatctgtgggggaggggtatctggagccagcccttaccctccctgccagtgcctggtgagccctgaaagtggggggaaaggggcaccaggaacccatgggtgaatagtttagaatgctgtgctggccatgctgccaggcccaaagatgcggggcagcttccctcacagcttctgtgtcagtttggcagaggtacaccaggggctcaatgccctcgggagccttgatgcagcctagggccaggcagccagccactcgagtctgcacgtcctcatcctccagctggtccaggaagcacaggagggccctctcccggaaggtagggcccagtgacaggctccggagctgggtgctgacagcagccatgaccttgttgttgcccatggacgagcagggagttgagggcccgcagcccgtcccttcgcagacgccccctcgggcgccaatctcagggctttcagcacaacagcctgatcatccgagttcagattccgcaccagtagcacctcctcagcggtctcagtcacgtaggcctccatggtggggctgtccaaggtttccacaaaactccagaactggaagactgtgagctgctctccaggccctggctggggccttctgggcagcttctgccccagggcatcctccaggaacttcacacacacagcctcagccaagcctggctggcgcagggagaggcgggcaccatactggttgcagaaggtgagaagcacccgctccaccgggcagaggaagcagctgagtctctctgtgcactggtcccagaaggtcaggaagccaggccgagaggccgagaactgcaccacttcctgggcagagctggccgggatctcccaccgcctgctgaactcgcatactgcctccagtactcgggcttcccgcagcagccgctccagggcccatgcctcctggcagcgcaggggcccaaatgtgcccagtttcagcaggaggcgactgcagtggtacaggtgccggaccaaggcagcatccagagctggacaccccgtgctgagggggcgggcactgggtgagtctatgctgtcctcagccccagcctccgggctgcttggaggcctgtccccaggaacatcattgtcttcatcttcgtcttcattgaggaagctgaagctctccaaggcccaa

SEQ ID NO: 161830 - DNA, 993 bp, Homo Sapiens
gggagagagtatgaagtcgacggcgcgccgaattcggcacgaggcagagggctgtgaagacgcacggtgccaggaccaagtatctgaaagacctggtggaagaggaggctgaggaggctggagtggctttgagaagcacccagagcacactgcaagcaggtctggctgcagatgcctgggctgctcccatcgccatgcagatctacaagaagcacctggaccccaggcccgggccctgcccacctgagctgggcctgggcctgggccagctggcctgctgctgcctgcaccgccgggccaaaaggaggcctcctatgacccaggactggcccttggcagctctgcatcatcgtcgtcagagccaccgcagattatcatcaaccctgcccgacagaagatggtccagaagctggccctgtacgaggatggggccctggacagcctgcagctgctgtcgtccagctccctcccaggcttgggcctggaacaggacaggcaggggcccgaagaaagtgatgaatttcagagctgatgtgttcacctgggcagatcccccaaatccggaagtcaaagttctcatggtcagaagttctcatggtgcacgagtcctcagcactctgccggcagtgggggtgggggcccatgcccgcgggggagagaaggaggtggccctgctgttctaggctctgtgggcataggcaggcagagtggaaccctgcctccatgccagcatctgggggcaaggaaggctggcatcatccagtgaggaggctggcgcatgttgggaggctgctggctgcacagacccgtgaggggaggagaggggctgctgtgcaggggtgtggagtagggagctggctcccctgagagccatgcagggcgtctgcagcccaggcctctggcagcagctctttgcccatctctttggacagtggccaccctgcacaatggggccgacgaggcctagggccctcctacctgcttacaatttgg

SEQ ID NO: 161831 - DNA, 540 bp, Homo Sapiens
  misc_feature (158)..(218): n is a, c, g, or t
agttgtctgggattgttttgtggggggagggaagggagtcgttccgaagatgctgtagtaactgcctcagtgtttcacgtaagactttttggtttgatcatctttgttgaggtaggactatcagttccctctaaatgtatatgttgatttatgagtannnnnnnnnnnnnnnnnnnnnnnnnnnnnnnnnnnnnnnnnnnnnnnnnnnnnnnnnnnnnagatttttttggcgcgctgccccctccccaccctgccactcttgacattccactgtgcgttttagaagagagcctttttctaaagggatctgcttaaagttttaacttttatacctatctgagtgaattacagacaacctatcatttattctgcttcgagggtccccagggcccttgtacaaccgacagctcttacttttaaatgcaatctcttttctacatacattatttttttaattgttagctatttatagaaagcttcaatagaactgtttcaactgtataactatttactattcaaataaaaattttcaaagtcaaa

SEQ ID NO: 161832 - DNA, 993 bp, Homo Sapiens
tgtgacttcaaaggaaaggaacaaattttcaaagacttgggggagtgaaggcagagcctggtgcagatggacgaggtctgcagacggagggcagaggtggtggaaggggccaggggcctgcaggcctccccctggaactgacttcagcagcccacagctgtggggcttcagcagccacaccagcccagcccagcccagctctcgatacgtttggtctttcatgctgaaaaataaataataaagcctgtcccgtgtctactgcctcccccaactgcacagacgccagcctctaggcctgactgccaggggaggtggaaacactggccaccagcccggcagcccctacaggccccccagatgggctgcctcagtcgtcctctgagagctgcagatcctccagctcgtcctccggcccctgggccagctgctgcagctccccaggggccagccccgcctctgcgtctgggtctccatcccaagaccattcaccctccgagttgctgctgtcctcctcgccctcctcctcgtcctcttcatcgtcttccaccccatgccgagtgctcaggggcctcagtatccctctctccgagaatccctcggtgtcgtcctcttcagagctgttcaggtcaaagaggtctttaaattgcttcctgtcctcatccttcctgtcagccatcttccttcgtttgatctcagggaagttcaggtcttccagccgctctttgccactgatctccagctggatctcccggtcacgcagcttgcgccagtggctgtagtacaaggtcaagggtgtcccctcttcccgggtcagcttctcccaggcttccactgcctgctgctcagagacgccgaaggaaaccctctggcggcggctgcagatgtatgccgagttctcctgaaccttcccaagcagctgctgcacctgccggcagtagttggccaccttgcactcccggaggaacgacttcagctctggaaataaagttttat

SEQ ID NO: 161833 - DNA, 1236 bp, Homo Sapiens
  misc_feature (88)..(112): n is a, c, g, or t
tttgatttacatgcaaggatttattttatttgggacagactaaattgcctgaagataatgccatggcttctcccagtgatccctgagnnnnnnnnnnnnnnnnnnnnnnnnnccccatagtttactgctgtgcttaggttctgattgatgacacactcacgtaaggcacttatttacaaggtatggacttaaaacagaatcacagcatttctgcgaaagccctcaaactctccatctatgtttgctgctccaggacttctaaatagtcaggttcagcatgtaaattagctttaagttcaaaatactcattttttgtctgttccactaataccttccttggacgtgagtacattaatgtttccattaacttcagctcttcgtgggctccaggataatgtgcctccatatcaggctggagctgagcaatgtttttccttaggtattctgtgattcccagttgctgaagttccctttctttttctaaactgttttctgtacaatgagctggcatcttggaaggataaaaattctgttgattggttcgtggttttgtatttcatatttgaccctgtgagtggtgaatgattttcctgttccaaaagacttctttggagatgttttgcatcacttccttctttctcattcctctcttcttcctcttccagatgctttggaccaaaggatggacttctatagacatgaaccatggggctcaccatgtgctgttcatagagtgaggcagagggtctttcagtagtgtgatgagtggttttatggccatacatgctgtattgaagatgcacaggactgttgtctctcatttgctcatctacttgtttctttttgtatcttctcctgcggtgaagaacaagaaccactatccctgcagcacagaaaacaatagtgatgaacataatcagaagtcccaatattagaacagacagtggcacagcgtccgtaagagatcgtaaaatagtatcagccgtatttgttgttgttgcaggagtggtgaccataaggtaactagtctgtgttggcatggatgggttatttactaaacctggacagagaatttcactatttagggctttcaattcctttttgtcgagatgcccgggggaagtgcagaggatgtcatctgtcactgtgttcttgcttaacttttgtatccattgctgcagtccaaccaggtcacaggagcagtcccaggggttatcctcaaggtcaatctgccaa

SEQ ID NO: 161834 - DNA, 1221 bp, Homo Sapiens
gggaaaaaaatgttaacataacatttatttagcacgacattgtgaaatacacaaaacatgtaatgagaaagcaggaatttctattcctagtccatttctgaggactgaatcatgaactgctcccaatgtaattaaatatttcttacaatagttgggcaccaagtttaagatttattaattttctcctctcagtataggcagcaattcaccattttctttcagttccttcacaatatccaatcctcccaccagctcccctttcacatacagctgagggtatgttggccaatttgagtaagcttttaatccttgccgaacttcttcatcctccaatatatcgaatgtttcatattcaacaccagtactatttagtatttccagaatttgtttgctgaatccacattttgcttcctgtttgtttcctttcataaagagcatcacagaagctttatttgtcagcactttgagcctttcctctaatttgggagctttgggacaaatttgtatcgtagttcttcagatgcttctagctccttaacttatcatcaagtcctcctatgagctctccagaaacatagagctgaggataggtaggccatactggaataggctttgagtccctgtcgaacctcttcatctgagaagatatcacaaactgctacaactgaatattatcgatttgtgaagaatgttgccaccatctgcattgctgaaaccacagcgtggttcttgaggagttcctttcataacacagcatgacagggggcagcatgagtcaatcttctctcaagcgaaggttgagatcttctttcaagatagttcattagcgctgggtaggaaggagccactagatgcatgtctgcatgagcttttttggtcaactctggggcatgtgcaccatctaatcggtcgattttactgagaattcttgaaaatacagaaaacgtgggaacagaggctaatctgtcatactttcgtccagactacctctcaggcaaccagcctatcacgcttcccaggttcaccaatatgaaacattgaagggagttcattaatgctaacctctagccaaaacttacgttcatcagtgcacactgtggagtccatagtgcccagaaatggaccacaaggagggacttagcgtttgaggcgcagcagctcctcaaactagccaacaggctgagccgacctccttctcagccgctacagctgcatcagccg

SEQ ID NO: 161835 - DNA, 638 bp, Homo Sapiens
  misc_feature (15)..(15): n is a, c, g, or t
cgcttcttcagcttntgagtctcctggaaaacccgaatgcacagagccttcttggtgttacggaggtttttgagcatctttttcctctggtcaatgctcattagcagatagcgtttgtgggctttgtcctttcgatgtttctccaagtgttcttcataactgcggatcttgacagacaaggcaataattcgagcctccagggatctggtgtcctctgggtttgcaacaatcttcttcataaactgttcttgcttgatttttagcatctccttcttgttggccatttccaaagacaagagtcttttcacgacatcatcaaccttctcaattccagggacattctggtagtctttgagcagcgtagaaggaggtgggtcatcatccagcctagactgggctggtttccggacgacatatccgcgcgcggcctggaggaggagacttcgaggctgcaggccccactggttgaaaggaaacttggcgctcccaccgcccggcagcccgggtactaggacctgggtaactgcccgggtccgaatcaaactcagcgtcctccacgcgaccctcagcatgggctcttcggtaatacagaggggggaaggtgtactcaattcccagccccccagcatatcttctca

SEQ ID NO: 161836 - DNA, 872 bp, Homo Sapiens
  misc_feature (80)..(99): n is a, c, g, or t
ccgcccagccacctgcggcctcccggccacttccacgacctctgggttcatagccaccactgctgcggttgtaaccaccnnnnnnnnnnnnnnnnnnnnaccactggccacacctgccggcgacctccacggtcctgctgtccatagccaccgctgccacctccaccactctggtcttgattgccataaccgccaccactgccaccaccactactcatggaggattgatcttggccatagttacctccacctccacctccacctccaccaccactgctgctgttgtactggttctgctgtccatagccctgagggggattatagctttgctgctgtccatagctttgctgctgtccaccatagctaggctgctggctgtagctcccactctggggctgcccatagctgctgctctgagaactgctaccgtaacttcccgaggtgctgctgggagctggctgctggccatagccagggtaggaggactgctgcccgtaagacgattgggagctctggctactgccatagccgccagtcgagccatatccctggggagttgactgagttccatagcctgtgttctggctctggccataagaagaatagctgctctggccatagcctgaagtgtccgtggactggctataaccactgtaactctgctgtccgtagggctgactgctctgctgggaatagccctgcccgggctgggtggggtaggccccatagctttgggttgcttgttgggtataatcgtttgaggccatgtccgcgcacgcgcgcacaggcaagcaagcaacgaagttccaacaccgctgagcacgggacgcctgcctcgtgccgaattaaacacccatgcctcctcctagccg

SEQ ID NO: 161837 - DNA, 1026 bp, Homo Sapiens
  misc_feature (258)..(320): n is a, c, g, or t
  misc_feature (825)..(844): n is a, c, g, or t
tggggtgtaccccgggtgtaaggggaattcgggcattctcccggtgttccgagatttggggaaacttttcccaccgcccggacctcggtcccggcccgtccgctgataagtcctccccgggttacccggtggtaccccaggggagccacggtccccctggccatcggttaggccctacactgtgcattcattccccaagagagtttcatattttaacagtggattagacacttccagtcaccagctcgctgctgtccnnnnnnnnnnnnnnnnnnnnnnnnnnnnnnnnnnnnnnnnnnnnnnnnnnnnnnnnnnnnnnntagcctccacggcccatgggtcctcctcgccctcggcctccacgaccattgccaccaccccgattaaagtctgcccggcgagtagcaaatgagaccttgataggatttccggagaattctttaccatcaaaccagtcaatagctgctttagctgaaggtgggtcatcaaaagagaccgttgcctctcccttcagcttgccagtttccctgtctgtgtacaaattaatcatgggctgtcccgttttcttgtttgtcttaataataccaatctgcttgaagtaatcagccacagactcaattgtaacattctcacccaggccttgcacaaagatggtgttgttgtctgaattatcctgttcggagtcatgacgtgatccttggtcccgagggccaccaaatttattgaagccaccacggtcacttccgcccatgccacctctgcctccacggccacctccacgacctctgggttcatagccaccactgctgcggttgtaaccaccannnnnnnnnnnnnnnnnnnnaccactgccacccctgccgcggcctccacggtcctgctgtccatagctttgggttgcttgttgggtataatcgtttgaggccatgtccgcgcacgcgcgcacaggcaagcaagcaacgaagttccaacaccgctgagcaccacgcccctcgtgccgattcacaaccagcctcgtactagcct

SEQ ID NO: 161838 - DNA, 1343 bp, Homo Sapiens
ctcgtgcaagtggtttattgatggagtgctcttaggagaaggggagtgagggaagcagcgtaggacagaggaaaaaaactgagtaagaatgtgctctcagaagaagactgacttcagcttgattccatgaggagctctgggaaaggaagttccttgatgtaagaggtcagtcttttgtacctccatacaagaggtagcaattcttttctagagatggtctcaaaattagaatacatcaaaatcacttggagggtttggtaaatcagaatgctgtgccaacccccagagattctgattcagtaggtctgaggtgttagcacccacagcatctcgcaaaggggatcaggaaagcacctactacatgaaggcacatgccagggacagatggattggaccccaagctggggctatgtagactacatctttaggtcagaacatctagattcacagtatcttgtatgttcctgttgtcatctcacatctcttgccaacgcattgttgaaacattcttacttggtcttgttattggacttcaagagaagggtctgggagatacatgaggctttgaaaaggaagtagctgcaagttgctaggcaaatatagtggcatcagttgcaatggagtggaaagtcgttaaacgagtgatcaatatttagtggcaagactctagaccaaccctggaaatttgctgatgtttgtgacattaaaagaaaatggctttgatggcaacttttaatttcataagccacgccagaattcataacagtctctgctcctgaggatcaccaccaggtgaaggtgaatgaataaatgttaaaatggaattcgtttcttttggtggggtacgtcaggtagaacttggagaataccttgtacccctgggccttaatgtccatctccaggcagtgcatgaggtcgctgttgtctaggaccgccttccagggcccaaacttgacaacagacttgaacatcttcttatcctgcagaaaacacaggacctctgaataatatgcatcctgctcctcagtttccaccaggcacacaagcacgctggacttccgtgctgttatggcttctgcacgtgccaggcgcaccatgagctccaggttctcgctgtagcccggcacttgcagcaaaaactgcttccgagacacctgctcaccaaagatctgtggcatgtcctccagcagcttgaccaaaggcttgatttcgtagaactgagcctcacggtacacttcagggatgtgctgtgtgggcacttgcccagtgcgcaggtagtccaggatgggtctgaaataggtgctggggcggtcgatgaagaagcggccctccgcgtccgccaa

SEQ ID NO: 161839 - DNA, 1055 bp, Homo Sapiens
ggcaaataaacaaataggaggattgcccctaaaagatgtagaggaaggtcaacaagacatagaggttcataggatcacttgttaactgtctaccagactaggttactggataaaaacgtgcccaggcctctgttaccaggttatctgcatacctaggactcgttctccgaggccccccagctccaaataggcgttctgaaaggcgtctttcagctcctcatcccaggggctgctccttgccgtggaggaggatagagctgcaacggtctaggatcctttctggggcgccccttcatcaccaacaggtgttggggctccgatgtgttggggttcttatgaatagacaactggtacttgttggtggagttgaagggtatctcgacgattttggcgtatctttctctcatctccttcacggaaccacagcacagctctatgcactttaagagtgctgactcagaggcatctcctgcaactgcccgcttaagaataggtaggttttcctggttagcctgaaacactgccctgttacaaagacctgcaattctggacagagcaagccaggtagctgaagtcttgtcaaaagagacaccactctgattctctgtcgtatcagcttcatggatttgattgtcaaaccacatgtgggccactgtcatccggttctgagtcagagttccagttttatcagagcagatggtggacgtggaccccaaggtctccacagcttctaagttcttcactaagcagtttttccttgccatgcgtttggcagtaagtgtcagacagaccgtgacagtggccagcaaaccttccggcacattggctacgatgataccgatgaggaagatgacagcctcaagccaggtgtactcaaggatgagagaaaggatgaagaaagacacacccaggaacacagccacacccgtgatgatgtggataaaatgttcaatttctgcagcaatgggggtctggcctccttccagcccagaagcaagtgtggcaattcttcccatcacagtgcgatccccagtgtagacaacaataccacccaa

SEQ ID NO: 161840 - DNA, 1180 bp, Homo Sapiens
  misc_feature (75)..(100): n is a, c, g, or t
tttagtcttcctaaattttattggcactgaaatagaacatggattgagcataaacccctccaaaaacaatttttnnnnnnnnnnnnnnnnnnnnnnnnnncccctgaatacaaaatctaaccttttcccccagcctccctaagggtaagttactgactttaaggcagctattaatagattgccccacaattccaggtttcaatttagccaatataggacatatcaccaagtgagctaattcacagcaatgcacacaagactcctcaaggtcaggcacagaggcagggcccagtcacttctttggaggggagtgatgagaaggggattttggtcacgtgagagggttgagtaaacttggatcagggcacaggcttctctcaccatactcagctttttgcactcactccctagttgagcctactggcatcaagctctagatgccaaggctgggatggctgtggagcaggagctatggcccaagtagctctgagaggggaagagacctaaaacccctagcagggaaaatactgacgctaggtgtgaacatatcctctcttttcacaagagtcctgatggggctggctgagcttttgggtactcatccctactgttatagctggagaggatttgggtattgaagcagggaggggcagatcccacgaagtgactgcagatctggaataataagtaaggggtagatctgcccatagagctcactttagaccggcctatactcctacaaggaattggggtaggatcttctactcagccttgccacaatagaatggccaatgcccttctagtatgtttggtgaaggtcttgaaggcaccatttcccccatccaccctggggagaaattgagtccctaaagtcaacgacaaggcttattgaggctgagtttgcaacagatccgatctgggaggtagaaacaaaaatgactgaacatctttttatcccccaatcgttacaaagcctaaataactctaaacgggatgggagggcaaattttaggtcagttgacatcctggagaagatatcctaggtcctgtctcattccctagaccgcataacactccaaccgtgtaaatctcaggaccctgaagaagacagtggtaggggagaggaggggagctagcttccaacctactccacacttgactcccataggacaacagccaa

SEQ ID NO: 161841 - DNA, 1099 bp, Homo Sapiens
tgtccaaaaaagttggtgttcttatacctaattttagtctttcaaatgaatgtactgtaatgcttgtatgtataaatcctatgaatagagggcttttgtaaattatgcatttattgtaattatcattaattttttaatgataaaccatgacaaaggattttacgtttataaaattatgacagaagccatgtgcattatcctttacggacgcagcctagctctacagcaatcatcctgaaataagcatacctaatttcaagcaattgttgtattttcatgactgaccttaactgtactttttctagcaagagatgctttattctgcagcatgaacagatttaaaatggctggtgttaaatatcagctcctaataagatgtggactgaaaacactatcacaacactatgagaagcccctagcactggttaacgctttcctagcctagtctctggatttggggagcttgtcttcagtggctgagactgtgagctgggagcagttctctcagctggagagactcgggatggggtaacctggggaccagtctagcccctgcaccctcttccctgcctctgctccttgggagcgggtggagagacacccatgtggctccccttagggccagcaccaagcaccacgctctcatcctgcaagtcggcgcacacagtggatgaaggcaggagacccagaaagcagtgcagtgcagctctaataaaggccttatttttcttatgtaaatcatctttttacatttgtttgtaaacatgtttaaagaacgaaacctagtgggacatttttagactttgatgctctagccattttggattgtgtaagttgcagatgtggcttttactttttaaatggcatattaacaagccagcaaagtgtgtcagaccatggcgtggtatttattgtgcagcagatccagagacagaggcagcctgtcttttcagttggtttctgcttttaatttacttgtacaattcattgttactgttctgtttttctattaatcttttgtcaacttcctgattatgtaacaaagtatgtacagtctacttttgaactatttttatcacagtattatttattgctttct

SEQ ID NO: 161842 - DNA, 968 bp, Homo Sapiens
aaaacaacgcaaggccttggttaccgctccggattaccgggatatgtcgaccacgcgtcggcgacatagatgctatctttaaggatctcagcataaggagtgtacggctagtcagagacaaagactcagataaatttaaaggattctgctatgtagaattcgatgaagtggattcccttaaggaagccttgactatacgatggtgcactgttgggcgatcggtcacttcgtgtggacgttgccgaatggcagaaaacaacgataaaggtggctttggattcaggaaaaggtggaccagatgacagaggcttcaggtatgacttcttagggggcaggggaggtagtcgcccatgcgaccggcgaacagtgccccccatgggcagtcgcttcagagatggccctcccctccgtggatccaacactggatttcagagaacccacagagagaggaaagagcacagagaccacgactccagcttaaacctcgaacagtcgcgacgcccctcaatcaagtagccaatcccaactctgctatcttcgggggtgctaggcctagatgaggacagctcgttcacaaggagcaagaatgagcctgcggttgggacgggaatggggcgtggggggttagagcaggaccacagcctggtgagtccccgggcagccgtcctgcagccgccactcctgcgcctgccattggcctcctcacagcggaaacacagcttgtgagtgcatgtcagctgttaacaagtggtttttagtacattctgggctttgctgtatctatctagtgcctgtttgtgcgtttttttctttcttccgctgcttccccattttccttctgtcctttttctcctgctccttgttttccagcagcacatggggttcctcggagagctaggtggccgccgtggggggggcgtttgggctgcggtgctgcgtcatttttcctttgctttccctttacttta

SEQ ID NO: 161843 - DNA, 929 bp, Homo Sapiens
cgctaggtacgaggctgggtttagaatcggcacgaggggcgcgcgcggcgaatctcaacggctgcgccgtctgcgggcgcttccgggccaccagtttctctgctttccaccctggcgccccccagccctggctccccagctgcgctgccccgggcgtccacgccctgcgggcttagcgggttcagtgggctcaatctgcgcagcgccacctccatgttgaccaagcctctacaggggcctcccgcgccccccgggacccccacgccgccgccaggaggcaaggatcgggaagcgttcgaggccgagtatcgactcggccccctcctgggtaaggggggctttggcaccgtcttcgcaggacaccgcctcacagatcgactccaggtggccatcaaagtgattccccggaatcgtgtgctgggctggtcccccttgtcagactcagtcacatgcccactcgaagtcgcactgctatggaaagtgggtgcaggtggtgggcaccctggcgtgatccgcctgcttgactggtttgagacacaggagggcttcatgctggtcctcgagcggcctttgcccgcccaggatctctttgactatatcacagagaagggcccactgggtgaaggcccaagccgctgcttctttggccaagtagtggcagccatccagcactgccattcccgtggagttgtccatcgtgacatcaaggatgagaacatcctgatagacctacgccgtggctgtgccaaactcattgattttggttctggtgccctgcttcatgatgaaccctacactgactttgatgggacaagggtgtacagccccccagagtggatctctcgacaccagtaccatgcactcccggccactgtctggtcactgggcatcctcctctatgacatggtgtgtggggacattccctttga

SEQ ID NO: 161844 - DNA, 1036 bp, Homo Sapiens
  misc_feature (252)..(276): n is a, c, g, or t
  misc_feature (675)..(702): n is a, c, g, or t
tttttatttcttaactttttattgacattggcaaattaaaatagaataaattaacaagtattttttcaaaaaaatgttttgtacaaaaatactgtcaaaatttcctaaaaagctttcaacacagtagtatcttttcatgtactgaatataactattagcacagtgtcaaaaatgttgaagacagaaacaaaataatctgtgaaatgtttgccactgacgacattccacaccctattatcatctgtacatatnnnnnnnnnnnnnnnnnnnnnnnnnacagccaacttgaaagtgaacagtatgactttcctgatccagaacagtttggcccacatctgtttaatcttccagtttagcatattttaaaaattagtctgtactcaaatgcatagttaaaaaaatgaagcgagatggcagtttgtgcagtaatatctgcccttcgaagttcatgcaaccaactaatgcaatttttcctttcactcgtaaatctgaatgcagttcagtcatttgaaaccatctacaaaatccacaagattaagcagtttgccaagattaatatctaacagttgagcactggagaaagtgagggaaaggagtaaaaacaaacaacgaaaaagaccaagttagctagatatttcaactacataagggaggtgggtgaatgtcaaggctacnnnnnnnnnnnnnnnnnnnnnnnnnnnngtggcagcaattttttttaaaaccaatttgtacaagtttatagtttactttgtttccaagttctcaaacctttcaagatctgaaaagtgagatactgtgtctaagggaatgtttcttttaattcacgccgaagaagttgggggtttgatttctttcgccggggtttcgatcgagtcaacagctcactctgctgggctgctgtttgcacacgaagtccgtcataaaatcaaactcgttttgccccagccagagttcgggcagctccttgatgcggtccaaacccatttctatcaccaaggacataagaacttcctcgtcgatgaaatcagtgtct

SEQ ID NO: 161845 - DNA, 913 bp, Homo Sapiens
  misc_feature (72)..(88): n is a, c, g, or t
  misc_feature (96)..(96): n is a, c, g, or t
  misc_feature (339)..(339): n is a, c, g, or t
  misc_feature (363)..(363): n is a, c, g, or t
gccccccgggattctctccttagggagaaacaacgtttaaggcccccactgttccccttgtcccccttaatnnnnnnnnnnnnnnnnncccaaaanggaaattgggttttaggaagaagtttttttcgagaggccccggagggcgggcccgaaacaaagggatcgtacttctgttgcctcccggaactaccattttccctcggtagggccttttcttcggatggcccccccagcggttctccatcccctggatagtgttcggagccagggatgttcaatggaagaaagggtgtagcttttcgggcggggggatgtttaccctttggcccagggaacccntttgtttgtaggtgccctcccatnaggttattgcttccagggcacactggggtgcttgatgtagcccattggtctgtatgtccttggcaggcagccgctccaactcggtgtggaactcagccacccggttctgggccagcaggaagaggaggttgaggcccaagagctggtgcatataggctgactcggggagctgctccttgtaatcaaagtagtagcatttgagctgggccatgtagcgctcgaaggaggggatgtccttgcgtaggatgctccattgggccccgatctccagtatgtcacgggccagaattagctgctgtttggtcagcttggtccctgtggttggcaagaagttgagctccagaagaactagcttgagtcgacccagctcttccccgcacttgctaagattggggcttttacggttccactcgcccttgagttgctcgtacatgccggtcgcggcctgcagaacagcgcccgaggttgccgcgggcccggagctcgagaagcctgccgccccgttcaccgccgcggccgccatcttgcgtgatgcggcaagcagaccccc

SEQ ID NO: 161846 - DNA, 1438 bp, Homo Sapiens
agctaggtacgaggcctgggtggcgaattcggccgagggtaccgagcacttcggctcctcgcgcgctcgcgtcccctcgtgcgggctccagccgcagccttagcttcggctcccggcttgggtggcgcggccgtgccctcgttttggcctccgaacgcggctcgaatggcaagccaaaattccttccggatagaatatgatacctttggtgaactaaaggtgccaaatgataagtattatggcgcccagaccgtgagatctacgatgaactttaagattggaggtgtgacagaacgcatgccaaccccagttattaaagcttttggcatcttgaagcgagcggccgctgaagtaaaccaggattatggtcttgatccaaagattgctaatgcaataatgaaggcagcagatgaggtagctgaaggtaaattaaatgatcattttcctctcgtggtatggcagactggatcaggaactcagacaaatatgaatgtaaatgaagtcattagcaatagagcaattgaaatgttaggaggtgaacttggcagcaagatacctgtgcatcccaacgatcatgttaataaaagccagagctcaaatgatacttttcccacagcaatgcacattgctgctgcaatagaagttcatgaagtactgttaccaggactacagaagttacatgatgctcttgatgcaaaatccaaagagtttgcacagatcatcaagattggacgtactcatactcaggatgctgttccacttactcttgggcaggaatttagtggttatgttcaacaagtaaaatatgcaatgacaagaataaaagctgccatgccaagaatctatgagctcgcagctggaggcactgctgttggtacaggtttaaatactagaattggctttgcagaaaaggttgctgcaaaagtggctgcacttacaggcttgccttttgtcactgctccgaataaatttgaagctctggctgctcatgacgctctggttgagctcagtggagccatgaacactactgcctgcagtctgatgaagatagcaaatgatattcgatttttgggttctggtcctcggtcaggtctgggagaattgatcttgcctgaaaatgaaccaggaagcagtatcatgccaggcaaggtgaaccctactcagtgtgaagcaatgaccatggttgcagcccaagtcatggggaaccatgttgctgtcactgtcggaggcagcaatggacattttgagttgaatgttttcaagccaatgatgattaaaaatgtgttacactcagccaggctgctgggggatgcttcagtttccttttacagaaaactgcgtggtgggaatccaaggccaatacagaaaggatcaacaagctgatgaaatgagtctctaatgttgggtgacagctctcaatccctcatatagggtatga

SEQ ID NO: 161847 - DNA, 1018 bp, Homo Sapiens
ccccagggttccgcatccggatcagctcaccactggcctcggtagttcactgcttggccccggtcacagagtaggcatggcccttcaccaacttcttgaaagtgatggcctccatgtctagaacgctggagatgtctatggagcagcccagcagggagccccgctccagcgctttgaggatgatctggtagaggtcactgggagccttgcgcaactcgtaccactcggtaaccccgcctgtgaagtcctcaaagccctctgaggtgctgcccccttgacaggagcctcgttagctgccatttaccttgggcataggccttcttcaagcaggggcgctccagaactcgttgccttcggcagagtgcacgaacactagcttcccgtccttgatgggcagcaggtcatccacgaccacgtccacccactccccaaattgccacagctggaaatggaagatgccggcatagccattctggaagctctggccgtgcggaaccactcggtgcaggagggtgtcgttgagagtgagggaggcgatggccgccaagagccagcagtcccccagtgctccctggcagatgtctgtgcgggtagctccatccacaatgaactgggggtttgacagcagttccgtgggacgcttccacttgatgccataggtcttggaggaattgggacccaggtccttgtaacccaggctctggggtaccggggggaaggcctcatcacggaagagggtcccactctgcaggcatcgcacccgcagctgctcataatcctggcccaggtacttgatggcattctcatggcggcccaggcccagctccctggcccgtctgcttctgcacttgggctgacaccccagtgcagtacaccggcgtgatgatctcctccgacatccctgggcggaggggtgtttgggggtcgctgcagtccctgagttcatggcttcccggtggcagctcaggaccgacgcgtgggtcgacgatatcccggaaatccgagcggtacaggcctg

SEQ ID NO: 161848 - DNA, 1073 bp, Homo Sapiens
ctatgtgttaaagagtatgaagtcgacggcgcgccgaattcggcacgaggcttggacagagagcacttagcaaaaaataaatacatacctcagcaagacgcactagaggacaaaatcgtggaatttcaccataaccacattggacaaacaccagcagaatcagatttccagctcctagagattgcccgtcggctagagatgtatggaatccggttgcacccggccaaggacagggaaggcacgaagatcaatctggccgttgccaacacgggaattctagtgtttcagggtttcactaagatcaatgccttcaactgggccaaggtgcggaagctgagcttcaagaggaagcgctttctcatcaagctccggccagatgccaatagtgcgtaccaggataccttggaattcctgatggccagtcgggatttctgcaagtccttctggaaaatctgtgttgaacatcatgccttctttagactttttgaagagcccaaaccaaagcccaagcccgtcctctttagccgggggtcatcatttcggttcagtggtcggactcagaagcaggttctcgactatgttaaagaaggaggacataagaaggtgcagtttgaaaggaagcacagcaagattcattctatccggagccttgcttcacagcctacagaactgaattcggaagtgctggagcagtctcagcagagcaccagccttacatttggagaaggtgccgaatctccagggggccagagctgccggcgaggaaaggaatcgaatgtttccgccggggagcgggggtcgcactcgagccctgcgccgaggagaagccccgcgggtaacaagcaggcggacggagccgcctcggcgcccacggaggaagaggaggaggtcgttaagataggacccagcagagtaaacctcagcccccgcagccaagcacaggtccagcatcccgggctgccagaggcagcagtacttccattcctttcattgactgcagtgacgtagatagcgaatacgaccttcttagagaacagcgtcccgatcccggtcccgatcccggtcccggtccc

SEQ ID NO: 161849 - DNA, 1307 bp, Homo Sapiens
gtacggtccggaatcctggatcgcccgtaagatgctctgacctttgacccctgccgttcagctctagggcccgtgcaggccacaccatgaacacctccccaggcacggtgggcagtgacccggtcatcctggccactgcaggctacgaccacaccgtgcgcttctggcaggcccacagcggcatctgcacccggacggtgcagcaccaggactcccaggtgaatgccttggaggtcacaccggaccgcagcatgattgctgctgcaggttaccagcacatccgcatgtatgatctcaagctccaataaccctaacccctatcatcagctacgacggcgtcaacaagaacatcgcgtctgtgggcttccacgaagacggccgctggatgtacacgggcggcgaggactgcacagccaggatctgggacctcaggtcccggaacctgcagtgccagcggatcttccaggtgaacgcacccagttaactgcgtgtgcctgcaccccaaccaggcagagctcatcgtgggtgacgagagcggggcgtatccactatctgggacttgaaaacagaccacaagcgagcagctgatccctgagcccgaggtctccatcacgtccgcccacatcgatcccgacgccagctacatggcagctgtcaatagcaccggaaactgctatgtctggaatctgacggggggcattggtgacgaggtgacccagctcatccccaagactaagatccctgcccacacgcgctacgccctgcagtgtcgcttcagtcccgattccacgctcctcgccacctgctcggctgatcagacgtgcaagatctggaggacgtccaacttctccctgatgacggagctgagcatcaagagcggcaaccccccggggagtcctcccgcggctggatgtggggctgcgccttctcgggggactcccagtacatcgtcactgcttcctcggacaacctggcccggctctggtgtgtggagactggagagatcaagagagagtatggcggccaccagaaggctgttgtctgcctggccttcaatgacagtgtgctgggctagcctgtgacccctcgggactgcctggtgcaggtggtggcagctggagggacccatgcagcacccaggtcagagcataccctcccctgccggcctgcgccagctggacctgatggccccctgtggcgccttgacctgctgggccaggctgccctgggactctcaacccccagttgcttatccacatgtgacagaactcgacccaagccaggctgcacactcctggactgggcta

SEQ ID NO: 161850 - DNA, 828 bp, Homo Sapiens
gcccacacgctatgcttaaatttggtcaggctgaggcgctgctgctgagcggtcgatccgagacgtgtctccctgggcggcagaaccatgttggacttcgcgatcttcgccgttaccttcttgctggcgttggtgggagccgtgctctacctctatccggtgagcgccgtctttggctctctggggccccgggcgccgccccagtctctctgtcgccggcatccaggccaacctgcccgctgcgggccgcagggggcgggcctgagaggagggttcgggttcgctccagagcttcagcgcggggaccgcacccggagtcacgtgacgcccctcccggcaagctctgagagcgacgtgggctgcgtcgctacccctcaggcgccgggccaggcgggcgtagagctgctgaggaaaagcccgcgcccccgcaggccggtctcaccttgccaggcaccccgcgccactctccaaggcggctctcaagtactttgggcagctttttggccataactcgccaaacccaaatttcatttcccagtgtgtcaggaggagactcctgggcgcgccactcctttctcctttcttgaggattctcccagcacttgtgtattcctcttttccatctgtccatcgatctatcctgactggaatccaaagtgctcgaggtccaggtcttgctcctcttaggggctccaggcaaatgcttctttggggagagcgccgcgctgcgggttcgggtgcgaggtttcctctgccgctgacgcctctgcgagcctccggtcctcctctctccacttgcctccgtcagcgagagagggagggtcccaa

SEQ ID NO: 161851 - DNA, 1548 bp, Homo Sapiens
tttagttagagagtatgaagtcgacggcgcgccgaattcggcacgaggattttctaggatttgagaggaaagagaggaaaatgggggaatgggttgcaaaatagaaatgagcttaatccaggccgcagagccagggaaggtgagtaactttaggagggtgctagactttagaagccagataggaagaatcagtctaaactggccatgctttggaagggacaagactatgtgctccgctgcccaccttcagcctgcaatgagggactgaggcccacgagtctttccagctcttcctccattctggccagtccctgcatcctccctggggtggaggatggaaggaaagctgggacaagcagggaacgcatgattcagggatgctgtcactcggcagccagattccgaaactcccattctccaatgacttcctcaaccaatgggtggccttgtgactgttctttaaggctgaagatatccaggaaagggggcttggacactggccaaggagaccccttcgtgctgtggacacagctctcttcactctttgctcatggcatgacacagcggagaccgcctccaacaacgaatttggggctacgaagaggaatagcgaaaaagcaaatctgtttcaactgatgggaaccctatagctatagaacttgggggctatctcctatgcccctggacaggacagttggctggggacaggagaagtgctcaatcttcatgagacaaaggggcccgatagggccagcagccacaaggccttgacctgccgagtcagcatgccccatctctctgcacagctgtcccctaaacccaactcacgtttctgtatgtcttaggccagtatcccaaacctcttccacgtcactgttctttccacccattctccctttgcatcttgagcagttatccaactaggatctgccaagtggatactggggtgccactcccctgagaaaagactgagccaggaactacaagctccccccacattcctcccagcctggacctaattcttgagaggggctctctcttcacggactgtgtctggactttgagcaggcttctgccccttgcgttggctctttgctgccagccatcaggtgggggattagagcctggtgtaagtgcgccagactcttccggtttccaaagttcgtgcctgcgaacccaaacctgtgagtctcttctgcatgcaggagtttctcctgggcagctggtcactccccagagaagctgggccttcatggacacatggaactaagcctcccaaatgggagttctggctgagcccagggtggggagatcctgggaagggaggcactggaggaagacggcacctcttcccccatggcagggtgtgagggaggcaggtttggaatggtgcgagtatggcaatctaagcaggggtctggtctctttgactccaggctggcctttggccgactgtctgctcacccagagaccttggactccggactatccatggctccgaatctaagtgctgcccactcccatgctcacacccacagaaagtcttcc

SEQ ID NO: 161852 - DNA, 691 bp, Homo Sapiens
tgggcatgagctgctgtgcccagcctccatgttttaatatcaactctcactcctgaattcagttgctttgcccaagataggagttctctgatgcagaaattattgggctcttttagggtaagaagtttgtgtctttgtctggccacatcttgactaggtattgtctactctgaagacctttaatggcttccctctttcatctcctgagtatgtaacttgcaatgggcagctatccagtgacttgttctgagtaagtgtgttcattaatgtttatttagctctgaagcaagagtgatatactccaggacttagaatagtgcctaaagtgctgcagccaaagacagagcggaactatgaaaagtgggcttggagatggcaggagagcttgtcattgagcctggcaatttagcaaactgatgctgaggatgattgaggtgggtctacctcatctctgaaaattctggaaggaatggaggagtctcaacatgtgtttctgacacaagatccgtggtttgtactcaaagcccagaatccccaagtgcctgcttttgatgatgtctacagaaaatgctggctgagctgaacacatttgcccaattccaggtgtgcacagaaaaccgaaaatattcaaattccaaatttttttcttcgagcagaagaaaatgtggccctaaaggggttagttgagggg

SEQ ID NO: 161853 - DNA, 1006 bp, Homo Sapiens
cgcgaacagacggacgcaccggcgagcgccgaggggacaggccgagcgcggggcgccggaggcaggtgtgggacaggcactggcctcagaccggggccacactgaggtctgcccttctcccgctggccgccacccaagacaccatgagccagtccggggccgtgagctgctgcccgggtgccaccaatggcagcctgggccggtccgacggtgtggccaatgatgagccccaaggacctgtttggtgagtgaggtttgagaacgggctggacgtcacaggggagaaatgggcactgcatccaggtgggggacagctgctcctgccccacagctgtgcctggtctggcccaggggatctccgggtgcccagggaggcctctggaccctaatcaaccttccgaaagctcctggccactggatcccctcccccacacccgtaaggggagaggcctttactaataattcagggagcatcaatattgattccgctgcactcattgctgtaacctgatcacagcgaggttcaggcaggataagccgccaggtgtctgctccaggaggggggcctggccaggccccacctccccccactctggccttccccagagacgaccctgccctctcgctagctagatgcacccttcacttatgtctttggacaaggtgcctagtctggaaagcgagaagacctgggagggcagggagagtgaagctggcagctctcagagtgggaagaagccgggctgggacccccttcctgtcccctcaccctccgggacagaaaccccccgggcacaggctgctggtccccactccactcagagcaagcccatcgccttctccgagctgcgtccttctccaaaggggcttccctggagggaggggagggggcttcctgcaggtcctgatttcacacccacatccttcctggtggccaagaggtcacggagcaacctccctccgcttgaatcaactttcccttgtgggtccagtcccaactggacgg

SEQ ID NO: 161854 - DNA, 871 bp, Homo Sapiens
aatgcaagcccttgcatggcaatccaaatttattgaactactgatgctaagttatacaaaattgcaccactttaattaaggcttcttagtttacatttggccacctcaaagtagttgtaacattaggttggccacctcaaagtagttgtaacattaggttggtcaatttaaatactgtggctccctgttggatagacacacaatctttacatccaaacattaatgcatacaaagcaaacaaggcattgtttaataaaaacagcaatagttactgcaaattaggccttgtgaccaattacatatgattaaaattacttcccacattcacatccacagtactcgtccaccatttaacatctcaaccaaaacgttacacatgtgaaacaatcactaacaggcaaaaatactaaacctgtatatttggtattgcaaatacacttatgcatgagcaagcaagggattcacagtgagaatctacagctgcagaagcctgaaaatgatttacaaaaattgttaaatcattaaaaaattgtttgaaaatatacacttcttgttgtagacccccactgtacacacgactataaacattgttccctatgtaaacaaaaaaaggaaacatataataagagatttgaaaagtctggacatttccttcccaacagatattaaaggcaacgtctttaatctaagacattatactgaaaggactatcatgttttaaagacaagatcaccgtctccacaggttttttaaaaattaaaaaaactatatagctgtgttaatcaaagcgcttattttgtacaataataatgaccttgaatttcttaaaaaaaattacaataagctacaagtatcaaagaagcgaagccaa

SEQ ID NO: 161855 - DNA, 822 bp, Homo Sapiens
gttagtttttttgtcgcacacagcgacacgttaatgcagcgcctctacagtacagacatgccttgaggtcagttcgccccccttaggggcactccccgagctttacccacgatgacagcgacccagggttctggaggaccaggggtcaacctgaggactgcagaagtccttgcgctcccgcttatctgtgttgacacagcggctgccaggggcacaaggtaggcaacatggatgggaagagagcccaggccgcccccgtctcacagctgcagagcacgcagaccacaggcactgcaggccaaaccaggcagagcatgctggtgcgacacatcctggggctgggctggtcggggagaagcatctcccgctgacagtcatgccatgggcactgctcccctgcagggcaccagggtacacgagctcacaggcctcatgtttctctgagaggcatggagcagagcccttggtggcccatggaaagcaggcatgcaaggtggccattagtcaggggaggcatgcagggcggtcgcgtccaagaatcattctgggcatatggaggtgagatgcagcagaaggcggggctccacaggggaactcactggatgaagtccgtggcccatcctccagggtcactcaatgagcgcagggtcacaggggcacggagcactaagaagggcacaaccccggcgagccatgggccagctcactctccgccgctccactggagaagacgctggtgcactccgtgcagtgtgggcaggtgaagccgctcatattccctcgtgccgaattcaacacccagcaccgcacctagccaatttt

SEQ ID NO: 161856 - DNA, 1133 bp, Homo Sapiens
gtgggctggggagaggaggagataggttcttgagtctttttctgtcttctcccttccccacttccttccctccagtccccactcactcacatgcacacactaacctggagccgatgggatagagtgactggcactgggaccacagagaaatgtcagagtgttggttacagactcaaggaaacctctcattttagagtgctcatttggttttgagcaaaattttggactgtgaagcaaggcattggtgaagacaaaatggcctcgccggctgacagctgtatccagttcacccgccatgccagtgatgttcttctcaaccttaatcgtctccggagtcgagacatcttgactgatgttgtcattgttgtgagccgtgagcagtttagagcccataaaacggtcctcatggcctgcagtggcctgttctataagcatctttacagaccagttgaaatgcaaaccttagtgtgatcaatctagatcctgagatcaaccctgagggattctgcatcctcctggacttcatgtacacatctcggctcaaatttgcgggagggcaacatcatggctgtgatggccacggctatgtacctgccagatggagcatgttgtggacacttgccggaaagtttattaaggccagtgaagcagagaatggtttctgccatcaagcctcctcgtgaagagttcctcaacagccggatgctgatgccccaagacatcatggcctatcggggtcgtgaggtggtggataacaacctgccactgaggagcgcccctgggtgtgagagcagagcctttgcccccagcctgtacagtggcctgtccacaccgccagcctcttattccatgtacagccacctccctgtcagcagcctcctcttctccgatgaggagtttcgggatgtccggatgcctgtggccaaccccttccccaagagcgggcactcccatgtgatagtgccaggccagtccctggtgagtacagccggccgactttggacgtgtcccccaatgtgtgccacagcaatatctattcacccaaggaaacaatcccagagaggcacgaagtgatatgcactacagtgtggctgagggcctcaaacctgctgcccctcagcccgaaatgcccc

SEQ ID NO: 161857 - DNA, 1311 bp, Homo Sapiens
  misc_feature (116)..(128): n is a, c, g, or t
  misc_feature (439)..(464): n is a, c, g, or t
  misc_feature (922)..(944): n is a, c, g, or t
gtttggttgcgcccgcctattttacgccccctcgagaaaattttttgtattttttccgccctagaagccccaaaaaaactctctggaaagggagttttttcccccaaaatattctnnnnnnnnnnnnngaaaggtaaagggttcccttccccaaaaattctccccaaggttgggccagttttttcccaagttcggggggtgtgttaaaaacggagggccaaggcccctaagttaattaattcgggcccccccttagggggcccccctttggtccaagaaaagctgtggtagggtaaagcttggggcccccttcgagggggatattcttagagcggggccgccctttttgttcgcgacatgcctccgggtttttttggaagatcaaagtttatttactacctgcatacaaaaacatattgcacatcaaacaaccgaaatnnnnnnnnnnnnnnnnnnnnnnnnnngatactctactgaagactaacatgtagtttatacagaataaaccttctggaaattgatcttttcagtagttcaggttatgtctgaatggacatgactaattcagcttagtgttttaactaaagctatgtttgatttttaaatactgtacactttaataaataaaccaaacaaagcctcaaggtagaacagtcactgccaagtatcgcccagtgtccctgcagatgagagtttaacaaatgtattccagtggtctgcagattttcctctacatacagcatttaaaaaacacattaaaacagaccagtttccagactaaactaatgaagaaattacaattcagtgcaaaatattttagactgcatttcattctagttttcctcaggtgaagaagtggttgcatattaaaaatgtaacaaaagcagctaatgctttcataaagaatattacgttagggatnnnnnnnnnnnnnnnnnnnnnnntctctgccatattttgaaaacaaaataacatttcctatagccagcaacttttttttaatgttacatatactattctcaaggcacatctgatgatatattttataacacagtaggtgtcacagtatgtttaacatatgatttcttcaggatccctcccctttttgaattccaaatggaggaactgaaagtgcgatgtaaagactggcgatccatattctatctttggcaagcttgtacaagcactattgtaaatgtaatgtaaaagaactgtaaactaggaacttcttcagtttatgaaacaccattcaggactgctgcttcttgagtgttttcttcttttaaggtattaatcttttcttctcctgga

SEQ ID NO: 161858 - DNA, 924 bp, Homo Sapiens
tggcaatgagccgggggcaccaaatccggcagccccttttggaagcaaagcccaaggccctggagggttggggaaagcagtcaggcgtgaactgggaatttccctccctctgtaccctggagagcccataccccagggagccctgttcccgtcagaaccccagggcaaccctcagcgcccagtccaaatgtgatcagttcttcagaacctagacacattagatcctgagacattgctcccttccccacccagaggttgcctccatcaaactaccctgtgctccccaactcaccccacccttcccaaccttactcagggctccctttgaaaggagggtgtttctgggtcaccctgtggtccctcttccctctggctctcaccccctgccatcccctacctacctgcacagaggacacagcctgaagaagtgtacctgccagcaggagaagaggcaggtcaggactcaggtggccagccaccctcagccctgggcactcacacatgtaaggggccagccctaagggccgctattcgctgagaccatgaggaggggagcaggaccctcggaggccacaagtcacacaggccgtcctggtaaagtgagaaacctgagggtggaaaagagcagcaggacaggccctggagaggaggctaggggctgctgcctgggtaccctcccccaagcccttctcccggcccctaaccggtccaacaggaacttggcgagctgcgagtgcagggagaagcccagccgctccttgaggaggcaccactgctccatgtggccgcccaggcggatgcggtacttgctgcggcgcgcgtccagctgccgccgcttctcccgccgcctgcaggacacgtccaccgccggggaggaagccatgtgcacgcagaggctgtgcgcccccacgcgccctcaccccc

SEQ ID NO: 161859 - DNA, 941 bp, Homo Sapiens
tcctattaagtaaaaataaatagtagtagtatgtttgtaagctattcttccatttaaaaacactatcatacaattagtaacctttgtcttttctgtcagaatagcttaccaacatactactactatttatttttacttaataggagagacaggcctgctcaacagtccagctcaggggttttgttgtttttaaagtgaacatcataaagaagagaagagagacaagattaagcatgagaccatgaggctgcttctaaaaaggcagggacctgtttgcagacaagatgcaagaacacagcctgcagtgattcacagctttgtttcaacccacaaaccagaaaattagctcttgggtctgtgggcccaaagtgaactttaaagcaataaagactggaagcaggtctgggaaggcaatacaaaatgtggagagttgaaaaggaggcagagctggcaggaatgggtagggagagtgtttggtaaatagcacctttgagtcaaaattgagcagtttagaaatccaggaaaggggactggctgtggggaggagaacctgggggtagaggaagtggggtgaagattcctcactaaggggcaacagcaggagggtggccatcctggccaaatgccctagccctgtccttcttaaggtgattcggtttgggaaactcgaggtcttttgaggacccctcatcaatgtcactgagaaattgaaggaagggagtttcttcccagtgtagctttccacttttctccaacccacaacagtatatattgcacaagtctacgacaaatttggattgtactgagacagacagcaacctttcccacaggtgctctgagcaccagggagaaaaaacagtgcccaaggtttggcttttatttagtgtcggccctacaagaataccaagtagtcttgcagaacatggggcactctcccccaa

SEQ ID NO: 161860 - DNA, 811 bp, Homo Sapiens
  misc_feature (225)..(277): n is a, c, g, or t
atggttaattgattttttactaattggcaaggtaatttaatgaggaaaggataattctttcaataaacagtgttacaatgactggatacttgtatgggggaaaaaaagaaccctgatccataattcacaacatacatatcaattcaaggtagatcacaaatataaaaatataaagtttatataatagagcagaatatctgaaatcttggggttaaattggagagnnnnnnnnnnnnnnnnnnnnnnnnnnnnnnnnnnnnnnnnnnnnnnnnnnnnncttctattcatcaaaagacataaagaaaacagtcaagccacagactaggtgtaatatctcaatacatatatccgacaagagacttgcatctagaatgtataaagaatttctatgacccaattatagctatcagggatatacaaattaaaaccaaaatgaaacatcactacacaccgattggaatggttaaaaaggaaaaatactgacaacaccaatatttgtaaagacaggaggtaccagaactctcattcattatattcataaattgacaaatataaaaactgctatagtagggcagtcttccttagaaagggattgtgggcatgacagagaacaatattaatctgtccattatattccttaactgtaaaatggagaccatatgttccaccagcttcacttggtaattatgatacatggctattaagagactcaaatgactccatttcatcaactaatatgccctgtcaattctacttctaaagtatcccatgtgctatccaatgtcccaacttttttgtacaaagttgcctt

SEQ ID NO: 161861 - DNA, 1009 bp, Homo Sapiens
ctttgcccccggggattgtttaagcgttcccggcccccttcgttcccagtcgaaccggcccgttgttctccgctcgccctttgtgatcacacttcgctcattctagcggggccccccgaagtcctggtcctcgcctctctactggccaccagcgtacaaaaactgaggttgtggatagaaaatttcttcctcccaagtccattgggtatctgaacatttaggaaaaaataaagatgtccaaccagatttccaataagctcattgattaccgagcctccgatgatatagttgaatccaaggttaacccagggtaaatagcaggccttaaatcgtgttccaaaccaaaatgatacaatcatgtctctgttcagctgggcccagacataaagtactgacatgatcagaggaatcatcagcaactgcatatccattgctaagccagtaatcacgatgcaaatccagttaaagaggagcatgaataaatagtctgctggcctcccatcacaaagctcctgtttcaagtcgcgtagaatactgatataagaaatataaattgaccaaataaagaaatccagttcctggacccacagggaaataaaaggtggcagtgattggcctccaaatctgaaagcgataaaggaaggcttcgggccagaggaagaggtaggccgggctgatgaggccgagtttgccgaccaagggcacggcgacggtggcggcgaaccaatagcgcgtgatcgccgggatgctcctgaaccagtctccgatgtccgacatcttcgacccacaggtagccaagatgcacaagaccgcccgactccccgttgccgaccccctcacgacgcggccggctccgcgactgttaggtgtctaggtggaagccgccgaagccgcgatgcagaaggcggagacgggcggacgtggcgccaccgaattgggaccagcgaggcagccttctaaggcgaaacttccccctcgtgccgacttcaccaccgggcctcgacctgcc

SEQ ID NO: 161862 - DNA, 1015 bp, Homo Sapiens
cagtactataacggtccttaggtagcgaggcctgggtggcgaattccggcacgaggatggcgactgcggccgaaccctcggcttcagaacccgaggctgagtccaaggctgggcccaaggctgacggagaggaggatgaggttaaggcggctaggacaaggagaaaggtgttatcgcgggctgtggccgctgcgacatacaagaccatggggccagcgtgggatcagcaggaggaaggcgtgagcgagagcgatgggtgatgagtacgccatggcttcctccgcggagagctcccccggggagtacgagtgggaatatgacgaagaggaggagaaaaaccagctggagattgagagactggaggagcagttgtctatcaacgtctatgactaacaactgccatgtggacttgatcagactgctcaggctggaaggggagcttaccaaggtgaggatggcccgccagaagatgagtgaaatctttcccttgactgaagagctctggctggagtggctgcatgacgagatcagcatggcccaggatggcctggacagagagcacgtgtatgacctctttgagaaagccgtgaaggattacatttgtcctaacatttggctagagtatgggcagtactcagttggtgggattggtcagaaaggtggccttgagaaagttcgctccgtgtttgaaagggctctctcgtctgttggtttacatatgaccaaaggactcgccctctgggaggcttaccgagagtttgaaagtgcgattgtggaagctgctcggcttgagaaagtccacagtcttttccggcgacagttggcgatcccactctatgatatggaggcacatttgcagagtatgaagaatggtcagaagacccaataccagagtcagtaattcagaactataacaaagcactacagcagctggagaaatataaaccctatgaagaagcactgttgcaagcagaggcaccaagctggcagaatatcaagcatatatcgattttga

SEQ ID NO: 161863 - DNA, 978 bp, Homo Sapiens
ggagtttgttttttatttagacatggaattttccttttcatataacttatttaattaaaatattcatctcgggtagttaccacaaaaaagtaacatagaaaattgtatttacattttgggaccaaaatacaaatgaagagcaggatgacaccttgctcctttccctcccgcttcccagaaagaaaaagccccaaagaaactgctcagtacaccaaggatcacaaaagggtaatttgtaatttggtgatttgtatgtagtgtagcacagaaaaaaaattgcacaagtttttccataaatgagaccaaaggttcaaattcatcctgtgtcaggttcaaattcatcctgtgtctgctctgcagccattttagtaagctgggcaaggaggtcatttagaaattgggtttttcctctttcccctgactcttcgcaccaagtcacatccctgatgtagatactcttgggggaggggaaaacatctggctctatgcaaacagggctcatcaaaaatctttatgtgccaaaatggatactgacattgctatgaacaaatctgttttttcttccctccctgcctaaagactcctaataagggacattaaatcatacacaactgaatctaagatatgaaaaactagtttcaatgacaaagacttgaacacacagttaagagataaattcaaggtggtagacacctagaaaaagctattctaggcagcagacatctggcacctgacccaaatgttcatttggtttcagttaagaggcttcctaatattagatttgtggggcaggctagggataggggtggaatggtggtacaagtaaccaagagaagtaaagtaatgctttacccattcaaaaatatagcaaattaaaacatagtaacatttgtgtcctgtcacaataggcaccctgcacagcaatacacactgaacaatgtcgagtttctgctgaattgactgcctacgttgctccaa

SEQ ID NO: 161864 - DNA, 627 bp, Homo Sapiens
tcttccgtttctgtttttcctccttgaggcgcttgcgctccttcttctctaggtcctggagcagctcctggaagcgggcactccttgggtccacctggtagcccaggagctcctgggcctcagcctgcagtcgggccctcctctccttgtcagcctgggccttctcccagttctcccgctgctgctgctgccagttcacaatcatctgtggcatcttggccatgcactctgcgatgtgctgctccctctcccgacgcttctgctcttcggccagctgcttcacccgcagcgactcctgcatggtcgccaggctcgggtaccattcgcgttcttcggcctccagctcccgcagctgctccggcgacggccataacgaaccggggaccaccccggaggcggcgccgtaacgcgcgaactgcttagccgcgtagcgcggtcccagctgccaccgcggggtcaggaggtcctcggggtctggccaccggggtcccggcctgcggcgcgggggcggccgcgcccggtagccacgggaacccggggccagggtcgccgccacacctagtaggctgcgtgcctgtcaacagcggacgccgccccaacttttttgtacaaagttggcctttatcg

SEQ ID NO: 161865 - DNA, 691 bp, Homo Sapiens
gaactttaatttcaaccttttattaaacccaaattccagtaaccttttaccatgcccttactagagggttgcttcataactgacccttcatttgtggcagggaagaaaccatggcttcaggatcatgactgaagtttggccatgttccatcattaatgttccaacatcaccagggacacaaagctcagcatgagggcttctacccaaatctccctacgacaggtacttcttcaactcttccaccacctcttgaggctcagggaatttgagtttgcgtgggggccccttcttaatcccagtccagagctccgcactgctgccgtccgggcgcagcagcgtcacctacgaagctgcccctccggggcttcgtcgggttcacctttactggaagctctggggcctccaggcgcagcgcctggctcagggccgcggcgttgcgcccatagacgcgtcagctagtgcaatgctcgataacaacggtcgcctcctccattccctccccgccgttcgccagcttctctcgcttctcggctacggcgaccaccgcggcctcagccttacgcttcctcccgcggggagccatggcgcctagagcccggccgagaatgcagcgggactggtgggtggggggcggagacgcgaccactgagcggaaactgggcaacgaagagcgcagcccggaagctctccc

SEQ ID NO: 161866 - DNA, 1006 bp, Homo Sapiens
  misc_feature (87)..(664): n is a, c, g, or t
ggacgacgaccacaccgaatgagtacctacagcggagtttgagaaagcccacgctcccgaggggagaaagcggacagtatccgtagnnnnnnnnnnnnnnnnnnnnnnnnnnnnnnnnnnnnnnnnnnnnnnnnnnnnnnnnnnnnnnnnnnnnnnnnnnnnnnnnnnnnnnnnnnnnnnnnnnnnnnnnnnnnnnnnnnnnnnnnnnnnnnnnnnnnnnnnnnnnnnnnnnnnnnnnnnnnnnnnnnnnnnnnnnnnnnnnnnnnnnnnnnnnnnnnnnnnnnnnnnnnnnnnnnnnnnnnnnnnnnnnnnnnnnnnnnnnnnnnnnnnnnnnnnnnnnnnnnnnnnnnnnnnnnnnnnnnnnnnnnnnnnnnnnnnnnnnnnnnnnnnnnnnnnnnnnnnnnnnnnnnnnnnnnnnnnnnnnnnnnnnnnnnnnnnnnnnnnnnnnnnnnnnnnnnnnnnnnnnnnnnnnnnnnnnnnnnnnnnnnnnnnnnnnnnnnnnnnnnnnnnnnnnnnnnnnnnnnnnnnnnnnnnnnnnnnnnnnnnnnnnnnnnnnnnnnnnnnnnnnnnnnnnnnnnnnnnnnnnnnnnnnnnnnnnnnnnnnnnnnnnnnnnnnnnnnnnnnnnnnnnnnnnnnnnnnnnnnnnnnnnnnnnnnnnnnnnnnaagaattcggcacgaggggtaaagttgacctggttcagttgcttaagatccgtactcgctgttctcttgtgagacatgacatccgaggccgaggaggactcatcctcattgtcatcttcatcccactgggactgaaagtctccgggacgaagcagcactttttctggctttgaagtcggcaggacagacatggactgggaaagaggcgtcttctgcaaatttgacttggaaagtaaggtcttgatctttgatttctttttcttgtctttaaccaccgcctccgccatcatccctagcacgacaccttcggtcgacagtgatgatgagtctgtggttaaagac

SEQ ID NO: 161867 - DNA, 1108 bp, Homo Sapiens
ttctcagcagaggattttattggtggtcacctgtggcacaggttagaggagagaacattcccccaggggtgctgagcctgtcccttcatgttctggcccttgaagccccaccccacatggaggtgcccgttacctgacgggtgcagggtattgatgaaggcaccttggcaggcagtcaaggaactgctgggacaggttttctgagcaagaactccctggcagccaggggactggggagagctgcttggggctttaactggctgctctgtaagctgagcagcagtgcgggagcagaggtggaaggggaggccaagagaacggcttgaggaaataaacaaagagcagaccccctaggccacttaccatatccagccactgctgggcactggtcatagatgtacttggagcagatctcacgtaccacactggcatccacctccgcaatccggctttcccattcagccagggggatgcggcggccataggtcaggaggctgcgtccgatgtcctcacacacaggagtagtgccatctagatgagataccagggcatttctgaggatgtttttgccccgggccacctcactctccgtggcactggtacacaggcgcatccactgcccttgcaggacgaacatcatgtcatcgattttcattcggtcacagacaaagtgtgcacccagcaagcccgtctctgcatagcagatgctgaaggtctggaaactctggcatagcttgttggccacagcacctgaagccagtgggctggacaggtgctgccagggggataggtggtcagcacccaccctcttgtcttcaacgcacactgtgacccccacgcacaggagcacacagccccagcaccctctcttccctgaaggcgaggtcccatgctcgcgctggcactcaccacgccaccaccataagtgcagtcatagtggccgatgatggcattggccacttgcaaggccacattgtccgggctggcccagccaggaccctctactgcaatggccacgtgggcaaaaggtagagcatcatcacggtggcggatctcactgccagtgaagcggcatggagtaagagtgggcacagcgtcctctgcccaa

SEQ ID NO: 161868 - DNA, 1165 bp, Homo Sapiens
gggtaggtggccagagggccgtccgctaatacacttggcaaagaaaatgggaaccaagcgcagtggctggcatatgcaacagtgcgttgatggtaacggcagattgggaacaactggtttctgttgagcttggggccacacatgttccaattctccagaagaaacgttcccacacacaatggaagtgtcaagagcagccggggtgggtcagtactcttcctgctgcgggggctgctgttcgtgggcttgctcctctgcttccggctcttctgtgtggccctcgtgttcttctgaagcatacaggatgtccattagtctctgcacgaggtcatcattttcctgcccgtgttcttggcagagtagctcgatctctctcaacttcccaaagtagaaatccctttccttttccacgccttcaagggcaagttttaatgaatgtacctgttcattaagcgtgtatgacctgcggtttctaaatcgtttatcggatttggatgctgagccactgggaagaagcccttttggctgatgagggtcgagaaggtgtggatcctggtttagctgctggacttgatttagctgcacctgctgtgggggagtttgcatggtgagacttgttttggcaggttgaagatctgttcaccagggtcaggaggaggaattgcatcttgcccttgtcgtgcctctacaggatcatactccttcccatcgtagttagcatcatagaagtttcttaaaccagttgaataaaatccaggttgtcctggaaacgtcctttcactagcttctccagctggaattaccgttatcaacgttcattcgcttaaatgatgcttgcagaagtttaaaattgtgaatatattcatgttccagctttgcttgaaattttactttcttcaaactaatgcagccagggaagagcatgtccatgaattggcaataggccgctcctgaacaaagctgttccacttttgtgtagtttaaagatactatgtcattaacccatgcaatgatgtcatgtctgctcatagtctcttgggttatcgaggtagaatacacattgaccgccattccccaacttgagcatccaggctttctcctggctgttgaaatgaactgttcctctgggaaacaggacactgctccggcgctgtcgcctccttcc

SEQ ID NO: 161869 - DNA, 1328 bp, Homo Sapiens
cctcccactggttgcccaaatagtaaatagtgtaaattttcagtggataaatgtagtccacttgtaaacaaaccacctaaaaacccagcttggccgtccttcctggctcagtttaggcagggtgagagaaaaaccctgggcctcctaagtatgaggccttgcatgcttgctttctatactcatcatcagtgcatagcttctcacaaaacacttcatctttcctcatgcaggagagtcagtgctaaaagtatattttcctttcctacagattcctccttatggacaacaaggccccagcgggtatggtcaacagggccagactccatattacaaccagcaaagtcctcaccctcagcagcagcagccaccctactcccagcaaccaccgtcccagacccctcatgcccaaccttcgtatcagcagcagccacagtctcaaccaccacagctccagtcctctcagcctccatactcccagcagccatcccagcctccacatcagcagtccccggctccatacccctcccagcagtcgacgacacagcagcacccccagagccagcccccctactcacagccacaggctcagtctccttaccagcagcagcaacctcagcagccagcaccctcgacgctctcccagcaggctgcgtatcctcagccccagtctcagcagtcccagcaaactgcctattcccagcagcgcttccctccaccgcaggagctatctcaagattcatttgggtctcaggcatcctcagccccctcaatgacctccagtaagggagggcaagaagatatgaacctgagccttcagtcaagaccctccagcttgcctgatctatctggttcaatagatgacctccccatggggacagaaggagctctgagtcctggagtgagcacatcagggatttccagcagccaaggagagcagagtaatccagctcagtctcctttctctcctcatacctcccctcacctgcctggcatccgaggcccttccccgtcccctgttggctctcccgccagtgttgctcagtctcgctcaggaccactctcgcctgctgcagtgccaggcaaccagatgccacctcggccacccagtggccagtcggacagcatcatgcatccttccatgaaccaatcaagcattgcccaagatcgaggttatatgcagaggaacccccagatgccccagtacagttccccccagcccggctcagccttatctccgcgtcagccttccggaggacagatacacacagcatgggctcctaccagcagaactccatggggagctatggtctcagggggtcagtatggcc

SEQ ID NO: 161870 - DNA, 719 bp, Homo Sapiens
  misc_feature (434)..(444): n is a, c, g, or t
cttgcgttgcttttatttaatcacttccccagcccttccatcgccttttttgaggataagaaacccaaagttcccagagattaacttgcccaagatcacttggcctggatttgagcctgaggctcagactccaaaacccacactcaatttgctacatctcccaggggtggggccaaggcagctgtgagcaaaaggagaagtatcagcttctcaagggcctagggtttgttggaagggcaaggcaagggcaaagggggatactgaacaagggggcaattaccagtgcctgggatggacccatccattcaggcagggggtttggggtgtcccgtgtggttagaaaccacctagcatcatagctgcaacagcacatttattgggatctgagtttacagttcacatagggaggtgaagccgtgggagaagcaggggtnnnnnnnnnnnggggggggacttcaccccctagggacagctgcttccaaacctaacaaaaccccagggtaagtcctcgtgctgggcctcgagccagcaactctagtcaaatcccaaggcaccggtcagcatgtgggtcaaggggcccactatggggacatacactcaagaggatgaaagctctttagcttcagaatcagattgccttccccagaccccaccccaaaacaggctccttttccatctcccccttcaccaacttttttgtacaaagttcccttttttag

SEQ ID NO: 161871 - DNA, 759 bp, Homo Sapiens
  misc_feature (508)..(540): n is a, c, g, or t
aagacaactttgtacaaaaaagttggttttaagatagataggagacacttttttatcacatgtagtcacaacctgttttgtttttgtaaaacataggaagtctctttaatgcaatgatttgttttatatttggactaaggttcttgagcttatctcccaaggtactttccataatttaacacagcttctataaaagtgacttcatgcttacttgtggatcattcttgctgcttaagatgaaaagcattggttttttaaaattagagaataaaatatgtatttaaatttttggtgtgttcacataaagggatgtagctaaaatgttttcataggctattatatattctcgcagcatttccagttaagaggatattaggtatataattctcttcttaaccgaatgtcagatggtcttacgccacagggtgcaggtaacccttggtctgtaagcaccaccgatccagggatcattgtctaaataggttactattgtttgtttcatcttgcnnnnnnnnnnnnnnnnnnnnnnnnnnnnnnnnnaagtgttccctctttggggcaaattcttataaaaatgtttattgtaaagttatatattttgtctacgatgggattatgcacttcccaattgggattttacatctggatttttagtcattctaaaaaacacctaattattaaaacatttatagagtgcctactgtatgcatgagttgagttgcttctgaggtacatttttgaatgacagcatattgtaag

SEQ ID NO: 161872 - DNA, 1423 bp, Homo Sapiens
  misc_feature (26)..(26): n is a, c, g, or t
ttactctttatacagaagaagattangaaaacagaagtgggcaggtaccctgtggagcctccattctcaatgccccaccctttacctctctgccagtgtcagcgccttcaaaccagaaggtatggggatggcctggtggggtgggccacacatggggctccccaggcaaggccacctgctgacagaggtgacggcgagggcagggaagccaggcccagcaaagctcttctggcgcaggcagcatacgcgcagaagggcgacgggctgggcttgttctccttggcttactggtcctggcgctttcagtgccctgcggcagcctcactggggcccctgctggctccgcctctcctccagcgcccggcacacccacatggacaccacggcggcatttccatcattgaactgcacgatgaacgggtggcccatcaattcttcaggtgctggcctttcttttggcctgttttcgcataacactgagtgatgaaactcgtacaccatggctccgcagaactctccaactggcaaggacgggcgaaatcctcaatcaacaatgcactgcagaagctggagaggcattacagatccctgcgttttctcctgaatctgaggatatggaaacctcccaagagcaagctccataaaagagattcctaagctccagacatcagaatgaattccatactgctcccctgaaatcctttcaggcgccatataagcatttgttccaacatacgtcttggctatagaattcaccagctgagtgctaactccaaaatcacacagcttaacctgtcctcttgtgtttactagcatattggagggcttcacgtctctatgtaaaatctttaaactccacaaataagtaaggcctttaacaactgctactgcaattcttccaaggacatgttctggcattttcctatatacatccaaagatcccccatccatgaattctgtacatattgaaatcctgttttctacaaaaaatgctccataaaatccaatgatatatgatgaatcgcacttataaagaatttccaattcagacataatttgcttctgaagttccagtgtaatatctagtagtatgacctttacagctaatattttcccactcgggacatgatatgctctggcatcgtggtgcgtgcctgtagtcctctatagtccccctgtagggactacagggaggctgaggcaagagggtcgcttgagtccaggtcaggctgcagtgagctatgatctcaccactccactacagcccgggtgacagagcgagactctgtttgtagactgtgcctccgttgccatgaccaagagtgtcccgatatcgtatgtcttgttcattcatctggccattggctagtatttttttcagttcagcagaagacttctttaagctattgcttggaagtgccaa

SEQ ID NO: 161873 - DNA, 1633 bp, Homo Sapiens
  misc_feature (539)..(556): n is a, c, g, or t
  misc_feature (610)..(618): n is a, c, g, or t
gacaggggacagcaacacgtggcacgggccacgcgccaacgcaggcacaaggcaaggcgaaggaaagcgaaacggacccgcggcccgcacggggcggcagagacagcgcgagggaatctcaaaaggaagcggcgcgggaccacgccaagtgaaacaacaaccaggaagcccaagaagacgccgtatcacccggtccgtctgtctcggaccgggcgcgtacaaattagaccaggggcgccacgcggggcgcggccgccagccaaccaaaccagagacgtgcccccgcgcgcacagagaagacagagagaggagccaccccagcccgcccgcaggcacccagcgtgcccatagtgagggggaccgggtggtcgcccccagaaaccgaatccagcacgtgaggccaagcacgggtggcgacccccgacctgcgctaccgttgccctggactgcaacctcggccccaggatcctgctcacagtccacaccaggtgccggcaagaagcagccatgggggactcgacgctgctcgtgattcactnnnnnnnnnnnnnnnnnntaccccaaggctccatgttccccgtgacaggtgggcctgaggggtcggggtgannnnnnnnnagcatggcagcatgatttttgtacaatcaatccatcatctggggcaacagggtggtgtgcgggggctatttcttgggtttggcggaattgcggggtggggtgatgggtcggcctccagggttcaggccactgaactgcccgtacttccctttgttcttgtcggcgggcttgaggatctggaaagagcacatgagggtctcgtccacactcatcatggcgccagcattgtcaaactcgccacagtagttgggagctgagaaaagtgtcaccagctgccgcttggcaaagaactcgtagccgtcttctaccacctggtgtgctcggcagatgaggtccaagtcgtgcttgtggaggaacttggccaccacctcggctccaaaggtaaaagagacgccacggtcgttctcgccccagccctgcacgtccttgtcagggtcagaccacagcaggtcacacagcaggccctggttcagggcacatctgtggggctgcatgatccgcggaatctgctccatagactgcaggtcccggggacaggccctccgtggcagcagaagatcttttcgtccactatgtccgcgatgggcaggcagttgaagcagtcagtgaaggttttccacagtttgatgttgtagcgtctcttgcactcatcgtagaaaccatagatgcggttgatgctggcacactcgtggttcccacggagcaggaagaagttctcggggtacttgatcttataggccagcagcaggcagatggtctccaaggattgcttgcccctgtccacatagtcccccagaaagaggtagttgctctcgggagggaaaccgccatactcaaatagtcgcagaaggtcgtagtactggccgtgtatgtcaccttccagcaggcgcccgatgatcgagtccaggttgagcttctcgctgtcggacatggcggcgccgccgctccagcccagcagctcctggcccgctcctgcctcccgccctccggcagcctccttccggcctggctcccc

SEQ ID NO: 161874 - DNA, 1182 bp, Homo Sapiens
  misc_feature (95)..(142): n is a, c, g, or t
  misc_feature (270)..(270): n is a, c, g, or t
  misc_feature (575)..(611): n is a, c, g, or t
acattaaccataagatttttatttaacatttttgattaaaggaattgtattgcaaattatgactttttaatttggcaacatccttttaatggtgnnnnnnnnnnnnnnnnnnnnnnnnnnnnnnnnnnnnnnnnnnnnnnnncctaaagctccattccgacttaaacaagggagagggcactgcgaaatacaccctctcaggagatggcgctggcaccgtttttaccattgatgaaaccacaggggacattcatgcaataaggagcctanatagagaagaaaaacctttttacacttttcgtgctcagggctgtggacatagaaacccagaaagcccctggagcttgaatcagaattcatcatcaaagtgcaggatattaatgataatgagccaaagttttgggatggactttatgttgctactgtcccagaaatgtctcctgtgggtgagtaggcaaatcaaaattctgtgagatacaatgagacctcttcaacattgactttttgcaggttgatgtaaacatcttatctatcatctaaaagaattatttttcaattctagaaaatacagttcnnnnnnnnnnnnnnnnnnnnnnnnnnnnnnnnnnnnntgcttcattatgaagataactacaggaatatataacattagttcctgttttccaccctgtgaatttacctgaattcatagaatccttgcgtgctttaagcaaaaaatgtattttgtattgaaattgattcttatctcaattccagacacctatacagtgctggagacacctaccctacaccacgaaatgccagacagtaattcctagatcaaagtaaatgatctaaagcatgcatcacatctgatctggaagtggtccagaaacaggtgtgttgcatcttctgtagctgtaaatagagattctggaagggtgatactgtttccttttcagggtaaataacccatacttgttatgccatcaagccaagcagcaaatgaataatgtcatgaaaatattattagaacaaattaacaaattacaattacaattatcaaattaacaattagaatatagtagcaccatcattctaaaaatttaaatttgatataaatatacatttccatatcagcctaaatttacaaagtcctataatatgtaggatataaggtctaataagttaagaattccccaa

SEQ ID NO: 161875 - DNA, 452 bp, Homo Sapiens
  misc_feature (101)..(148): n is a, c, g, or t
ttttttaacagaaccataagatttttatttaacatttttgattaaaggaattgtattgcaaattatgactttttaatttggcaacatccttttaatggtgnnnnnnnnnnnnnnnnnnnnnnnnnnnnnnnnnnnnnnnnnnnnnnnncctaaagctccattccgacttagacaagggagagggcactgcgaaatacaccctctcaggagatggcgctggcaccgtttttaccattgatgaaaccacaggggacattcatgcaataaggagcctagatagagaagaaaaacctttctacactcttcgtgctcaggctgtggacatagaaaccagaaagcccctggagcctgaatcagaattcatcatcaaagtgcaggatattaatgataatgagccaaagttttgggatggaccttatgttgctactgtcccagaaatgtctcctgtgggt

SEQ ID NO: 161876 - DNA, 1932 bp, Homo Sapiens
cttcattaaccctttattacaagtcacgctcttatagaagtatatgtggacttacgtgaaaaatcaaatgtatccaagaataaaaaacacagcacataaagtagtatatgcattccagtgttcgcgccagagacggcgggcgcccaagtaaaagctcttctaaaacggcctgactggggcaggccgggtgcgaacggttccgggcctcaggcacagtgtgggggccgcctgcctcctccgcggcccggcgggcgggggcagcaccagctcctagggcctccgggccagcggcggaccccaggccggcccaagcccgacgccaggcagaaccctttgggcggggccgtatctggccctccggggacggcagtgacgacacccccagaaatgtgggcttcagggctggccacagggtaccctcagaagcccgcagcttagtcggcctttttcaggaagatctggaagagccggacccagggtcagcagggcctctgagctccgccagggtctccctggctgctccccgtgcctggcctggccctgcccagcctcacctcgttcagaatcacccacacagggggagtccgtctggatcgagaggcgcagtgcttccagaggggcgaaggctgggtccacctctccctctgccactcccttgtagaaggagccgaacttacgtcgaagggcagcacctccacagacgtgttgaagagcttgtcctccgggtgctcgatgttcccactgcggaagaagaaccgctccagtcttagaggttggaagaagcggaagcggatgaagtcccccgcggcaggggtgaaggcccagaagaagtcctcgcgcaggtaggctttctccagggtgaagtgctggtatgtcttcaggctcgtgctcacctctgctggcgggttcacatgctccttccgcagcgcctgctttccaaagtctttgtccttcagtttctggatcttgccagccagcgaggagtgagtgcccacgtgctggaagagggacggtttgaaggggatccgcaggttggctttctgccggtcacagtgcttcgcatctttctcggggttgcagatttcacccacagaatatggtccaggagccagtcgatgggcttgtcccggtagaacatgagaatgaactctacaatcaggctcaggtccagcgacttgaacatcttaccaaatgaagcgcagctggggagaactccaggatcatccagtccctctgaaggctgctgcagtgcaaagttcttcatggtgctcaggtagttggggcttggccacgatgtcatcctccagctgcacgtagtagatgcctttggactgcgcgtacatcatgaggaagcagtaatcgaggttctgtttggtcctccacctgactctctccttggggtccccaaaggactctcggaggcgggagaagtcagggtagaagtggggggagggtgagatgacctccaggagcccagaatggatctccgtggggaacaaggccttgatgttctctgtcactgccgaagtgtactgtgagtcagtctcggcgatcagcaccacgatgaccgagtcctccttctcctgcgggctcagctcggagatgagcgagtgcagagtgtcagtcaggtacgagtgcacctcgcgccgcacgctcgggatgcccatcaccaccgacactccggtgcggccctggcccacgcgcaccgcgggctgcagactgctctccttggccagcaggtgtggcaggtgatggaagacggtgggcaggtgcagcacgtgccggtgtgagccgttccacggcttcaatcgggggtcctctgttaggcggccccaggtgcgattgccgtctccgtctcgcagcgcctgcctttctgacacggccctcttgatctcgtccagcaccaggttgagctccttggagcgcttccaa

SEQ ID NO: 161877 - DNA, 1019 bp, Homo Sapiens
  misc_feature (778)..(890): n is a, c, g, or t
agttggcttgccacgatgtcatcctccagctgcacgtagtagatgcctttggactgcgcgtacatcatgaggaagcagtaatcgaggttctgtttggtcctccacctgactctctccttggggtccccaaaggactctcggaggcgggagaagtcagggtagaagtggggggagggtgagatgacctccaggagcccagaatggatctccgtggggaacaaggccttgatgttctctgtcactgccgaagtgtactgtgagtcagtctcggcgatcagcaccacgatgaccgagtcctccttctcctccggtgcggcctggcccacgcgcaccgcgggctgcagactgctctccttggccagcaggtgtggcaggtgatggaagacggtgggcaggtgcagcacgtgccggtgtgagccgttgcccggcttcaatcgggggtcctctgttagtcggccccaggtggtattgcggtctccgtctcgcagcgcctgcctttctgacacggccctcttgatctcgtccagcaccaggttgagctccttggagcgcttgaggctctcctgctcagctgcgtgcaaccgattcgcgcagcgccaggaactcccgctggtaaacgtccacaacgtcgcctttctggccgctgagtgccgcagtaccaggacagcgagaggaaggcgcacaggcagaagagcagcagcgtcaggaaggtgccattgcggagcctcatctcctcgggtgcgcggcgggcgcccgcggggccgaggctgcatggccnnnnnnnnnnnnnnnnnnnnnnnnnnnnnnnnnnnnnnnnnnnnnnnnnnnnnnnnnnnnnnnnnnnnnnnnnnnnnnnnnnnnnnnnnnnnnnnnnnnnnnnnnnnnnnnnngggagcgcgccggccgcccctcagggcgcaagctttgtgccctgtactcagggaagaggaacaggctcagaagggcagaggcaggtatcaggctcactgcagatatcagcgccacccaggcctcgctac

SEQ ID NO: 161878 - DNA, 1045 bp, Homo Sapiens
  misc_feature (804)..(916): n is a, c, g, or t
aaggatccattccagtccttcgaagggctgctgcagtgcaaaagttctttcatggtgttcaggtagtggggcttggccacgatgtcatcctccagctgcacgtagtagatgcctttggactgcgcgtacatcatgaggaagcagtaatcgaggttctgtttggtcctccacctgactctctccttggggtccccaaaggactctcggaggcgggagaagtcagggtagaagtggggggagggtgagatgacctccaggagcccagaatggatctccgtggggaacaaggccttgatgttctctgtcactgccgaagtgtactgtgagtcagtctccggtgcggccctggcccacgcgcaccgcgggctgcagactgctctccttggccagcaggtgtggcaggtgatggaagacggtgggcaggtgcagcacgtgccggtgtgagccgtttcccggcttcaatcgggggtcctctgttaggcggccccaggtgcgattgccgtctccgtctcgcagcgcctgcctttctgacacggccctcttgatctcgtccagcaccaggttgagctccttggagcgcttgaggctctcctgctcagctgcgtgcaaccgatcgcgcagcgccaggaactcccgctggtaaacgtccacaacgtcgcctttctggccgctgagtgccgcgtaccaggacagcgagaggaaggcgcacaggcagaagagcagcagcgtcaggaaggtgccattgcggagcctcatctcctcgggtgcgcggcgggcgcccgcggggccgaggctgcatggccnnnnnnnnnnnnnnnnnnnnnnnnnnnnnnnnnnnnnnnnnnnnnnnnnnnnnnnnnnnnnnnnnnnnnnnnnnnnnnnnnnnnnnnnnnnnnnnnnnnnnnnnnnnnnnnnngggagcgcgccggccgcccctcagggcgcaagctttgtgccctgtactcagggaagaggaacaggctcagaagggcagaggcaggtatcaggctcacctcgtgccgaattcgccacccaggcctcgctc

SEQ ID NO: 161879 - DNA, 982 bp, Homo Sapiens
  misc_feature (208)..(246): n is a, c, g, or t
gaatgaatgacaactttatttttcttacacttttaaggctgatgaaaaaccttcatttcaattgaaaagtatggtaactgtgtttactcattattattagttttctaaaacacaacttgaaaacatccagcatgcatgtttaatatcagtacaatgaattcaagaccaagtatacatgttacattcagcaaggctagattacagattnnnnnnnnnnnnnnnnnnnnnnnnnnnnnnnnnnnnnnnttcacgttttcttttcaatgcatttgatgattcattggcagtattttgtgatgacatcatattactggtaataagaatgtttttgggcccgattattgatggattaatcagaacattttgaactgcagttgttgcaggaactggtttgacaggtgtggactgagaaggtggaatctgcaccgtaaatctttggcttgtcactgacattggagttgcaactttatttgggacagacaccgtttgtggggttgctatagtaggagtagtaggtttgctactaacagcaccaacacttaatcgtggaactagtctcccttggttaggtccctttttaattaaggacttcagcctatagtttggagctgttaagcagtatctatcaggtggcagtctaggtcctgcatatggcttaatcagtggcaaaggggtttgatttttctgccttgcgatatccagtaaaaaatctcttgggggaggagaggtaaaagattggtcagcacgacactggattgccagtctcacatcatctgcatcaacattaggtttcttagcatggctcgaataaatttttgcatcatccagaattgtagtcacataacggaaagcaaattccaacatttgatttataacccttggttcatactctgtgattcccatatccttcaggatctgtgccatcaccaaggcatctctcggagcgttcttgggaggcgccatcttgcccgactccatccaa

SEQ ID NO: 161880 - DNA, 1074 bp, Homo Sapiens
  misc_feature (131)..(169): n is a, c, g, or t
tgtgtttactccattattattagttttctaaaacacaacttgaaaacatccagcatgcatgtttaatatcagtacaatgaattcaagaccaagtatacatgttacattcagcaaggctagattacagattnnnnnnnnnnnnnnnnnnnnnnnnnnnnnnnnnnnnnnnttcacgttttcttttcaatgcatttgatgattcattggcagtattttgtgatgacatcatattagtggtaataagaatgtttttggacccgattaatgatggattaatcagaacattctgaactgctgaggttgcaggaattgaagcttttacagctggagactgagaagtaggcatctgtactgtaaacctttgacctgtgagggacatgggagtccctactttagttgaaacagacatggtctgtggggttggtgtgcctagtgtgggagtacttggtctgctagtaactgaaccaacactttaaccgcgggactgttattcttcccgcagaagttgatgccttttttctgtaaagatttcagcctatagtttggagctgttaagcagtatctatcaggtggcaacctaggacctgaatatggcttgatcaatggcaaaggggtttgatttctttgccttgcaatatctaataaaaaatctcttgggggaggagaggtaaaagactgatcagcgcggcactggattgccaatcgcacatcatctgcatcaacagtagctttcttagcatggcttgaataaatttttgcatcatctagaattgtggtcacatatcggaaggcaaactccaacatctgatttataactcttggctcatattctgtactccccatatccttcaggatttgtgccatcatctgtgcatctttcggcatgctcttgggagaagccgtcttgccagactccatgatatccgatgatcagacttctcgagctaaatcacccacattaatgtatttcagtcctgattttgacgcaagttctttgcctagtgtggtttttccaacccctggtgtaccggtgagcaggatgttcggaagcaacatggtccccgccgcgacccc

SEQ ID NO: 161881 - DNA, 1147 bp, Homo Sapiens
gagatgagttgttttgccaggaggagttgttgttttcataaagcgcatgccaaagggggttccagccttatggggagcccggcgctggtaggctgtttgaaaaggggagttcttcgcgggtggcggagggggggatatccccaaagttgggggggtccccccctttggcggggggtgcttccctggccctccaaagggaccaaggacccggccagagggggggagcacgccaccaagtagtgtgccagcctccttccagcgccttagacccaggtgggcccttgccagcaggtcacgaacatccttatatagtgtggcttcaattgtagcgcttcaggttggctccagcagagtgtgatggcccacctcgggcatccggaagcccctgggctgtgccccgcttggcccgaaccgtatagcggtgaaaagttttgtgtgtcaccacttctcttccttgaaatatagcaccagcaaagtgcccagctgcagccatgagcaccacgcagtctctgggacctctactttgcaggttctgtagcagcagttctgcctcttctgggggatcctgatgagggcctaggacacagcggtaggcataaagaaactggccctgggcattctggaaaagaactcgatgagggtaaaagcctgggggtcggctcaacttctcaaatgtagccctctcccgatccagtgtctgcaagtcgctgctcactggctgagtctgagtcttctgatcccgagatgctggaaagatgtcttgtggagctctgcttttcaaagtccagggcagacaggagaggcttgtccttgagacgttgctttaggttaaaccgatgccagtcaagcttataatgttccctctgttcttggtggttctggaaggtctggtcataagttgaacaaaataacttctctgaacaggaagtacgcggagcccgggccagagcctccccaggcgcgtggctcaccaggctcaggccctgaaagaccggagcatccgcgctgaggtcaaacagggagatcgacgcaggagccggggctgcatctggagccggcgacatggctgagcagaaattatttagcagcagctccaaacgtcccgggagctgagcggctcgcaagtcctcaggtcgattgccgccaa

SEQ ID NO: 161882 - DNA, 1143 bp, Homo Sapiens
ggaagaggggggtttttttaagcccaacccccgggggcaaggaggttggttcccatccccagaagggggggcccctccgtcgctgcacgcgggcgttaagggccgtgggttagaaaggtggaagtccccccccgggaaggttgagcagggcaggctgaaggggaggcccaatgtaggaggtcaggagaaggccgcaggaggcccccttgagaagtaggtaaggttgtggaaaggtccggaagatgcttccgaaattgggcattgaaccagggcctttggtgatgcacctcagctccctgccgctctttcatccaggcagccagcccctgcctcgattccgcgtcctgataggtctgcatgcgctccagcagccccgtgagcgccctgctgccacgtcagcgaggtgcatgtactgctccgtgttgatgatgcggatctcacgctccagctcggggatgatggcgcctgtgcgccagccgtgccgcagcatgagatccgccagatcactatagaggtggtccccgaagtagagcacgcgggggccacgccattccgtcaagcgtaagaagtcaaacaggtttccctgccgatagatcttgcccttttccaagcgggtgatccggtcccactgaagtgagcccttctcatcgagttttctgaaaggcttgcgccggtcagtgaagaagctgggcttgtctgcctggacaatgaccacatcgaagagctggcgccaatcgggacccaccatgtgccgcatccccttgtctacgaagctgaaaggactgttggtgatgaggaacagctgtttcccatgggccaccaggcggctcaggacagcaaacgtctcatcccctctcaggatgtacttctccatgtcctgctcgatccactggtacatgaggcccttcacatgcacgtctcggatggcgtccgtcacgtccttgtagagatgtgcttggtcaaactccaggctgtggcccagaaagtagtccaccacacaggacagcagagccatctccggtagcgagaagatgtccatgaactgcttaatggagggacccttgccatagaagccactcatctggtatagtgggatgtgctgggtacccccatacagctcaatcacctcctcgtctggcccaa

SEQ ID NO: 161883 - DNA, 756 bp, Homo Sapiens
  misc_feature (175)..(184): n is a, c, g, or t
  misc_feature (262)..(262): n is a, c, g, or t
gttttttgggaggggcccgaaaggcggccgtcaccaaggggtaggcttgggctacgctagtgggtgcctttcccgggattttattccccattttttattaaaagccaatccattttatagtttcataaaaaaattacttgcccttaatattccccaaaaatttttttattcccannnnnnnnnnccatgtccacaccaatattcagtctagattggtttaatcttgaagtgtaatccaataagactgaagactaaacatttncaggtcttgtaccagatagtaaaatactcgtaggccttctggatcctttgattgatttacatcaataagggaacctatttttgatgttgtaaaagatatgtgttcatctccaattacgatttcaagctcctgtcggcccactctgtcagggggaggccacaatgcatcatcttcttttgtaatttcactgtcgtcaattattctcttcagttcttccattacgcttttgtgtacataagcctcttttctgatcatgacatcatttttgtaattgctgttgttggcatatcttagctttccgtccggtcgaaattcgaactccaggaactcgtggccgaacttgcccttgtgccctacgtagtagcgcaggtagaaatcgctagccacagccatttttgtacccgggaagcccgccgaaaacgcagccaacgtgtcccctcttttcacggttgcagtgacgccaacttttttgtacaaaggtgccctttacagac

SEQ ID NO: 161884 - DNA, 998 bp, Homo Sapiens
accttgtaaaaaactggctttatttgtcacttattcaccttatctcagttatgccattttggcgtccacagtgacagtcccctggaagctggggtcaggcccccacccacccaccgtgaccatcacccacagggcgtgagtgtgggccttgcagggcccagccgatggttacaggctgcaggcgggactatggggctcctcctgaggcctggtgctttccagccccctgcccaccagcttgggtacagctgcctgcctgccagaggccaagcattcctaagcgtgggctgggggaggccctgcccctctgtagcagcagagcagacagggcagtgggagaaccatgtgggtaggagggcatcaggtctcaagagcctctcccctgctcaggactgggtctagacaaggccacgtgtgatagggtggtaagccctgggccatatggaggagcctggggcccatcttggttctgctgctgagttgctgggtggctttaggcaagtcccttcttgtcccttggtcactctgtttcctggctagcactgccagcaaggtctccagagtgtgcccctctgccgggctgtggcggtggccctgtgctttgcaggctgccgtgtgcccactgtcagagtggggtctccccgacaggctgcacgcacccccaggcccccttcttaggatcagggcatcctgcaaaacatccttggtcccaccaatgtctaaagccagctcgaaacctcgagctcctcaggatcttagcacccaactctgctgcccttgctgctgggcagtgcctgtcctaagaggggactccctaaaggccagagagagggtgctcatctccaggacctaggccacctgtcagcacaaacagaacttattccagacataaacatgagtcttcttatttcaaacactggagcaactgatcaacaccaccacagcccatgcaccccgaacctgacttcactaccaactttgggcctgtgctgtcccaa

SEQ ID NO: 161885 - DNA, 930 bp, Homo Sapiens
tttattccgggttggggtggctctcagcacactggggaaaagggtggggtcgatgactgtccctggctccctccttgccccatgctgccataaccgcagcttcagagaaaggtgccacactcgcttggctgacaatgtcggggagtcccctgggctccacaccagggcgtgtgcccttggaaaaccacggtgactgaatcatgtccctttcagccaaaactggaagacagcccagctccctgtcttcaggtgaccagatctctaagtcagattactggccccagggtcaagtccaggctccccagctggggtacctcccaggctgagtccaggccttgctccctccttcctccctgcacgtgctctgagcctccagcccgacgcctgggatgccggtgccccttgggccccagaccctactactcttgagtgacaggcctcttcctaggggtttctgtgcatccgtcacatcacccacgttagagtcccttcctgtgaggacagaagggccctgaagacagagccggcccctggtgagctccgctttcccgcactgacccctcctgggctgcagctccccacctggcagctgccgccccccatggccctggttgaggtcacctgtcgttcccgtccccaccactcaccaagcgctcccaggttctccgtctggaagaccctctgcagcggggggatgtaaatgaccgccagctgccccaggatggaccccaggacggagtagaggaacatgtggttcctgagaaagccgatctcaaatatcagcttggtctgagagcggcaggtcaaggcgttgaagagatcgaaaaacacaaaacaagtgaacgtcatcgtcgtggtgcggggagtgcttgctctgtcttcaggcatctccttccagaagataaagagggtcccgctgaagatgatgtt

SEQ ID NO: 161886 - DNA, 1371 bp, Homo Sapiens
  misc_feature (38)..(38): n is a, c, g, or t
  misc_feature (235)..(235): n is a, c, g, or t
  misc_feature (325)..(334): n is a, c, g, or t
  misc_feature (362)..(362): n is a, c, g, or t
  misc_feature (382)..(382): n is a, c, g, or t
  misc_feature (1140)..(1160): n is a, c, g, or t
tttagaaaaagtttctttgaaggggccggagggggggnccggacaatgggattttctacccatttttttccattgtattttgcccggaggacgggaggtcagggttttgtttggccccagggctgggagtgccagtggcgacaattctccgggattaaaatttttaagggtaatttttccccattccatttcaaaagagtaggccatggtctccttggtttcaatgccacgattntgagccacccttttacacatagcatacagttgtagaaaacccaaagccatcctggtgtgtggagctcaagagcccccatcctgctgtcgnnnnnnnnnngaagtcttcatccaatcagcttcctacntagactgggggacctccatnttctctgtgctctgtaggacccggaagacaaagaactaacctatgggtggctgccaaggaagatctactgaactgaggcaaatctcaacaaagtctttgtgcttcctggcatagaagagtatctgaatatcttcataagcctctgctcacttcttcacctttctgtactctgctgtgttaaaccgtgcagtcctgggaaggcaagggtggtagagaaaggaacaggaagagtctgctcagtcaggtgggctgtgaacttcagtacaggcaggacttaaaagtcctttgcagccccacaaagccagctccttccatgaggggcttcaacctgcccttctttgttatcctggagcaccttccaggggctgaaggacagaaagagccactgacaacttcagggccagtcagaaaagactgaggcagacacaagattgaggttaaggcccaggcccacgccttatcttcctatctcccaccagaggtttttggggtttgtgaatcaggaatgaatgatgccctccacaaaaagtgacttttctttcaagggcatgggcggtaagggggaggaaaaacatccctcagcctagcaccctgaagcagtggggtgaggggtcccagagggttcaaatggctcctgttccctttgctgcagagaactgactagttctaaaatggtcttcagtttatttcaccctttctttttattaaatgttaagttcaactgattagtatttagtgtttatatccaatttatcccnnnnnnnnnnnnnnnnnnnnncagcaggtgagaacaaaaacaaaatacccccaaaaataaagcagacccaattccttgccctttctccaaatatgacctttaaaacagatcacttcttggcaaactcctttcttgcttcactaaaaatgctcccctcccacccataagtcctggtcatgccagcctcctaaatgatgaaatataatatacctgccaagcttcccccacccaa

SEQ ID NO: 161887 - DNA, 1032 bp, Homo Sapiens
  misc_feature (108)..(149): n is a, c, g, or t
aataaaaaggcacctataaaacaggtcaatacagtacaggcagcacagagacccccggaacaagcctaaaaattgtttcaaaataaaaaccaagaagatgtcttcacnnnnnnnnnnnnnnnnnnnnnnnnnnnnnnnnnnnnnnnnnnatggtacaaaatggctgggggtgtggccatggatggagggaagagtaggctggcctgtggcgcgggtgggaggagaggggacggagagggcactcggcccgctgcaatctgacccctctctcctcagggcaggaaacacagagtcagacagtttgggggggtcttgggccaggggtggagggctcaagggcacagggcccaggctgaggcagggcgggcaaagcgcctggcaggatgaaggggcaagtggccccccaaacacagaggccctggccatggaccctgggaggtgaccggggtgagtcaggggcctgttgtcagccccagaggaagcgctggacctggccgatggtgggccgagaggacagcaccaggctgggagaagtggggcgagttccctttgtattacagctgccagtgcaagaccaggccctccaggccaggaaggctagggacgggtcctggtagaagacaccctgtctagaatggcccttggtcctggaggtggggcgcaaaaggcctcagccagggaactgccctgccacctcccgaggcaggaaaggaagtgagaaaaggagaagtttttttactcctggggccaaagtagggggacaaacacccagtcgtatatggcttcagctctgaccaaaggcggatagggagctctcctgggtaggagcagggagccaagggggaggcagtggctgtgcctgggtgggcacagacagatctggtacatggccctgagccctgggcagagggacaaccttgccggtgagtgggcaggcagagaggaggcggcaggatgctgtttccccgattccatcctcagggagtggagactggaggggaggtgcactgattcaggggaactgttctccaa

SEQ ID NO: 161888 - DNA, 1307 bp, Homo Sapiens
cgggcgagcggtggtttggacgccggcggagacgcgggcgagtggttagcaggaagaagatgagccttaagtctgaacgccgaggaattcatgtggatcaatcggatctcctgtgcaagaaaggatgtggttactacggcaaccctgcctggcagggtttctgctccaagtgctggagggaagagtaccacaaagccaggcagaagcagattcaggaggactgggagctggcggagcgactccagcgggaggaagaagaggcctttgccagcagtcagagcagccaaggggcccaatccctcacattctccaagtttgaagaaaagaaaaccaacgagaagacccgcaaggttaccacagtgaagaaattcttcagtgcatcttccagggtcggatcaaagaaggaaattcaggaagcaaaagctcccagtccttccataaaccggcaaaccagcattgaaacggatagagtgtctaaggagttcatagaatttctcaagaccttccacaagacaggccaagaaatctataaacagaccaagctgtttttggaaggaatgcattacaaaagggatctaagcattgaagaacagtcagagtgtgctcaggatttctaccacaatgtggccgaaaggatgcaaactcgtgggaaagtgcctccagaaagagtcgagaagataatggatcagattgaaaagtacatcatgactcgtctctataaatatgtattctgtccagaaactactgatgatgagaagaaagatcttgccattcaaaagagaatcagagccctgcgctgggttacgcctcagatgctgtgtgtccctgttaatgaagacatcccagaagtgtctgatatggtggtgaaggcgatcacagatatcattgaaatggattccaagcgtgtgcctcgagacaagctggcctgcatcaccaagtgcagcaagcacatcttcaatgccatcaagatcaccaagaatgagccggcgtcagcggatgacttcctccccaccctcatctacattgttttgaagggcaaccccccacgccttcagtctaatatccagtatatcacgcgcttctgcaatccaagccgactgatgactggagaggatggctactatttcaccaatctgtgctgtgctgtggctttcattgagaagctagacgcccagtctttgaatctaagtcagaggattttgatcgctacatgtctggccagacctctcccaggaagcaagaagctgagagttggtctcctgatgcttgcttagcgtcaagcaatgtataagaacttggatctcttg

SEQ ID NO: 161889 - DNA, 1346 bp, Homo Sapiens
ataggctagtacgaggctgggtgttaattcggcacgaggggcagccgggaggagcggcgcgcgctcggacctctcccgccctgctcgttcgctctccagcttgggatggccggctacctgcgggtcgtgcgctcgctctgcagagcctcaggctcgcggccggcctgggcgccggcggccctgacagcccccacctcgcaagagcagccgcggcgccactagttcaagctgaagaagatgtggaaaagtcccaatggaactatccggaacatcctgggggggactgtcttccgggagcccatcatctgcaaaaacatcccacgcctagtccctggctggaccaagcccatcaccattggcaggcacgcccatggcgaccagtacaaggccacagactttgtggcagaccgggccggcactttcaaaatggtcttcaccccaaaagatggcagtggtgtcaaggagtgggaagtgtacaacttccccgcaggcggcgtgggcatgggcatgtacaacaccgacgagtccatctcaggttttgcgcacagctgcttccagtatgccatccagaagaaatggccgctgtacatgagcaccaagaacaccatactgaaagcctacgatgggcgtttcaaggacatcttccaggagatctttgacaagcactataagaccgacttcgacaagaataagatctggtatgagcaccggctcattgatgacatggtggctcaggtcctcaagtcttcgggtggctttgtgtgggcctgcaagaactatgacggagatgtgcagtcagacatcctggcccagggctttggctcccttggcctgatgacgtccgtcctggtctgccctgatgggaagacgattgaggctgaggccgctcatgggaccgtcacccgccactatcgggagcaccagaagggccggcccaccagcaccaaccccatcgccagcatctttgcctggacacgtggcctggagcaccgggggaagctggatgggaaccaagacctcatcaggtttgcccagatgctggagaaggtgtgcgtggagacggtggagagtggagccatgaccaaagacctggcgggctgcattcacggcctcagcaatgtgaagctgaacgagcacttcctgaacaccacggacttcctcgacaccatcaagagcaacctggacagagccctgggcaggcagtagggggaggcgccacccatggctgcagtggaggggcagggctgagccggcgggtcctcctgagcgcgcagagggtgagcctcccagcccctctctggaggcctttctaagggatgtttttttataagccagatgtttttaaa

SEQ ID NO: 161890 - DNA, 1024 bp, Homo Sapiens
ttgtgcccctttgggttggcaccgactcttttaacaagcgtaaggcggcctggaacggcccctgctgtgaagccccgcccaaaccggctgacttggcgccctaccccatccatcagtggcgagccacccaaatgctgctcatctgtcccaaggctctttctcagagatatcaagtaatagtgcgaactcctcctctgtgagatcactgaacttggtgactccattctgagctgtgccacggtgcagggcctggatcttctgtgctcgcaccaatgttattgacaaagacggacaggcgcccaccgggcttcttcctttgacttcatatgtccggttataggtaatgacaaagttcttgaagattgaagccatcttcacaggcaagtcctgggacaggggatcctcattcaacagggaaatgactgagctgaaagtctcgtttctgttgtctggatggttttgggacagagaagaaatcatggctgagccctgagtgaaggctgacttgggctccccagcacctggaaccttggtgtccactgggccacagtccttccgcagcagcacgtgtcttccgagctcatccaggacttggaagctgcagagcagggttttcttggacacggggagccggcacaccatggggtcgttgcagggtggctcctccagggtggcctccagggagtacagcgacccctggcccgcccggcggacgcggccgcgcacaaggcccagcacggcccgcgtccccgcagcccggccgcggttgaacatctccagcgcgaagcgggtgggcgccagcagctccggggacggcggcccccaggcctgaaagctggcggctcggggctgggcgggggcggccactgcgcccgggagcagccccagcagcgacaggagctgcagccagggcgccatggcgagggcgaagccggcggcccggacccaacagacgctccaccgacccgccgggtaccgagcccgcgccagcggggcctgagcctcgtccaatcaccacccaggg

SEQ ID NO: 161891 - DNA, 1481 bp, Homo Sapiens
  misc_feature (1064)..(1073): n is a, c, g, or t
ttgggaaagcgcgaggagccgccgccaccaccagcgcagcagtcctggagctgtgaggagattcgggccgtcaccctgcctcccctgcgtcccgccaccggccgcttctgtcctcggacccattccaacaatctcgtaaaacatggtggattactatgaagttctaggcgtgcagagacatgcctcacccgaggatattaaaaaggcatatcggaaactggcactgaagtggcatccagataaaaatcctgagaataaagaagaagcagagagaaaattcaagcaagtagcggaggcatatgaagtgctgtcggatgctaagaaacgggacatctatgacaaatatggcaaagaaggattaaatggtggaggaggaggtggaagtcattttgacagtccatttgaatttggcttcacattccgtaacccagatgatgtcttcagggaattttttggtggaagggacccattttcatttgacttctttgaagacccttttgaggacttctttgggaatcgaaggggtccccgaggaagcagaagccgagggacggggtcgtttttctctgcgttcagtggatttccgtcttttggaagtggattttcttcttttgatacaggatttacttcatttgggtcactaggtcacgggggcctcacttcattctcttccacgtcatttggtggtagtggcatgggcaacttcaaatcgatatcaacttcaactaaaatggttaatggcagaaaaatcactacaaagagaattgtcgagaacggtcaagaaagagtagaagttgaagaagatggccagttaaagtccttaacaataaatggtaaggagcagctgctgcgcttggataacaagtaattcaacgcacgcacttaacagaaatgttaaactataacaagcaccatttgaggattaacaggaacatttttttgaagatttcaaacgaactcgactttcagtataattgtacctaaagtatttataaacagctcatcggagcctctatttgtcatagacttttgagttgattgttgggaccacataataggaccannnnnnnnnngtcttaaaattgttgtaaatctctgtatgcactttgcttttttattaaacgtactccaaggtgagtcttgactctttagtgtaggacaagattgtacactaacaccagcatggacctgcttttcattgtgtctgaaatgtgagccacgtagtgtcggcctgctgtgaagttaacattgccaggacgattcttctacagaaataatttcaatttttttcagtatttagtagtgaaagatattaatacattaatggtaatacatttctggtttaatataaattaaggatgttttctagttgtgcatgaatgctggcaacttagtaagttttgacaattgtttaaatatgtaatgttaagcttaggtttaaaaaagtaaagctggtaaactgggtctttgtcatttgcttt

SEQ ID NO: 161892 - DNA, 1130 bp, Homo Sapiens
  misc_feature (201)..(201): n is a, c, g, or t
  misc_feature (620)..(652): n is a, c, g, or t
  misc_feature (1067)..(1067): n is a, c, g, or t
aacaaaatgcatacacagctcaatgggtcactggaacaaacttgcttgactatattactgagcagaaacaaaacgaagcacaaacacctttcttttttgacatgtatctggagataggtaggaagacactacttggttttttaaaaaactgacctcccttaaggcctggtcatagaagtgtaaacaatgtaaatgaatccnaccatttcccagttgtcatatccatatctatgtcaacctgtgtattgtgagatttacacacatacctggccaatatacctgggaaaaggttattttatcaccagttacacttgagttcttggcaggcaggactgaggaagagtaatttgaaagaagttttacatcctatttagaagaaatcactagtatttccttaaataacaggttacaatagaaagatactgcctggaagttatcctttcactttggttcatttttagtttttctttatgatttacatagctgtttaattcatttgcttatagtacaatcctgccataaagtattaaagcacaagatacctattattccttcaacatctgcatttttcaagttttatactctacatccacagtacgtcagcagttcttgaatgtttnnnnnnnnnnnnnnnnnnnnnnnnnnnnnnnnntgcagatgtttataactacaatggtactaagatgggaaggagacaatgagagaagggataaaagcaaacatgttcatgtgcagggaatgtggttcaagtctttggatttaaaaacaagttccccagagaagctggcacttcctttgccctccaaaaaggacctgaaaagtcccaatccaaactttagaaaattagttatgagatgcaataaatgatgatcaaagcagtcagagggagaaggatgaatgtgtcttccatttagctagagactgtagcatagcctctttaggtgttggtggatcagtaaaaacgactgaagtaccagaagtgcttggaaggataggggtacaaagtaatgaccataataccttgtctaaatcagtagcagggcttcatggctaggaaacttttttanacagtaaaatgtcattaggatagatcactctctcaccaacattaaatgtggcagaattaacca

SEQ ID NO: 161893 - DNA, 1233 bp, Homo Sapiens
ctgccaataaatactttaatgagaaccgaggtctgtaacacatatagcaataaccaccctggcctatgccttctgctctagcccaagtctggggctaaccaattacatttaaccacatttggaaagcaggccgttttcaatgtcacccatcagtatccatcttcatagaagataccaatctggggccagagtctcaatgttaacactttctctcggggaaaagttaacatggtaacacaaacatagaaataactttgaaccaccccactgttcttccatcaggaggcccttaggagaccaacggcttggtaaacacttacaacattgtcaaaatacattagaacacgggaaaagggcaaaggagtagaaaggctggcagggctgggctcacatataattcagttcttagatttgaagcctctttagctgctcgtatgtaataaaaaaaatgatgttccagggtccaagcgaagccagtttggccaaaatcctttatagagtgcaaaaaagccctcatgtttccacatctttaaaataccatcaacagtgcccttatagagatccacatgtcccacgattgccctctggttcatcatgcgagttcgaaccacatcaaccgggttggaggccagagccccagccaaaccacatgtaaagctggaaacgaagtgagttaaaattgtatcgcccatcattcctgacaatattaaatgcttcttagtaatatcatagactggtagctctactcctacaacgatggcagcacgctgagcagttggaaccacacccctccacagacccctggtgccttcttgttggtatatatcgataaagcttccaatcatgctcccttggaacaagcttccttgagcctgcattcgaatcttctaaacgttctacgaataagcgcttcaagctttggtaaatcccaattttaatggtgccatatgatgcttgtcttagcaacgcaggagcaattcctgaatagagagccaatacaccttcctctttacagatgcgaaacagcgcatggaacatccctctatattttatctctttgaaacgggcatcaatgctttggccttgaacctgaagtcgtgttttggtaaggtccacagggaaagtcccaaactcagccacgatagaggcaaggccgccatatacaaagggtttccaattcagaccagacatctcatgacttacagtggtacttttctggtgctgctcggccaa

SEQ ID NO: 161894 - DNA, 842 bp, Homo Sapiens
gtgcgagaaggggcgtaactgatttggaaaccagaggaaaggcgctgttttcaccgaattagaatcgcgggaaaatagagaagagttgtttgaaggtctcgcgagatcgagtgagtacggctcgccaagttggagcgctctcgcgatagacacagcaactattcagctgcgaggggacgggagaggtggtgagcactctcgcgagatttgaaggagcggcggaggccagagggaggagaggaccggaagtccttcatctcaagcatccaatgctgaaagcggcctgattttctctaccggaagcccttttccagaggctgggaacacggcccacctagcaggaagtcccacctccttgagctccgccacccttcccgaagtttttctgtcacctgtgttaggctccgtcccctttccgcgttttatccccgtaccagaaaaggatacatttagtgcctcccacccagctccactaaacgggacgcgcgggctcctcagcctctttcctcccgctgccatgcaccctgcagccttcccgcttcctgtggttgtggccgctgtgctgtggggagcggcccgacccgggggctcattcgagcgacctcggaccacaatgccagcatggactttgcagaccttccagctctgtttggggctaccttgagccaggagggcctccaggggttccttgtggaaggctcacccagacaatgcctggcaggcccaatggaccacacagccccgagcccgggtacactggggtcagacctcaattcgcgcctggttcgacagaatccgaattgcaatctaagactagaaaggtcctaaatgcccaagaaggg

SEQ ID NO: 161895 - DNA, 933 bp, Homo Sapiens
ttggcaaattttggtttttagcttttacattttattatcttaattttataaatgctaatatttcttttgtgataagttatagcatctcataaagtttgttctatttgaagttttttagagtacttgagaaatgaatttagtctgcaggtagtaagtatgctactaaaatacgttagatctaaatccttttatttggtataaaaatgcaatattgagaatcaaaacttgtttttaagagaactatagattctacacaacctgatttcaagtaattattcatagtatttatagttgtcttggcaaagtgattgtaaaattctgtaggacctattcacacttcttccttcttccatatacttctctggttttccccatagttcccctataatttcaagtttgttgaaacctgttaattttagtgggggattagaagaaaaacttggtggtttcttagcatgatggtgtatgtatgtggtaatggaaagtctgtaaaagtaaatatagtgtagcaaaaaagatttcactgagtattttagatactagtgcaaataaagatagaaaatcttgatcataatgtcttaagtttgggaactgtgatattaagaaaagaaattcccttctagaggtgctggccaaaaagccttttgggctaacttaagtattaaatttatatatttaaataattatattttaagttgtagaggattttcccaaggattttatgcttacttgaatgttctttgaatgttcagatgcatatcctaactggatgcttctcaaggccttactgcatatttgtgttgcatatttatgttagttgcaccagggccatttgtagtttgggcaaccgaatgccttattggaaaaaaggcattgtggtttcccctatgatctaaattgttacattttaccatttcattccgaagttggttt

SEQ ID NO: 161896 - DNA, 747 bp, Homo Sapiens
  misc_feature (219)..(233): n is a, c, g, or t
  misc_feature (642)..(685): n is a, c, g, or t
gttgttggtttaatttattactgtttgacatccagtgacactgacataccctcgccgggcccccggcgagtctgacctgtccaataaaatacagtaggaggagtggacggtgacgcacatgcatccacacttaactacagtgactccaaactgcggcgcaacagtactgccagcaacggaaaagaaaaacaggtatcgtgtgttccccaattcggaatnnnnnnnnnnnnnnnttaagacagttaatgctgttacagatgctactgatgccaggacagggccagtcacaaacagtcctacagcttctctgctgtataaatatggaagattcttttgtttatacagttttactccaagtctgaaactacatctgctgctacccgttactgctaaggcctatgccatctcagctctggaacgaggggctcggggtcgagactggaatgtcggggctcagtcttcttcgctgccacttcctgagcggtcctcctcttgttcctcctcactgtcatcgtcactcacgaccggcttggctcgggaccctcggctcggccgccgccggccgcccttcagccggtcctgtgccttctccttccggccaagcttgatcttcactttgacggaccgagattcggattcggnnnnnnnnnnnnnnnnnnnnnnnnnnnnnnnnnnnnnnnnnnnntcactgtcatcctccttctcgattttctgccgcacgctggtgaagaccgactgcaagacgat

SEQ ID NO: 161897 - DNA, 690 bp, Homo Sapiens
  misc_feature (79)..(140): n is a, c, g, or t
  misc_feature (621)..(621): n is a, c, g, or t
ccgcgaagctgcaccaactttatttgcaaaaagaggctccaagcgcacggagaggatgggggctgcaaggtccccaccnnnnnnnnnnnnnnnnnnnnnnnnnnnnnnnnnnnnnnnnnnnnnnnnnnnnnnnnnnnnnngctacacgatcccgaactggcagatgtagggcagctgatcgcggcagcgcttgtcgaaccacttgccgttggccgcgcctgacaggaccgcgcagttctcggtcttgccgccatcgggttgcgcggtgatctcagtctcccagttcttgtaggcgatgcgggcgccggtcatgtccacccaggtgccctcggccgccatgtcgttgaggcccagccagatctcggcctcgttgcccacgctctggcgcaggtactcatacagggcgtcgtttctccgagccagtctgaggggtgcccagggtgcccccgcgcgagatgcagtcctcgctggcctcgtggaaggtcttcgtctgggtgaaggccagaaagcatttcatgtgcaccttggtccccttcaggcagaccgtctgcagggcctgctgctccttcagcagggccacctcctgggccagggtgtccagacggctcttgagctcctcanacatctttgtgttcacaacatctttcttggcatttacaatcttcttgggcttctgggttggtggctcgg

SEQ ID NO: 161898 - DNA, 1118 bp, Homo Sapiens
tgatgctagggggttgtctgagtcccgtttcgtgcaagaactagcgaggtggagctgctgctagggctgcaataatgaagggcaggatgaagtgacagggttcacgaatcgctgtgagggtgggactgtctactgagtagcctcctcagattcattgaactaggtctgtcccaatgtatgggatggcggatagtacgtttgtaattactgtggccccacagagagagcgtcgacgctctctctggggggggagtcaggtgctgggagctcatggtgggcaccggggcgatgggagcacttgccaggggcagggagtgcagaggcgtggaagctgcagaaaacaagggccatgtccctctcaagatgaaagggacgtggtaggcgtgctacacagtcttgcaacgaccctcaaaagtttctgcaaaatgcacatttccaggccctgccctaacccagctgggagatccctaagtgctgcctgcttggcatctgtgacggtgccaaggcagggactgggagggaagccgcgtgtcccagccctgcctgcacccaaggatcgaagccccagacacatagtgcctggcagagggaggatgggatgaggaccttggacccacgtctccctccagacccacaaccatgtctaaaaggagaaggggggagcagaatcatattaatttggacccatgggatgagtgttttattcatgctgtttccaggaagggatgtcagagctggaccagtcgaaacccttggaggctttttttgcagttggccacaggggcgttggaggcctgcttatgggtcctcgatgtcgagaaactcctgcttggggggcgccgcgccgcggtaccacgcacaggagccgtcacttctcttgatgcaggcgaagaacttggcctggtgcccgttgatgttcttctctgtgacccagtccatccagaggcactcgtccggggaggagatgtagcacgggatcatggggcagcgcgtgatcttgcactcgcagcccatctggtacctgtggttcaggctcttcttctgggtggtgctcagggtgtcccagggcacgatgaagtcacagagggtgatgtgcatcttgccgtccccctcgccaa

SEQ ID NO: 161899 - DNA, 1133 bp, Homo Sapiens
ggacccctcaaagcactagagcgcagatcttcggacagaggaagagatggcgccagagaccaggctgggcactgggggtccctgagttccaggcgccaacacacgtcctgtgggtcaaggcccctcctctggggacagtctaggtcacggagaatgcaggctgggagtgtaccccacctcggggacccaaaaggagtccatttctagcctgccccccgcaaacagcaggggaggggcctggggtcctggctgggggatcccaggcctgggcccatcctggcttgaccccttgtcccaggaacaagaagctgaggagggacgacagccaggcccagagtgactcacaaggacatccaaagaagggactggattttcagagggaggtgacttggtgactgagaggcagcagaggccaaagcctgaccccagaccctcagggagggcccacccaacctgtacccctcaggagccccgtccggctccccaggcaaccactgaggacctcggggtggcctgtagaagacagaacccagccccattacaccccttgttgccgctctcatccccaaccaccagagggacagggaccagagggagacctgtgggccaggcgggcaggagggaggcaggctggggccgcgagaaggggatacacaggcccataaaacctcaggctccccataaccctcactcagccatctcagtcactcactcccagcatcccccaggatgggggtcccctccttcactcaggacacttcccctccgcagacctgcacgttctgggcctttctcatttcaccccaggcctgcccaccccatgaggcaccccctaaatctcatctctccacccagcacccccagcctggctccagcctgaagaccccctccttccccttccctccagaacagtggggaaagcgaggctcggtccacccctaactgcggaaggagcagggccaggagggcagcagtgctccctctcccggtcctggcccagccagctcctgggtgagtgggcgggaacccactgggctcacaccagctttcacctccctctctccaggaaggatggcagcacccatgaggggatggaggccacagaaggacaggaagggaggggctttccccaa

SEQ ID NO: 161900 - DNA, 1004 bp, Homo Sapiens
  misc_feature (571)..(642): n is a, c, g, or t
tgtggctggttgatgttcacgtgccggcaggtagtctcggaccgcactagaatgttctgttgaccatagttctcgctgtgtgcgccgtggcccggttgatatttgttttgtgccgccggcatggtagggtcggatgtgtcagagatcgcttcggttgtgttgtctaatacttttaggagtgcaattgtgtgaaggcgcgacgtgagagggttgcgggggcctagggaggaggagtaggttttggtataccgtgaggggcgttgttttcggggtgcagatttttggtaggctggtgtacctccatggggggcatccccgtcggtcgtatggcgaaatgaacgtggagagggtggggctctccgcttggtagtttgggccccgagggcaaaggggcagggtggcaacaggagggttcacaaaggatcgcccaggtgggtggagcgcaggggacgtccggagacgtcagagaggtcttcggtttttgtgggttgtcggtaagtttaacgtagtgagcgaggcgacccagggagggtcaggttggtgtgatcatgcgagaagatatacaatggannnnnnnnnnnnnnnnnnnnnnnnnnnnnnnnnnnnnnnnnnnnnnnnnnnnnnnnnnnnnnnnnnnnnnnngttgatctccaatacaccccatggggggatggggaggaaagagaagattgaaaaccccaccccactcccaaaaatacccacattttactgtggtctctctcacattacatctaatttccttcctatcagatgagttttaagactgcccaactaaaaactatcatgggaaagaaactgcaaatgaagtcaaggagcagtgaaaccacccaatggcacagatgccattacctcaaatagaggtgggagacgaaagaaaatgggagatgattctcaaagggagagcaaggaccaaacatctgggaaatgatgggaggcagtgactcaaggtcagaataactccatcagaggtgttctaagaacat

SEQ ID NO: 161901 - DNA, 687 bp, Homo Sapiens
  misc_feature (118)..(136): n is a, c, g, or t
tttattagcacaaacacatttatttattaaccaaagggatgatcctaattaatccaacacactttgaaatagctgcatgtaaaatgtttatgataaagataattgaacacagtaatgnnnnnnnnnnnnnnnnnnncagtatggagatttgctcattgaactgagcttggtcattctcttaattaactcctgtccaaagtgatgatggaatttttattctactttttcatagatccgagtacaggtgacattgttcatgacacactccacccactaatttcccatctttcaattttcttgttattgtgctttccttcccatcccactcctgatgctgaaccaatgcaccatctgtaaagttgcagacagtctgagtttttctgccatcagctgtggtttcttcaaacttctctcccagggtacaagaaaactgtgttgttttcaaagtgctctcagtttttatggtgaggtttttaccatcacaagtgatgatacaatctggattggccattgcgcccatttttcgcaaagctattcccactcctagctccttcatgtattcatcaaagcctttgctgtccaccaggcgccatcttccttccagctgctgaactgtggccatggtgggtgcgggcgggctggcgtgcagagaggggtctgcgtcggcgtggcagcgtgctgtgtccc

SEQ ID NO: 161902 - DNA, 913 bp, Homo Sapiens
agagctcatctgcaagtgtgtgctggactccaaggacaatgacattcgcatccggacccgaggttcggcccgtgaaggagatggcccgatcccacgagtacctgagcatcgagtactcagaagaggaagtgtggctcacgtggactgacaagaataacgagcatcatgagaagaatgtgaggcagctggcaccaggaggcgcgggccggcgacgcccatgactagaatgtgctcagctactacaggtaccatgtgaagctctttgcccgcatgtgcttggaccgccggtacttgggcatcgacgatatctcgcatcagctgggtgtggacctgattttcctgtgcatggcagacgagatgctgccctttgacctgcgcgcctccttctgccacctgatgctgcacgtgcacgtggaccgtgacccccaggaactggtcacgccggtcaagtttgcccgtctctggactgagatccccacagccatcaccatcaaggactatgattccaacctcaacgcgtcccgagatgacaagaagaacaagtttgccaacaccatggagttcgtggaggactacctcaacaatgtagtcagcgaggccgtgccctttgccaacgaggagaagaacaagctcacttttgaggtggtcagcctggcgcacaatctcatctacttcggcttctacagcttcagcgagctgctgcggctcactcgcacactgctgggcatcatcgactgtgtgcaggagcccccggtcatgctgcaggcctatgacgaccccggtggcaagaatgtgcggcggtccatccagggcgtggggcacatgatgtccaccatggtgctgagccgcaggcagtccgtcatcagtgacccagcctgtctgctggggccagtgctgctgagcgctggacaaa

SEQ ID NO: 161903 - DNA, 1055 bp, Homo Sapiens
aaccttgggaaaatcttttattagggaggacagcctgcaaaatcctccctttaagagcccaggccagcctagaacctccagaccacagaaggggagtcctggggacaggactggtgtagacaggcatctccaccgccccggttagccagtacctaacacccactcctgccctcggccgatgtagcaaaccggggaggcttttgtgtggggccggggctgcggccatggcagccaccctccagctcccgggggctggggaagacgctggggtccccgtggaggctggagcggcgttcaggtcctgcggtcactcggcgtgctcctgcacctcttccccacgcagggcctgcagccggctgcccacagtctgctgcacggcctcccagccccttctgcatccagctcccgcagcagcagcaggatggcagtcaggacgttcggcacactcggagaatctgagcagaggagccccgcctgtggacgcgtgtgtggcacctcttccacgtgactcctgttgccctcagcccagcagggcccgggcccacattccacagaccaggacagcaggagaggctgaggggccaggacggctccgtgcggggcacgtgttacacgtgtgtgcgcattcacagacccgcacacgcagctccccctggggcacagctcttcaaggccctgtgaggctccatgctccctccccacggggccctgtgaggctccatgctccctccccacggtttctgtgcagtgggtgcagtgggcagaggcagccgcggcccctagcggcccgccactcaccctgcccctgtggctgctcgaggcatccctggctgagagggaaggaaactggccccgggaaggcggcttcaggccacgttcatcctgggcgccgctgctgagagggagacaaaggcgtgtgagggtcagggggctcgtggcaccgggggggcctctgcaaaccctgtctgcgggtcgcatccaagcaaaggaggggctcatacaaatcccacctggcacacgggggcaagagaagggaggcaactcctgggaggtca

SEQ ID NO: 161904 - DNA, 1439 bp, Homo Sapiens
tgaggacacgtttcacattttatttacattttaagactaactttaatctcaaaatcacatatccatacacctatttcctttttgttgacttcacttaaacttaaatgcatggtttgttaaacaaagactgtaaacaaatatttaccatgtctgttacatgtaacacacaagaacagcttttaacaggaattcatcaactccccccaacattttttattataaatacaggtatcaaaacaatcctgaacatatttttgatactactagtagtcagcacccacattgcttcaaaaattaacacatctgtgacaatattcattgtacctgctactttttaaacaatttcaactgcagctctctttcactaagtaagatgggtaaagcatgccatttctgttttcttgagatttttactttttagaaacacacatgcttccactgccatctgacacttctccacacgctttcatcttgtaaacctgaattctatttcgagtactccaggtttatgtttaaatgacagtgcctttcaagagaaaaaaaattgtgctgcatttttcctcctgttacctgaaaacataatgggtgtacatatattaaatatattcttacaaatgtccaggtcatgtttaccagctggaattcttttacttaatgtgtattttgcattgtgatatttaatcaagacattaacatgagtagaaggttgttgatttaagacaagtttgagatccactaaaattaattgttgtatgtttttccttctggtggcctgtggaagcttcatatttgtctttggacatcatttagacgttcttatgctcttgaagtacaactttaatgctatatgaattttgccattcttgctaacactggtatgctccgggcatccaccatcccactgtaattattttattccgttcatattaattttttgttacaaatctaactgacggaggagcttctgggtatttaggtccacattctactttcaggctatatattctgttttcataatgttgtcttttctcctctctatctggaatgttctccatccccatcaccaccttctgaaatcctaccagtcagtcctttagggatcattccaaaggcaacttcctccactgttcagccttcctcaattattccagccttggtggcccaataatcatgcctgtccaccttgtaagtgtcatatcttcatcatcttcaaggccccagctaactgtaccgtcgcctactcctttttgtccttcttcaagttcttccaacaagcgaaaattacgaggaactttaactcctgtggagaccgccatcttctcctgcagcccccccggccgtaatggccgaattcccgggcatatgtccgcaccgtcgactgattaaacctgtcggtatatactgtatggcgtatatcgaaggttatggcggaccgcttc

SEQ ID NO: 161905 - DNA, 1012 bp, Homo Sapiens
  misc_feature (69)..(86): n is a, c, g, or t
gttaccaaaaagagtgttgaagtttatttattatagcaccattgagacattttgaaattggaattggtnnnnnnnnnnnnnnnnnngcatttgaattgtatttggtggaacagcaaaaaaagagaagtatcatttttctttgtcaaattatactgtttccaaacattttggaaataaataactggaattttgtcggtcacttgcactggttgacaagattagaacaagaggaacacatatggagttaaattttttttgttgggatttcagatagagtttggtttataaaaagcaaacagggccaacgtccacaccaaattcttgatcaggaccaccaatgtcatagggtgcaatatctacaataggtagtctcacagccttgcgtgttcgatattcaaagactgttttgctccattccccagtgtgtttcgtgcaaccatcctccagaactgtgtaggtgaatttgctatttccttcagccttgaattcaccttcatttgaccccatcagcttcagggccttctttacatttccactggcctgatccatgtatgcaatgctatttttgcagtgatatgtgatgttctgggaagctcggctggagagaagtcgaaggaatgccagctgcacatcaaggacatcttcaggaagttcaggattgccgtagctaaactgaaaaccaccatccatggactctccaaaccaaacgtgtttcttctcagcactagaatctgtccaccagtgtttccgtggaacattcaaaggattggcacttatgcatgtttccccagtttccatattacagaataccttgatagcatccaatttgcatccttggttagggtcaacccagtattctccactcttgagttcaggatggcagaatttcaggtctctgcagtttctagcggggtttttacgagaaccatcaggactaatgaggctttctatttgtccattaacagacttgagtgaagtcataatctcatcggtgttgattttgaaatcccaa

SEQ ID NO: 161906 - DNA, 257 bp, Homo Sapiens
  misc_feature (25)..(25): n is a, c, g, or t
  misc_feature (72)..(96): n is a, c, g, or t
tagaaattgagatgcccccccaggncagcaaatgttcctttttgttcaaagtctatttttattccttgatannnnnnnnnnnnnnnnnnnnnnnnngtggatggggacttgtgaatttttctaaaggtgctatttaacatgggaggagagcgtgtgcggctccagcccagcccgctgctcactttccaccctctctccacctgcctctggcttctccagccactgctctcctacctctctcctctgaaaccctcctc

SEQ ID NO: 161907 - DNA, 1111 bp, Homo Sapiens
  misc_feature (202)..(202): n is a, c, g, or t
  misc_feature (318)..(368): n is a, c, g, or t
aggtggtccgcggcggcgccattaaagcgaggaggaggcgagagcggccgccgctggtgcttattcttttttagtgcagcgggagagagcgggagtgtgcgccgcgcgagagtgggaggcgaagggggcaggccagggagaggcgcaggagcctttgcagccacgcgcgcgccttccctgtcttgtgtgcttcgcgaggtanagcgggcgcgcggcagcggcggggattactttgctgctagtttcggttcgcggcagcggcgggtgtagtctcggcggcagcggcggagacactagcactatgtcggaggagcagtnnnnnnnnnnnnnnnnnnnnnnnnnnnnnnnnnnnnnnnnnnnnnnnnnnncgggcgagcaggagggagccatggtggcggcgacacagggggcagcggcggcggcgggaagcggagccgggaccgggggcggaaccgcgtctggaggcaccgaagggggcagcgccgagtcggagggggcgaagattgacgccagtaagaacgaggaggatgaagggaaaatgtttataggaggccttagctgggacactacaaagaaagatctgaaggactacttttccaaatttggtgaagttgtagactgcactctgaagttagatcctatcacagggcgatcaaggggttttggctttgtgctatttaaagaatcggagagtgtagataaggtcatggatcaaaaagaacataaattgaatgggaaggtgattgatcctaaaagggccaaagccatgaaaacaaaagagccggttaaaaaaatttttgttggtggcctttctccagatacacctgaagagaaaataagggagtactttggtggttttggtgaggtggaatccatagagctccccatggacaacaagaccaataagaggcgtgggttctgctttattacctttaacgaagaagaaccagtgaagaagataatggaaaagaaataccacaatgttggtcttagtaaatgtgaaataaaagtagccatgtcgaaacaacaatatcagcaaacagcaacagtggggatctagagaaggatttgcatgaagagctcgtggaagaaggtggtggccccagtcaaa

SEQ ID NO: 161908 - DNA, 307 bp, Homo Sapiens
ttatcacacaacacaggaagctttattcatccgctgctggtccaaagagtgggtcgcagggtcactcactttaatatgctgtcatcttctgccaattctctggcaatccgtttcagttcatcctgcttcttcttctcttctgctgctatcctcctctcctcttctgcccgaggttttaggtaattgtagcgcgtggctccgtaggccacaccgaggaacagggcggagtagcggccgagcttgatgagcggagagacctgcaccggtggcaccatcttgtccctgacctccgcaccggaagcacccc

SEQ ID NO: 161909 - DNA, 1067 bp, Homo Sapiens
tgggctagtgaggccgcgggttagtcggcacgagggcactgccggatgattaacggtgcgactcatgaaggtgttcgtcacccgcaggatacccgccgaggctgtgaggtggagcagtgggactcggatgagcccatccctgccaaggagctagagcgaggtgtggcgggggcccacggcctgctctgcctcctctccgaccacgtggacaagaggatcctggatgctgcaggggccaatctcaaagtcatcagcaccatgtctgtgggcatcgaccacttggctttggatgaaatcaagaagcgtgggatccgagttggctacaccccagatgtcctgacagataccaccgccgaactcgcagtctccctgctacttaccacctgccgccggttgccggaggccatcgaggaagtgaagaatggtggctggacctcgtggaagcccctctggctgtgtggctatggactcacgcagagcactgtcggcatcatcgggctggggcgcataggccaggccattgctcggcgtctgaaaccattcggtgtccagagatttctgtacacagggcgccagcccaggcctgaggaagcagcggaattccaggcagagtttgtgtctacccctgagctggctgcccaatctgatttcactcgtcgtggcctgctccttaacacctgcaacccgagggactctgcaaccaggactttcttccagccagatgaaggacaccaagctgtgttcatcaacatcacgcaggggcgacgtcgttaaaccaggaacgacctgtaccaggccttggcccgtggctacgattgcagctgctggactggttgtgacgagcccagaaccactgcctacaaaccaccctctcctgaccctgaagaactgtgtgattctgccccacattggcagtgccacccacagaacccgcaacaccatgtccttgttggcagctaacaacttgctggctggcctgagaggggagccgatgcctagtgaactcaagctgtagccaaacagtagagatgggagggccgggaagcaaaccgtgccctggtattgtc

SEQ ID NO: 161910 - DNA, 213 bp, Homo Sapiens
  misc_feature (159)..(168): n is a, c, g, or t
ggcacgagggtgagctgcacactcagctacacaagtttttagactgtgcgatggcttcaaggctggagttaggtaaaagcaattagcagaggcgttatctatgtgattatgttgcttccttgtcattatgttgaattttatagccctttcaatgaaatnnnnnnnnnntttgtatattaccaatgtttttagtttaaataaagagtcaccctt

SEQ ID NO: 161911 - DNA, 1241 bp, Homo Sapiens
  misc_feature (25)..(25): n is a, c, g, or t
  misc_feature (57)..(74): n is a, c, g, or t
  misc_feature (957)..(1020): n is a, c, g, or t
ttggctaaaattaaccctcactaanagggaataagcttgcggccgcatacgcggtcnnnnnnnnnnnnnnnnnncttcaaatgcatttatcctttagacgtggcgagaagccggcgacatcatcatttactccaaggtgacaggatcaggtttccatgcagcattttccacctgccccgaccatgaccacagccacggaccctctggaaagtcaagactgggagaagctcaagggcggcccaggctcaggcgacttcccacccacgatggggcccaccagcccgacccggagagtgtccgtgaagcagccggccccgcaaggacggctttggccaccaaccggaggtgggcctcatcctcccagatccatggagtccttcagaatcgtgcctcgctccagtgtcccacatcagaggccatgggagggcgcgggagcctcagggttcctgccccatctgcccagagcctgcagccctgaccaaggagggttccccatacacgggcagaagctgtggacccagggagcctatcccacgccgtcctccgcatgtggcccgtggtgcaggaggggccctgggcaaaccaaggtgcggcccccaagtcccccatacccaggggtcaccatgcctcagctggcctcacgcccgctccttcccaggggtcaccatgcctcagctggcctcacgcccgctccttcccaggggtcgccatgcctcagctgggctcacgcccgctccttcccagggggtcaccatgcctcagctggcctcacgcccgctccttcccaggggtcaccatgcctcagctggcctcacgcccgctccttcccaggacccaataatgctgccctttatcaacccccagagcagctcccgggccacaggtggggcctcctccagtcagaggcacctgtgccaggggctagggaacatggatctatgccagacaggctgaggnnnnnnnnnnnnnnnnnnnnnnnnnnnnnnnnnnnnnnnnnnnnnnnnnnnnnnnnnnnnnnnntccccaggcagctgggtcagggcatccaggagagcccagcttccaacaccactcagggtgggcggccgtccccctcccgggaaggtgcccaaagccctggacagtcacctcgaggtgactgtgggcagaaactgggcttggcctgccctccctgccagccaccccacccaggcctctccacaactggtctattcggggctcccaacttttttgtacaaagt

SEQ ID NO: 161912 - DNA, 603 bp, Homo Sapiens
  misc_feature (182)..(204): n is a, c, g, or t
  misc_feature (502)..(543): n is a, c, g, or t
ctcacaaactggttgcatttgttgatttatttttccatccttttcaccagtaaagattatcatcgtttatttttgtttttaaagttgaaaacaaaaaagaggagagaacagagttatggtatgaatgtatgtaaaactatagagaactacagtaatatgtactgtggttattgctgtcttcnnnnnnnnnnnnnnnnnnnnnnncaacaacaacaacaacgaaaacaaccggtaggcaactcggaatctgaaggaatcttgtctgacaactgtgctatccatgtgggctacggtgtgacagtggcggtagagaggagactccggctggcgaccggggactggtggagtggggtgagcgggcacagggaagctggggtccccttcccctcggaccctccccaccttccctttccccatccaaaaggatttcaggagaggaggccagagtctgtgaaatgactaaactatatactccattagaaaaccaagaaagtatgtttgnnnnnnnnnnnnnnnnnnnnnnnnnnnnnnnnnnnnnnnnnngaccgcgtatgcggccgcaagcttattcccttgtagtgagggttaattttagcttggcac

SEQ ID NO: 161913 - DNA, 994 bp, Homo Sapiens
  misc_feature (35)..(35): n is a, c, g, or t
  misc_feature (67)..(102): n is a, c, g, or t
  misc_feature (706)..(706): n is a, c, g, or t
  misc_feature (780)..(782): n is a, c, g, or t
  misc_feature (878)..(880): n is a, c, g, or t
cgggcagtgccaagctaaaattaaccctcactaanagggaataagcttgcggccgcatacgcggtcnnnnnnnnnnnnnnnnnnnnnnnnnnnnnnnnnnnncttaactctgcttctgtcttgctctcccctcccctggctttcctctctgcctgctcctgtctctccctggggtttctggtggtggaaaagctcaagcctttgcgaagctaatgacctgcctctgtgcgaagcttacgggaggctggacctcgacacaaactctgctgatggcctctcggcccctctgctggcgtccccggagcccagtgctggccccctacaggtggcagcccctgcccactcccatgctggtggccctggccccactgagcacgcctgagcctccggggccacgcttcgttctcaggaacaaaacctgaggcagccctttggatgccctcacagccttgcttctctcagcctaggttcccatttggggacttcaggaccccagagccactaggacttccttgggaagcccgttagcccaggggtgggtcccgccaggacagtagggaaacagttgtttccctagccatttccgaatagcccatcattccgagtcatcatctctgtttgctggcttcctggccagccaggtggaagaaagtttccaagctaggtctggcccgttggggatctccgcagtggggcaggagggtgncctgatttcggggagtcctgacccgagccctggttgtacagttgggaggggctctgagcccggttggggcaggnnnggttcccccattcccgaggccagcgttcctgggcagagccccatccactggttccttgcccctgagccccatatgtcctgggccctggggctgaannncccgaaaaggccccgggtgaacagccggtggcgcaacgcatggggaaagcctaggggggaatcgcatcctgatttttgcccggtgggatgtgaccttggtgtacagcgcccggc

SEQ ID NO: 161914 - DNA, 486 bp, Homo Sapiens
  misc_feature (70)..(147): n is a, c, g, or t
acttttgctttatcttcaatgaacttctttccaaatgccccaaatctggcaataagttattatttttaannnnnnnnnnnnnnnnnnnnnnnnnnnnnnnnnnnnnnnnnnnnnnnnnnnnnnnnnnnnnnnnnnnnnnnnnnnnnntagctgggactacaggcatgggccattccacccagctaaccgattaatatttttactgttcctttttaaagctagctccatagctggaatattgcctgtgttggatcctatttgctggattcatgtcattctctgggtttgtgtactccttcattttgctggagtattttctccaacagcttccctaaaaagggcacatggaggtaacccctgagtctttgcttgtctaaaaatgtattattttaccttcacccttgattatttgggtgaatatagatttatcagttgaaaataactttctagaattatgaaggcatggttccattgttttcagattcc

SEQ ID NO: 161915 - DNA, 1092 bp, Homo Sapiens
  misc_feature (186)..(233): n is a, c, g, or t
  misc_feature (321)..(395): n is a, c, g, or t
ggcctcggcggcttcgggctgcagcactgctgcccagcgcccgcggccgggctggtcggcgcgcctcgccgcttatctgcgctgtttggacagcgggcttggaaaggcaggcggccccgtccccgcctgagtcaacaggcagaccccgggccgccggactatttctgtcttatcagtgcaggaatnnnnnnnnnnnnnnnnnnnnnnnnnnnnnnnnnnnnnnnnnnnnnnnntgtgggccgtgggccgtcagggcagccctgaaggggccccctccccactccgctcgagtagaagtgtgagagagcccagcaggactcnnnnnnnnnnnnnnnnnnnnnnnnnnnnnnnnnnnnnnnnnnnnnnnnnnnnnnnnnnnnnnnnnnnnnnnnnnnccgctgagcccaccccgatggccgcggacgaagttgccggaggggcgcgcaaagccacgaaaagcaaactttttgagtttctggtccatggggtgcgccccgggatgccgtctggagcccggatgccccaccatggtgtgcgccctatgggccccccgggctccccgtacatgggcagccccgccgtgcgacccggcttggcccccgcgggcatggagcccgcccgcaagcgagcagcgcccccgcccgggcagagccaggcacagagccagggccagccggtgcccaccgcccccgcgcggagccgcagtgccaagaggaggaagatggctgacaaaatcctccctcaaaggattcgggagctggtccccgagtcccaggcttacatggacctcttggcatttgagaggaaactggatcaaaccatcatgcggaagcgggtggacatccaggaggctctgaagaggcccatgaagcaaaagcggaagctgcgactctatatctccaacacttttaaccctgcgaagcctgatgctgaggattccgacggcagcattgcctcctgggagctacgggtggaggggaagctcctggatgatcccagcaaacagaagcggaagttctcttctttcttcaagagtttggtcatcgagctggacaaagatctttatggccctgacaaccacctcgttgagtg

SEQ ID NO: 161916 - DNA, 911 bp, Homo Sapiens
gccccgtgggctggaacgcgccggaatctgaggtgtgagtagagcctgggggagagtggatccaggtgaagggggcagaggactgggagttttcgtcctcttgaataagaactcgacaacagagtgggaactttctgtcttgtgatccattgcctggtgagtcacagctcacaccatggatttaacctgagagcttcaacttctgctttggccctggagttcccatgccctggtgtcttctaccagttcttaggtagggttttgtatccagagagggttcagctttctcccgtgggctgggggaagaggtcaaagtagaactcaggtaccaaatttgaaaggaaacactcagaaaaaacttctgagcgcagagcggaaaacaccctctcagtccccaccaaagagaaaagctttgggttctaaatttccagtttccattaagggactctgggactggacatttctgaaaattaatgacctgtactgagtaatcctcctaacacactgatcatcaaaaaataacctgtaatgagtttaggctttctgtatttgtctgaatgctttcacgggagtgtgtcgcactggagcacagaggacactcgatcgtgcggcgcgcagggcgggggggccgccgttgcctccccgcgggatggctggcactgtgctcggagtcggtgcgggcgtgttcatcttagccctgctctgggtggcagtgctgctgctgtgtgtgctgctgtccagagcctccggggcggcgaggttctctgtcatttttttattcttcgggtgctgtgatcatcacatcagttctgttgcttttcccgcgagctggtgaattcccagccccagaagtggaagttaagattgtggatgactttttcattggccgctatgtcctgctggctttcctt

SEQ ID NO: 161917 - DNA, 741 bp, Homo Sapiens
  misc_feature (309)..(331): n is a, c, g, or t
  misc_feature (631)..(646): n is a, c, g, or t
gacttcagacatgttttattataatcttatacagtctacataaatttgaacttgtatttatttgggttcagttataacatagcataataaaaatcaaagcactggtcctctgaaataaagcaggcaatcaccattcaataaacacacttgatttattttgtataaaagggttaagtttacaactaaacttttataaaaagtttagcatgaataagtacatcattacacttttgaatgcagaaatagacatctctgccactatacaagaaaactctaattaaagagttcacaaggtttcactcaaatagnnnnnnnnnnnnnnnnnnnnnnncacagcattcagtaggcttgtgtcaaaaaggtaatttctgaccaaaagacttcatttaagtgactgaatactggatccttctggtattcacgctccacctttgaaaaaaggcaaagtctgcttagattgggcaattccttgtgattttaacgttttcgctccccatggtgggaatagtatataaagaaaaccttccaactgcagaaagggcatttaaaagtctttttcataaataacgaatatcacagtccaagtaagagaacaccctgggaagatgatcattcttagttttccttccannnnnnnnnnnnnnnnaaaaaggtccattcaacttgtcctccttgtgaaatggttgaaaaataagttcagcacttaaaagattccgtgaatttgttgagaagttgttgtgc

SEQ ID NO: 161918 - DNA, 970 bp, Homo Sapiens
gcggcagcggcggtgacatggccatgctggcctgagaccgctggttgggctgatggatggcctcgcaggcgcgcagtgtggctgccgctcatgaccatctgccaggtctcaggcggcggccgggctgggctgacggctatggatcgcaccggtgcgttcgctgtgcaagccccgcggcttctgctcgcgcgcctacttcctggtgctgatggtgttcgtgcacctgtacctgggtaactgtgctgtgcgctgttgctcttcgtgcactacattgcaacggcgacgtaaagcagcgatcccgggccccatacactcgttgcccatgggccccgggcccgagcccaccttaggtcccctcacccggctggagggcatcaagaaatccccggcttcctgactgagtgaagagtgtcggctcatcatccatctggcgcagatgaaggggttacagcgcagccagatcctgcctactgaagagtatgaagatggcaatgagcactatgcaggtcagccagctggacctcttccggctgctggaccagaaccgtgatgggcaccttcagctccgtgaggttctggcccagactcgcctgggaaatggatggtggatgactccgagagagcattcaggagatgtacgccgcgatcaaggctgacccttgatggttgacggagtgctgaagtcttgcagcgagttctccaacattggaccttcgggacttccacaagtacatgaggagccacaaggcagagtccagtgagctggtgcggaacagccaccatacctggctctaccagggtgagggtgcccaccacatcatgcgtgccatccgccagagggtgctgcgcctcactcgcctgtcgcctgagatcgtggagctcagcgagccgctgcagttgttcgatatggtgaggggggccactaccatgcccacgtggacagtgggcctgtgtacccagagaccatctg

SEQ ID NO: 161919 - DNA, 851 bp, Homo Sapiens
tgtacaaacatgcatttatttttacagtttttgtggaaagaggcaaaacacatttaatcaaaaacatcaaacaccacatttgaaaaaagacttatctattatgtataaaggaaaatatccaagacaatttctttaaaatatatacaattctaacatagttatgcaatatatacattcatattttgacttaatctgccaaaataaacaggtacatatgaaactttatttacataatggctacagtttcagtctttagagttcaaagaaatagttaagattttcacctatttcatacttttcccccatgtttctcattcacctctagaggtttaaattaacctttcaaattgattaaaatgggtatgcctgaatgtacacaaaagggcattgttttatgtgtgcaaattgaaatattaaagatggatcagggatctcagtttaaggaatcctgccttctgtatgatgatgtcttaatttttgagattttcatatattgggttatagctatatatcaggacaggtaaatacattataaaattataacctttataataatttttagtataatcacttgtgtgactataataaattggctttagttttctttactcttcacagttttaataggtaactattttacaagaataacattgctaggtagaaaaatttctgttcagttaggagttcttattttgctgctgaaatgagtcatgcacaattttaaatctctgtagtttcttcataagctattttactatcttactattttataagccttgtgttgcagtcaagtttttaccacattctatagaccttgtctgtacaccatttatgaaatggaaatttgccaa

SEQ ID NO: 161920 - DNA, 928 bp, Homo Sapiens
  misc_feature (193)..(211): n is a, c, g, or t
gctttggcccatatattttttagcatgcattgtttctgtgccctgaaagtacctgaaaggttttaagcacagactcaggaaaatgtgccagtagaacaggccatctccaggaaattggctctatttgggtcgtgacttcccttcctcccaagttagcaggcttgttcttttgcaaggaatacacatcttgccnnnnnnnnnnnnnnnnnnngccatgttttccttttcttggtcatgtataagcaataaagctgttttttgttcttcatctttcttaaccccaaattttcttctatgccttaggcttcgatggttcttccaacccccttaatatggcttagggtggtttttcaaaacctacaatcccccatttgcactactggccatggaacatttatttctagtgttcctgccaatcagagatctctatattaaattctaaaatgggattaaaagaagagttggagaattcacacttattgagtaactgatgtcatacaacctggaatttctgaattccaaataaataaatttcactctttgaacatttcatcttttactttttagcaccaacagacttgataacagcctgatgctgatctgacaatgggttgatagccttcccccactgacccttaaatctgcttagtaacaagtcctttgcttctgtcattctcctgggggatggcctactgccctcctttctgtacaatctgggcaaaccgactggtgatggcaagagtggtgtcaatgaagcggtctacacagctggagagacaattttcagtgcgagagtctaggcgattccctggcttctccacacatttatcccaacataactccatgaagtgatgcacctgtgcagtaaactgcgccttctgctgctcggcggccaccaggcgctgcaactccgcttcatcggctccaa

SEQ ID NO: 161921 - DNA, 721 bp, Homo Sapiens
  misc_feature (101)..(113): n is a, c, g, or t
  misc_feature (299)..(299): n is a, c, g, or t
  misc_feature (608)..(630): n is a, c, g, or t
cattagtagctgtttattgatcaatggtttgatataaagttatttcagatcttcagacttttgcccagatggaatcacaagcattacaaagttttttcttnnnnnnnnnnnnnggataggggcaagttgggaggggaccaacctagcagtagtggcatttgagaataaattaacaaaaaaatttagtattaccatttattgatgacaaacacttaagttttacttacattccatgggggagaaaaattccagcggtaaacaatgaatggaagcagtacttaactcgcagggctaccagngctttccatacggaccacacgcagagcctcagtgcacacacttctgtgtacagtaacacaacatcaaaagcaacacagctggtatacagaaacgtaggtcattcttttcagccctaatggagatgtaattaacagtatcgagcactctgggaaaatcactctgcaggtttatatggactacatgggagatcatatcctgtagtgtagtgaaagctaagtcctcaagagccatatgtatagatacacaatgttttttaataatctttaaaacagagatcaaagttcatttaagtcctgtttgcattaacnnnnnnnnnnnnnnnnnnnnnnnggaaccaaatgatcatctaaagtttaaaattcctaaattgtccaatttatacaactgtggggagacttattcaagggtttttgaaagtcca

SEQ ID NO: 161922 - DNA, 1183 bp, Homo Sapiens
  misc_feature (51)..(61): n is a, c, g, or t
gcaaaaggttaggtgtttatttgcactgcttttataccgtctaccaggttnnnnnnnnnnncagagactcttttgaaggcatagattttagatatcaacctcagactgtggcatttgggatttccagagcatgtcgttgaggcacttttgtacccagaggcacatggaatttaccaggctgtggaaataatgtgctctcgggatgctgctgccagtaccctggtgaggtagggaagacagcagtggacgcacagtcagggcccagtacacagcccgcctgcctttcgtgtgattgtccagcaggtggcacctgttccctcctgccacccaccttataattgcttccctcttgagcaccttcagccagaggtgggtgggaaaggggaggacttgcactgggttctgctatgtgccagcatctttggtataaggagccattccctggcccagggcaggcagccagtacccaccggggtttggggatcattggtgggtctccattgcccatgctctccctgcctctcattagtagggaatcgatgggcccttgttatgccaaggcaatgctaaaatctctgctttacctgcccccttctcagcaaggctctctgtgggccacagctgatgctccatcagtgccaatttatgagacaagtttctgccgctcagccttggcacagcagatggaaaatacctgcaggaagagcttccccggcatggccttccctgcatcggtcatgtgcctaatgagctatccttgcagtgggctcttctcctgcttttcactgaagaacccttatgtgctgcatagacatgagctcatgaaacctccctggggggggtggcaggggcagcctcatctgtgacattctctctgggcagccttcactggccctactctcttccttccatcagaagatggctttgggcccaggagactcatgaagacctcaccctctttgtcttcaaagatgctttttctgtgacagatcaacctggttctgcagagggttgggggctcagccgagaacacctgtttcttcacaggggaagtaagctagagtcagtagggagcagcaaggatggcctgtgactggaggacagacgtcctgtggccccggcggtgctcttccctcttgtgctttggggcagcagcattttaggtttgtagctttggtgccaa

SEQ ID NO: 161923 - DNA, 893 bp, Homo Sapiens
tttttttaacacaccatcagtgtttattggtcagctgtcccaaacgggccagccctggggtattggggctgggctccgtgagagaggtcagtcggtcagcggcccggggtggctgccctgagccccagggctggtcctggggtctgtcagtccttccccaggctttccaggtcccagaaaggctttgtggggtctgggtctgtgtcagggtaaggaaagctgccttggtggaggaagagaagtcagagaggtcacacatgtggccttagaacctgctaagtccaacgtcagcatgtgacaggaggggaagtgaggcaagacggcagaacccaggggaaaaggtggcagggagtctgagagtgaggttgggaggaccagcatcttttaggccctgagcaagaaggaggtgaccggagtcttccaggtatccctccctcctagcttctggaagtgggagtcggggagggggctccagtcagtcaggtgtaagctccatgccatggggactctgcaggacaggcaggcttgaggagccactgtgcctggacaggttctgcaggctcccccacttggtccctgtgctggaggggaagcagagaaggggctggcagcctcatccctgcgggaccttcactgagccttcttggtcactctcttgctcttcagcatcacgtaggagatgaacagtcccacaaacaggagcagcaggaggcctgcagccagtgggatggcgacagcataggctcggggcaggaaatacttgtggatgacatgctgactgtcgatgaatggcaagagaatcacccaggcggtgtagtaggtgaagatgatcaggctaacggcgacgaggccgagtcccaccacctggtctgtccccggggccatttccccaa

SEQ ID NO: 161924 - DNA, 1219 bp, Homo Sapiens
  misc_feature (110)..(118): n is a, c, g, or t
  misc_feature (200)..(200): n is a, c, g, or t
ggaggggccccaggggtttaaaggggcccccctttttccacccaacctcccaccttggggttcgagggggctgggttacaaaccccctgtttttttaggagaccgaaaannnnnnnnnggttcctgtaaaaattaagtcccaggtccacaggtaaaggcttgatttggggcccaccccaagggagtgtggcctggaggcnagagcgagcctaaaccctgtaggagcagcgccacggttgccaggatccacttcgctgccttctctttggtcttcaagttaaaggtccagacataggtggggccgcggatgcgtgttttgtacacgggacactcatagatgttcttggtctccatgcggtccacaggaatggccttgatgaagatgacaggcatggcccggggtcagctctttcagccgcgtttcagcgatgactccagtctgggtgtcccagcgagccctttccatgaagagtccgtacacgtaggagcccctctcgcggaggagcggtcatgtcctctcggtttttcttggtcacctcgacagacagacacatcttgtccagaggccactcgttcttcctggccatggactgcatgatggccgtgaggaacgactgggggttgaagaagccggccagccacacggtggtgggcagggcaaagtctgtcgtccaggcctcgagttccctgatgcggagcagcaggtctgcgtaccaggccgccaggcccatcatggaggggtaggcccgggccacccacgtatcaggcacggtgtcatagaagagagccgtggacagatcttccacgtcggtcgtgatggtcagttctcccttcagccccaggttcagctccttgagcgaacggcgcatttcgttggtcaggatgttcattctttcacattcttgaaaggcgactaccacatagggggtcttttccgctgcctttgccatgatctcagccatgttgaaagtctccggaatcttctccaggatgtcgtccagcacggccttcaccttctcctcgcgggacactcccgtgcctgcccccgagtccgtctcttttggctgcatttccaggacagtgcggaacagcttctctgaggtgaccgtcagaaagccaatctctgcgttggggtgcaggccatacagatagggactctcagggggcaggttctcatcgatgtattcgtggtaacccttttagggcagatttttgccaa

SEQ ID NO: 161925 - DNA, 951 bp, Homo Sapiens
  misc_feature (44)..(147): n is a, c, g, or t
  misc_feature (253)..(368): n is a, c, g, or t
  misc_feature (785)..(793): n is a, c, g, or t
cagtcgacggtaccggacatatgcccgggaattcggccattacnnnnnnnnnnnnnnnnnnnnnnnnnnnnnnnnnnnnnnnnnnnnnnnnnnnnnnnnnnnnnnnnnnnnnnnnnnnnnnnnnnnnnnnnnnnnnnnnnnnnnnnnttaataataataaaaccttccaaaaaaagtgccgggaccaaatggattcactgatgtgcatttttcgagatacttaaggtagaaatgataccaagtctgtactgtnnnnnnnnnnnnnnnnnnnnnnnnnnnnnnnnnnnnnnnnnnnnnnnnnnnnnnnnnnnnnnnnnnnnnnnnnnnnnnnnnnnnnnnnnnnnnnnnnnnnnnnnnnnnnnnnnnnntttccagtgaacacagatgcagaaatccttaaaatgttagcaaatcaggaatgcaagccttgttcaacatttgatattcagtgcaatccattgcatgcattagcagttcaaagattaaatattcagtgcaatccattgcatgcattagcagttcaaagattaaatatgatcatatcaataggtacagaaaaagcatttgacaaaatccaatatccattcatgataaaacctctcaacacagaaggaatacaggagaacttactcaatttgataaagaactactacaaaaaaccctacatctagcattatccttgatgtttccaactaaatgctttcctactaagatcaggaacatggcaaggaacaccactgcttttcagcattgtactggaagtgctatctaatgcagtgataccnnnnnnnnnggaaataaaatgcacataaatttggaaggaggaaatacaactgtctttgttctcaaataacatgattgtctttgtagaaaattctaaataacaaaaacctgctgacattaataagcaattatagcagggttgtagaatgtagtcctcaggtatatgat

SEQ ID NO: 161926 - DNA, 1040 bp, Homo Sapiens
gcacgaggttttttcgtgatagtggttcactggataggtggcgttggcttgtcatccttagtcaaaactgaagtcacgctaaccttaaaactacaacactctgaatatatgtcagcactatgcctcccaaacaatatttaaaatatattttactttcaaatacatttattagggtacaccaatagtgagaaaataaagtcttaaaatttaaatacaaatcacccatataaaaaattcaggaaacacagaaaatcctatcttacagaagtccaggcaagcctgtcctcagctggctctgacgcacagcactgctgtgcgacacagctctgcctgttgcaaaactgtcagcacgcacagccaaatgacagctgcgtcatcaagagaaagagagaatggatgcagggggcacgtgctcccctcttcactctactcaagcatcaagacccgaagctactttgctttgctctagaaaaccatagggcccatcaccctgttcaaaaacaagtaaacccgtcccagagcctctccagggcagatcatttggtgctctgctccaaggcagagtactccgtctctgagactctggaggcatcgatgagcttggtgagccctgttttggccgagtacttgaagatgaaggccttcatcagctcgtacctgtagttgcgattgatgaagctgtagaggacagggttgacgcagcagtgcaccagcgacaggcactgtgtgacatgcagggccgtgaagagggcgtgctccagccggcaggtgaaagggatgtagtgcaggatggagaagatgtccagcagcaccgccacgtggtagggcagccagcagacaaggaagaccaccacgtaggagaagatgatcttccggctgctgtgcttctcctggtcactggacgccgagatggctctggccagcaggaagtagaagacagcgataatggagaagggaacggcaaagcccaagacaacggagaccagctccatgccgatcagccactccttgataggtgtgctcgggccaacttttttgta

SEQ ID NO: 161927 - DNA, 837 bp, Homo Sapiens
cagtcaggttatccactaaggtgcccaactgtatcaccttcagttgagttaaatccccagttatcatgtttttccattatgtgaatgttcttagctgatacatcagctacatagacatatttctggtctgctgagactgtgatcccattggcactacaaaatcctttggccaccactttaacctcctttgggctgtagaaaagaacataagtccagcgaagatccaagatcatctcaaaaaatgacaggagggagttggtaaaatagtggtctctggtggcatagaactgttctggtccaagaaccacaatgtcattcacacttttgagaagttcatgttttatagttttcaggtataccagagaacgttgttgttcctcaaatttaaatatctccacagtggacttccatgtggggatgattcacaacataaagatacacagtattgtctttgtcgatgaaaatactgatccccatgtggattaaataattctttgtcaaatccaccactgatttctagtgcttgtgcccttgggttttgttcattcagatccatcaagaagatttttcctggttcatctggcgcaaagtttggcatgcctggatattttaatccactggagataaaagccagcccactaggaagtatatcaatatcttcagagccactttcaagttcctcaataaggtggcagttttcaggttctactggctccacttctcgagaggcattcaccctttctctaaacgccagaaacatctccccgactaaggacaggccgacccccagcaggaccagcgccacgagcttccccatggtctcgccaacttttttgt

SEQ ID NO: 161928 - DNA, 955 bp, Homo Sapiens
cgtggtgacggcccaacgcagcctgtacggtaggtgtcgaaaagggccatttttgccaggcactgtgtcaccacgacccttgcccacaccgggccttaggtcccggcccacgtttacaaattgccatcaggccttaaccagtttcaatgtccccttcgtgggcttggaacttcagaacttctccagctggcactcttccagacacggacgtagccatctgttcctccagtggcaagcagggtattatcgtggttgaagcaacacaactttctgcagtggatcggagctaaagtctgtctgcaccgcgctgcaaattctctaccctgagttctagcccctcgtgctgggtttccgctccacatttcttctctgctggggctgctcccttcctttgtcgaggcccctgctccttggaaccggccttctctgccttgttgccctgctgttgatgtgcctggaagcgcaggagctgacagtgggcatcctgccctgcagcaaggatgtcaccagccagtgccaagttcatggtggcccgtgtctctgtgtcatgggagtgcagcaaggaggcactcaagcgcccattaatcagctctagctgcagaaagtgcacgccattctttatgcctgtcttggcggcgcctcctccgcccgcagcgatgagcagcccagtgctggggtcgacctgaagcgcgtacaacgggaacggagcccggtacagctctggcgcccggcgccggcccatcccgcccggcgcgcgttcactgcccgcaccgcggcacccaggacatgccgcgccgggccttcgactactgccccggcggctggtgaactcggccccgtcgccgccgggagcactccctacccctctcacaccggggagttgccaaaatcctgaccatcagcaggaagccgagcctcagctcggctgcgtcccctcggccgaatacccgcaggc

SEQ ID NO: 161929 - DNA, 410 bp, Homo Sapiens
  misc_feature (104)..(156): n is a, c, g, or t
ttggcactgaaagcttttaatttttttatcactaaattgtatttggcaattgcaagttgcctgcagatagggccgtgatactgtgttttgagccacagaaggtnnnnnnnnnnnnnnnnnnnnnnnnnnnnnnnnnnnnnnnnnnnnnnnnnnnnnctttttcctcctttcttttggggaatcctgtaatatgaggtagcttatttcgtcaattaattagggtgctggatggtagagaattttgtcagtcaactatgtacacacagtaaatactgtttcttaggcaaaggtaacttttttatatagttgtaaaattccattatattccattgccaaagaaacattaagaactttgtatagctgtataaaaagcaactaattttttaaagaataaacattttaaagtcagc

SEQ ID NO: 161930 - DNA, 721 bp, Homo Sapiens
ccgaggggtagtctttttatcctttgaaagtatgatacagtatttaattcaaatttccaaatgtatatacatgttcatttttatttttatctagcaagctggcccagctcacttgtcatggcaatctttgccatagctttcagtctttcaacacttcctacacagatacaggattatggggactgtatatggtttgtgaatcatccactgttgcagacatgctacatgttgttcaaaaagaatggatgcgactctgtacaagtgtcacagaaagtgaggttgcacgagccagaaatcttctgaaaacaaacatgttgttgcagcttgatggttcaactccaatttgtgaagatattggtaggcaaatgttatgctataatagaaggattcccatccctgagcttgaagcaagaattgatgctgtgaatgctgagacaattcgagaagtatgtaccaaatacatttataataggagtccagctattgctgctgttggtaagcctggcttcttttcttctatgcaaaaagttggccaagtacttttaattaactcttctttttaatccttaggtcccattaagcaactaccagattttaaacagatacgcagtaacatgtgttggcttcgtgattaaaatgctcctaatcaagattgtttgaacacatgtatttataaaacagagctagagaaaaataaaaatgaacatgtatatacatttgg

SEQ ID NO: 161931 - DNA, 1170 bp, Homo Sapiens
ggaagaacatttgtttcacagtatgggatgttggtggtcaagatagaattaggcctctctggaagcattacttccagaatacccagggtcttatttttgtggtagatagcagatgagctgcagaaaatgcttctggtagatgaattgagagatgcagtgctgctactttttgcaaacaaacaggatttgccaaatgctatggccatcagtgaaatgacagataaactagggcttcagtctcttcgtaacagaacatggtatgttcaagccacttgtgcaacacaaggaactggtctgtatgaaggacttgactggctgtcaaatgagctttcaaaacgttaaatgaaattggatatctaaccaaggacatgtttgataaaattggtctaggcttgttaccccaaaattagtttgtatcttggttattaaacagtatctgggactggtttgggcagaatattaaacttattttgttgccaattattgtttaccgagtataatgttgctatttagcaatgtgcttggttttaaagaaattctccttgggaaaaaagtatcctcttttaattttacttcccataagcgtaaatgcctggacatagctcttgtgcaacctttaaataaattgttttgagtgttttttgagccccagacaaataatgttttaaagttatccccttgctactttactgatacctttatcattcctgagacagtttgctattttaaaaatgtagcattccatttgtatttatttctctcccttgccaaaaagattttctaatactgcttgtaccagccagagaaagatccaaaacactactcagctctcttgcactgaggaaatttttccccctacattgactcctggcctacatcagccaaacttaaccttggtggggtttggatttgatagccaattagttctgtgctggttgcaaagaattgatatttagatggtttttaatactcagcagattgtcttcctttatattgtgtcttttttatgttgcatgttgcttttgttatcagcctgattttttgctcagtatatgatagttctgctgatgttttgtttattgggcaagacatatcttcattaagagtttttggaaaactcatcaaaattcaatgaatacattttcttcataaccccatttggaattattc

SEQ ID NO: 161932 - DNA, 875 bp, Homo Sapiens
  misc_feature (243)..(272): n is a, c, g, or t
  misc_feature (276)..(354): n is a, c, g, or t
  misc_feature (359)..(359): n is a, c, g, or t
gccagagaaatcccccccttcggggatttgtttttcaaaacacccctctcggttttccccccccggggcgtttttttatttgtgggggggaaattcccaaggcccttatttcagtgcccccgggttttctcttgggaaaacgcgttatgggccaaggtccccttccctttaggggggcccgccccgcccaaaccaaaaggttttagaaaagttttttgaagggccggggggggccggccaagnnnnnnnnnnnnnnnnnnnnnnnnnnnnnngggnnnnnnnnnnnnnnnnnnnnnnnnnnnnnnnnnnnnnnnnnnnnnnnnnnnnnnnnnnnnnnnnnnnnnnnnnnnnnnnactcntctgagggatttattggttcctgtgaaatctgtgaaggccacaaacactccatagccagagaatgacaacatacgattttcttttcagtcttgtagtatccacagtagtgatgtctgtccatgtacaagtgtctgtccagaacacccattaaattccatgcctgctctgtgtgtcacggggaaagggacagagacagaagacagattcactggtggtactttcaaacaacgcggtaggccttccctttggggtctgccatgacaacgataccccaggtggcaatgcccgcccgcccccatcagccccaacccagaaagcacgcgacagctccagcaggtcttcaacaggcggtgttctgctggggaggtcggcgctccgggtgtagctgggggcgcaggtttggcgggcgcggcggcggtaccgggaggcgcagtgatataggactcaaaaggctgggacaaccgagaccccatgctctggaactcggcctcaaccttgggcgtctttggttcccc

SEQ ID NO: 161933 - DNA, 891 bp, Homo Sapiens
  misc_feature (132)..(180): n is a, c, g, or t
  misc_feature (454)..(516): n is a, c, g, or t
ttttggcagaggccacacagtttggcacatttataaaagatgtaaaacagagtggggtgggggagacagaagcatgaggtgtctaggttggcatgacagacaccagacatgcaccgtgcatttaaacccctnnnnnnnnnnnnnnnnnnnnnnnnnnnnnnnnnnnnnnnnnnnnnnnnntctcctgccactgccctcaggctggtggctttacagaggccaggggaccagggtgagggatgctacagtttgccccatagacaaggacaagaacccttagatgagtctggctgcgaggcagggcgatgggaaggaaggtagcccctccgcggagacatgcaggaggtggcccatgggaccttggcagggagtgaagaggtggggctgagcctggagaaaccctaccagtcagaaatctaaggcaagggtcccagcgtcccctccaagcctgccnnnnnnnnnnnnnnnnnnnnnnnnnnnnnnnnnnnnnnnnnnnnnnnnnnnnnnnnnnnnnnntggggttcacaccccgagttcctcaggagcctcttgggagcttgggagggggctttcctctcaggccaagactcgcctgagacaatcctcccttctagtgaccaggccagccctctccaggctggggagagggacagccaaagccaggaggctgagtggcagcctagcaggcctcctcgagctggcagagctggtgactgcagagtctagacagacagatatggctatacccgcactggggggcctgagcaggctgtcagaggtccccgggacccatactcatagtccgcatctgtgggtgaggccatgaaggagctcagggagctcccggtctgccggtctcggaagctctggatataggtcggggagagccaa

SEQ ID NO: 161934 - DNA, 982 bp, Homo Sapiens
gaccatttttctatggccctttcctgctttgtaacttggcctgggggttcccacaggtttgattatgcagagccccctagggatcacagtggtctttggcctctggcaccgcccgccggagttctttcacattcagcgcccagcagttctcctcgtccaggtagtaattcacttggatggcgtcgagctcagagatgacagctgaatagaggggatattgtgggatggggatcatcacacctgtccgtgacttgccgcccccggagacgaggatcttcaggatcgtagaaatgccgtcactagctcccgtggtcaggtagatgttgtcggggtccgcaggcacaccgccatccctcctggtgatgtaggcagccacatcttcacggatgcagttgacaccctggctagcactgtaggaccccaggctgttcccgccacaagcctgcaggatccgccgggcacgtttcttagcatcttctgggaagctggggctgtccagcaggtttgggtaggtgcatagtgccatcacctgccggaggaaggtgattggctgctgccccatagcctgggcgtccccgatgttggctcggatgacctctgtgaatggctttttgataccccgctgcagctcgagctcgatctcgccggccttgagcacgatgggtccccgcacggcgtactccaccgccttcacctgcgggttcatggactccagcgtgaggatgcgctcgcgccggctgcgctcgggccgcaccttgagcaccgccgaggcctcggcggccgcgctgctctggctgcggccccaggagctgggggtccggggaccacagccccgccggaccagcgccgccgcccgctgcatcgcgcgcttgcggagagaaaccctgtcgcccctggtaggccctcgccgcactcggttagctcgcgcgcctggagcagctacccggccccggcgcccacagccgcatccccgcgcccccaa

SEQ ID NO: 161935 - DNA, 860 bp, Homo Sapiens
  misc_feature (290)..(290): n is a, c, g, or t
gcccggccaggacccccaggtttattggggactccccgcccagacgcttatggcatcacccgccaacggcacggttactcgggacacacacggtggcctctgcccacagccagggcccagaggcagtggggtgcagtctcctcccttgtggcccagacccagctgggtcccttcctcttaggcagctgagggaaggactgctgggttggccacgggcctgggaaggggatgcgagcaggcgagtccaggaggggccggggccggggtgggggctcgcctgccctctccanttgcagggactgtagcatcagcagctgtttcagcaccttcgtctggctggtctctcggatttcgccagccaggaacatctcgtccacgaccgtgtaaaccttgtagaagttgaacaccaggtccagttcacagacattgtggaaatattcgtttaagacctccacgaagttgtgaatggcctccaggtaagccaggttgttgtcattgacatccacacagatgcagaagtagaggccagcatagcggcggtaaatgatcttaaagttccggaactccacaaagttggtgtgtttggcgtctcggacggtgaccacggcatgcacctcctcgatcagcttctgtttctcatcatcatcaaactgcatgtaccacttggccaggcgcgtcttgcctgcccggttctggatgaggataaagcggatctccaggtcctctctccttttacagcgctttcccagacccttaagtttcattccctacagttgcctccttttggtttcctgtgccaggtctcttcttgagatcatccctctctcacaggcagtctcctgcccctgtctcaacatccc

SEQ ID NO: 161936 - DNA, 903 bp, Homo Sapiens
  misc_feature (13)..(13): n is a, c, g, or t
  misc_feature (65)..(65): n is a, c, g, or t
  misc_feature (88)..(118): n is a, c, g, or t
  misc_feature (422)..(430): n is a, c, g, or t
ggggcagacagtncctgtgggatgtcttcaaagtcagcagttacagaattagtttactttgaatnttgttgtctaaatagctcctgcnnnnnnnnnnnnnnnnnnnnnnnnnnnnnnnctatcacaggctggcctaactaatacaaaataggtgatgaacctctggttttaccataatgcaatgtgccacggaaagtttgggggaggtttttaatgtaattgcactctggttaattggctcgtaccaagccctgccttatgacttgtggaaagcttcaaggagttccactgatgcaaaagggtcttttcctagcttcctggtctgatcagtgctatgagatggacagataagtgtgaatgttttatacagaaaatggaaatgatacatttctcttgttaggtgttttcataaaatgtagcannnnnnnnncttatggaaataagagtttcaggtgtctccccacctagggcaaattcatgcacattgtcatgttataccaccattctggaaatgatttctgtggatttgaaattgcacttttaattttatatatgacagcatttaaatgcaaacactaccatgaatttaatgtataaaatgttgtcaaaccaagggaaaaaaccacagttcaccatgtggagtttactttttttatatgaatgtttgttgtactgtgtctaagcataacttccctaatgtcattacttttacataccagatttgactgaccactaatgtagtactggggataacttaatatcctatgttgtgtcaagactctttgaagactttcttgaattgctttcgtaaaggtctgaacactgttaaggagaaagctgagtatcaacttgcctttctgatagaaatgtttcttgtgccagttttattgttgagatatacta

SEQ ID NO: 161937 - DNA, 640 bp, Homo Sapiens
tttttcagaagaaacgttttattatttttttgtcgaagaaaaaaagccatataaatattagagtataaaacttgcgtgagacacaggaagagggtggggtgggagctacgtgactatgcgaagagaagcgcttataggagaagtcagtacgggggagggggtcgccttagcgcgtggacacagcacaaaacacaacacgggccgccgcgggcagatcaaggacagacggctgcgcggagcccgccgcccgctgcccacccgccatcacgtaaaagcacaccgcactacactactggctattttacaccagccgaaagagggagggggcgctacactactgtaagggcaggtctggggttctctggcagccccgctggatggccggggacccaggggcagaagggggtgggagaagaaggtctatgcacaaggaggcactggggaactttaaccaggctatggccactagggggcgcactggggacctgggcagtggccttcacggaagagaaacggcacctggcaaggtgaaggactgaggcttcaggagggcaggggccctgttgaagaagccccatcctgggctgagactttctgttcatttggtccaacttttttgtacaaagttggcttttaaagg

SEQ ID NO: 161938 - DNA, 696 bp, Homo Sapiens
acccaacatccattgatctttatttgatttgacaaaatctgcatttttaaaagacaggtaacaaaatctgaggttatactgaatctgacaaattgagttctatagtatctagaatatcatataagaaatatcaactgagggaaaagagaagtaccacatgcagatgctcctggcaaggggggaactgtatctgcaggtgaggtccagagtgtgcagtgcataagaaaatcctacagaaaatgccgttaacttacttggatgaaatgtttttcctttgagggggaggaagacgtggtaaagaggggcaggaattcaaaggcatatgcagaatggcttctccatttcaaaatggtaataaaaatatttaaatcatggcactagggcacctttgaggaaaagaacatcttaaccagagtaggctcattgcataattctttagtaatatgtacaattttcaagtaattaagcagacttaaaggataattttgttttaacagcagctatctatttttcttctccccctctggggcttgatctgtttcagcatcacagggacacttttccacacattttctagggaaccaaccccttattcttgaaacacctgagggagaaaatgaaattgaggtgaaatagtctgatggatgacagtgacattactgaagagcagtaagtccccaacttttttgtacaaag

SEQ ID NO: 161939 - DNA, 1015 bp, Homo Sapiens
cagccccaatatgccccccgaagccaggcggggcggtacaccgccccctggtagagcggaacactgcccgacccgcgtggtgcccgggagccccgaacggggccgccaaccgggcgtaccctcggtaccccgcccatcgggggcaagaacggggggcaaccctctcccggccgacccctgggaaacgggccagtcctacccggtgtggaggcattgggggcccccggagtcgaaggacacactgggaaggaggatggtgaggggagtaacagtttttgtggaacagtaccaacagggtggggaggcgctggtgaggggacgggcaggtctggaactcactgcaggtagagaggggaggaaatgggcccttggtgtcccctccccacctgacccaggcctggtgagtgccagctgccccagccggccctagtggcggctggagaccagacctttcactttggacatcttctttggtgggctgcctctgctcagcgtgagggggacactcccgttcagccagctgctgctccatctcctgagccgaggaggatgcggtggctttgagtgtcttcttgatgtttggtaacctctgcttctacctgctgctgagttcggttgtggttctctttgtactggttggctctcagaacttgctgctcgatgcccagtagaactgcttcacagccatcacaccattcatgcagggtcttgacaatattattgatatccttctttcggatgtcacggccaatgcagaaatccacttccagcagctggtttcgctggtccagcttgccctggatgatgtcagtgtagacagcctcaatgataaggtcttctagttcccggagattccgcatctccaggtctttcagcaacacggagtaggggatacacttcattcttgatgccaagctcacgatggtaagacgacgcggtggtcgacgatatcccgggattccgaccggtaccagcctgcttttttgtaaccacactggtctataggcaccatagc

SEQ ID NO: 161940 - DNA, 471 bp, Homo Sapiens
atatcaaaacatttattttttgtgttacaaaaacacaaataaatccaagcagataatgaaataaacacatttttttagtgtcccatcctgggttctctgccctagaatgtattaagcaggtcaagtttaggttacttcaacacttcttctggatgctatgaagtctccatcttataaccatgtttctctagttcagctctaagataaaacagaaagaacatcacgtaactgattagagaagtcatcctctacattgtcatcatcccaattatcctcccagacatgtgcatcttcatcttcatttaagccagcccagtcttcggcagggaactcttcaaactcgtcgtcttcctctaacagacctaagtctaccggctgctttttctctgacatctcgactgtccgcgcccaacacctcccagataagcagaaaagttggaaccctcactcttccccaacttttttgtacaa

SEQ ID NO: 161941 - DNA, 551 bp, Homo Sapiens
aagattctgaccaaaacatttaattaacaaaaaaatattacaatagcagagaaaataataataataacaataaagagaaattagaagtgggagtcagggtagaaaaaaatgcaaaggccttggtcccttctgagttttccttggctgctggcttctcatcttctcccatgagacgaatgttgtgcttttcccggaattcatttagttcttttccctttgcctgaagctgctgtgtcagtgtctcaatgatcttgtgtatctgctccttgttgttctccaaagcgggcagcacctctttgacagttcgctccaccagcactcctccaaccatgcggtagcacttacgagtttcatctacctccttcagtgtatcgatcactaggctgtgctcattcaactccatctccaactcagctgctttggatgccaggcctcgctgttcctgccgaaggcggttgaagccagcaatcacctgctctgcggacaccgcccccttccccgcgccgctcccgctgctcttgccggcgcgaccgctgttctccgccatccaa

SEQ ID NO: 161942 - DNA, 626 bp, Homo Sapiens
tgccaggtgactcacaaggctgaaatgggagccgatccgctttgggtggttcagtcccagccaggggttgggatgtcctgcctgcggaggggccacagcccccatggggggcccttcgcagcggggcacaccgatccctattctgcaaggtgtatcccacaaggcccttcctcttggtggcacctgggcactcaaggagccaggagatcctgccgagatggctagagtctggaatgtgaggtgtgcacaggcggggcaaactctggagacccagagacaagaagcaccaactcccagtgtgatgaggccagttcccaaggggaaggcccagaagagcctgggggatgggcaggtcggggagcccctctttccagagttccagtacagtgggaaacgtgtcagtctgtgactctggccaaagcacccgtcccctgctgcaggaggctcggcagacccaaggccagggcacagtggggtctgccgagcaccaggcaggagtggtgtggcaggcggtggctgggagggaggggacgcccacaggggtcctagaggtggatccacttgttccagttgacctcgtgggggaacacacggcccagccggagggtacagtctgtgggcgtgac

SEQ ID NO: 161943 - DNA, 629 bp, Homo Sapiens
atgtggataatatttatttgtatcttatctatagaacaaatatttacagatacaaacggaatcacagcaaagttgctataaaaccatccagacctctcgatggccacttctgaaaacatccacggtgaagggcagggccaggcctggctgtggagtgggccagctgagtacctgggcgtcagccaagggaaatggttggggattatggcttcagcactctgccggagcacattcctgagcgctgacaatgtggagccctcaccgcccccacctaccccaacctcaatggggaaggaaaggggcctgagctgggcagggctgcccgggctcactatgtgcctgctccaggagtccctggcccttttgctggcaggagcatccctgagctggaccgggaggcctctctggcctggggctgctccctgcccggcaggttgctgtttggcagctggaggtggcaagagctgctggtgctgccagggcgtgttggccaggaatgagctcccagggcagccctgaggaaagggtcttaggaagcgcctcccagctcactactaggagctggggactgtcagtgctgagtggggctggggtacaggagcacctgcctctcctttctttggcttaaa

SEQ ID NO: 161944 - DNA, 1040 bp, Homo Sapiens
  misc_feature (144)..(145): n is a, c, g, or t
  misc_feature (147)..(148): n is a, c, g, or t
  misc_feature (151)..(151): n is a, c, g, or t
  misc_feature (164)..(164): n is a, c, g, or t
  misc_feature (281)..(281): n is a, c, g, or t
  misc_feature (959)..(1000): n is a, c, g, or t
tcgcgggaataaaccgacggcccactgcctagcctttattataccgctcccctatagggggccccccttttaacaagaaaaacgggggtacgtgaaaaactgggcccccctcgaggggatctttttagaggcgggccgcccccnntnnccntggggttttctcnatttatgtttttccgggtccgttggggtttataagattgtttggggtttggggtttttttcctccgttttcgtttttggagccagcggctgggaacctgtggacccgcccggccggntgaccttcacttgtcctggagcggtccaggctctcgagcacccggttgagacggatgtgaagcagtctgacctgtttctccaggtgctccagcttctcctccacgctggggttgctggggttgctggggccgctgggactgcttcgccagtagaagcccatgggcccggtcatgaagtagacggccaccacgaagcacagcggcagcaccgcgttctccggctcgccctcgtacttgtgcaggatgtacacgcaggacatggaaaacatgacgacccgcatgatcccgaagaagcggccgaacaccacgtgcaggacgttgaaattgaagcccagggtcagggacaagaaccagtaggccaggaggacgacgccgaccagcaggagcgcgcgggccgggctgctggacaccgaggctgggctgaaatactgggacaggttggagacgtcaagtccaagaacatccaagagctcggtccagactttccacagtgtctccacgaacatatccactcccagcacaaatctctcagtcagcctggccaagaacttctgagcggcgcgcacgttgtcctcgccgaacaggctgctgacgctctgggagaaggtgttgaccgtgcggcggtagctgttcttctccgcgccgccgcggccccgcgccccctgcgcgcccggggcnnnnnnnnnnnnnnnnnnnnnnnnnnnnnnnnnnnnnnnnnngagcccggcccgggccaggggcccgcctgaggcgcgcgcg

SEQ ID NO: 161945 - DNA, 424 bp, Homo Sapiens
atcattgccagacttaatatgagaggtgaaatgttcgatccaattttccttcctggataagtttttctttcctatccctctcagttttgataatataataaatgaagatgaggggcccaaatccacacagagctcccatgagtgagtttttaggagtgggtctgaaattaggatagacatttattgttcttgcataggcccaacgaagcaaggcaggattttcgatgagccctcggcggttgggatcgttgtactgaagcaggtactctcgtttcagctgggctcttatggccaaccgctcggcttgcgcccgccgggtttccggagatatgttgtattcggctgggtcgagggtctcaggcagagtgcgcaggctcgacggcttatactttgggaacgacatcttggcgaaccagggcacaat

SEQ ID NO: 161946 - DNA, 1106 bp, Homo Sapiens
  misc_feature (317)..(374): n is a, c, g, or t
  misc_feature (376)..(422): n is a, c, g, or t
gggggtggggaaaggttttttaaaagcaaagttaactctcttatcaaaaagtgtttaggggtgattattggtcaagactcgtccgtgagggattgaagggggcttaaaaattaacctttgggcatgtggaatcctaaaattcccccaaccatttggaatccgttaggctccgggtgtataatattttgaataaatcatacctcaggtaaggcaaatcttttcaaacacgccaagcatatgcagttttgttttaacacattttccccctgaaaaatttttatattttcttaggagctttaaatctctgtaggtagttnnnnnnnnnnnnnnnnnnnnnnnnnnnnnnnnnnnnnnnnnnnnnnnnnnnnnnnnnnannnnnnnnnnnnnnnnnnnnnnnnnnnnnnnnnnnnnnnnnnnnnnnataatacgactcactatagggaccacttgtacaagaaagttgggtacgcgtaagcttgggcccctcgagggatactttagagcggccgcccggaaatttgtgtgttccgttttcttgtttcacacagacacagaatttatttctggacgcattctgcaggctggaggtcccggcaggcacagggctcacaccttgggttttgcaaacacctcccagccctccagccggcccatcttgaccagggaggccgctatgccaaagtacacgcaggcggcggcgccaatcccgtagttgtgcgtgcgtgctcccagagtcaggcctccggcgcagccaccgaggaagtagttcagggggtcgtcgggcttctcgcggacatgggcgcttatgcaggtggtgagtccaaacacggccccgacagcagttgcagtgaacttgtattgtccatccttagccactccttcaaggaaggtgcccggaggattgagtgtgactctgtaggcagcggcggtcaggccagggacgctggcaatactggtggtgctgtaggctttgcggtggcaatcggtgccatcggggatatcgcagtatcacgaaaaccttatgccccataggagcctatctcgatgccgcatcgaggccccgcctaggttgggaagcgcaccgccatcccgggaattccggacc

SEQ ID NO: 161947 - DNA, 842 bp, Homo Sapiens
aactttaaacagacctttagtgactgaggtgtggtttaggacttcaagtttggatggcccaggcgggaaacagagtggagagctcagtaaggccgtttgagattgctgctggcggtagccaccgcggcgcatgtagcccttgtttttgcggtagccgtccttctggtctcggaagtagcccccgtaggtgccctgcttgtggtcaaacacccgttcgttgttctccaccaggctgcccagcttctcggccagctgcagagccaggttctgctgggcagtgggctcagtgcggtgcatcaccactgtctgtgttggctggtccagggaggccatcagctcctcattaatgatcattttgctgatgatggagtgcacagtgggcagatccagctcaaacatgtctgacagcgtctccatgctgatggagtcatagacactgctgtaggtgaagaggtaggtcctcagtgactcttcctggatcttcctaaccagcatggtgcggactttgtcagcatcggggaaaaggtcccacactttcccattcatcttatcattgatgataaaactgtgacaggtcttccagtcacccatcttcatggccttggaggcagcgaccacatgttcccgcatggactcagggggacccagcaggggctgtcgctcgcccacgcgcagctggtggtggaactgcttgctgatcatgcgtcggcgggcatcgctctcatgggcggccatgtaggggatctccaggagcatggcagacaccaggtagacacactccagcagctccaggttgatgtgcaggtggaaggggacggtgacggcgccccaacttttttgta

SEQ ID NO: 161948 - DNA, 632 bp, Homo Sapiens
aaacaaggagtttagttttattttctctgtgcatttgcaaaatactcaggaccaacataaaaaagaaatacctcctgtggaaaaagttacattaaaaaggggaatggagtgggggtgctgaaagggattagtacctttgccccaaggagctacagcatctctgattggtccaaggaatataaaagatattgggaaaatgtaacaggaggaaggaaaatgtgaatttactgagggagagggcctcgaagtgggcctcgagggggaactggtggccggggagtgggtctgggtggagggagaggcccccgctggtatccatagggtgggggtcgtggagggccagtgtatccatgggggggcatcagtggaggaggtccacgcataccatgcggaggcataggacctgggtgacccatgggagatccgaatggaggccctcgggggggcatgcccattggaggaggtccaggatgaggcattccatttggtggtcggggcggtggctgtgcaatctgcatctgacacatccctggatggggcatcccacctggtgggaatgggtgaggatgtgagtgtccatgaccatgatgtcctgcccctggggttcctgccgatggggggccatgtcctgc

SEQ ID NO: 161949 - DNA, 956 bp, Homo Sapiens
gatggggatgtgggctgggaagatggctcccatctcagggtgaggggcttgggcagcccctcatgctgcacatggcatgtgtatctctgctcttctccagaaggcaccaccacagctgcccacttctggaaggttccatctctgctggcctggtctccacaagctcggtgtcctgagtttggtcctcgccatcccgctgccaggtcagtgtgatctccgcagggtagaagcccagggcccagcacctcagggtggcctcatggtcagagacggggtggtgggtcacgtgtgtctttgggtgttccgcgcgctgcagcgtctccttcccgttctccaggtatctgcggagccactccacgcacgtgccctccaggtaggctctccactgctccgcctcacgggccgcctcccacttgcgctgggtgatctgagccgccgtgtccgcggcggtccaggagcgcaggtcctcgttcagggcgatgtaatccttgccgtcgtaggcggactggtcatacccgcggaggaggcgcccgtcgggccccaggtcgcagccatacatcctctggagggtgtgagacccggcctcgctctggttgtagtagccgcgcagtttccgcaggttcactcggtcagtctgtgcgtggcgcttgtacttctgtgtctcccggtcccaatactccggcccctcctgctctatccacggcgcccggggctccatcctcttggactcgcggcgtcgctgtcgaaccgcacgaactgcgtgtcgtccacgtagcccactgcgatgaagcggggctctccgcggccgggccgggacacggcggtgtagaaatacctcatggagtgggagccggcccaggtctcggtcagggccagggctcccgagagcagcaggatgagggttcggggcgccatgacccgcatctcggcgtctggggagaatccgagtccgccaa

SEQ ID NO: 161950 - DNA, 1368 bp, Homo Sapiens
  misc_feature (69)..(112): n is a, c, g, or t
tttggggatgctcgctccaaccgactgctgtcactttcaccgttccagtttttaatctgagtcaagccnnnnnnnnnnnnnnnnnnnnnnnnnnnnnnnnnnnnnnnnnnnngccatgccaatctcatcttgttttctgcgcaagttaggttttgtcaagaaagggtgtaacgcaactaagtcatagtccgcctagaagcatttgcggtggacgatggaggggccggactcgtcatactcctgcttgctgatccacatctgctggaaggtggacagcgaggccaggatggagccgccgatccacacggagtacttgcgctcaggaggagcaatgatcttgatcttcattgtgctgggtgccagggcagtgatctccttctgcatcctgtcggcaatgccagggtacatggtggtgccgccagacagcactgtgttggcgtacaggtctttgcggatgtccacgtcacacttcatgatggagttgaaggtggtttcgtggatgccgcaggattccatgcccaggaaggaaggctggaagagtgcctccgggcagtggaaccgctcattgccaatggtgatgacctggccgtcaggcagctcgtagctcttctccagggaggagctggaagcagccgtggccatctcttgctcgaagtccagggcgacgtagcacagcttctccttaatgtcacgcacgatttcccgctcggccgtggtggtgaagctgtagccgcgctcggtgaggatcttcatgaggtagtcagtcaggtcccggccagccaggtccagacgcaggatggcatgggggagggcatacccctcgtagatgggcacagtgtgggtgaccccgtcaccggagtccatgacgatgccagtggtgcggccagaggcgtagagggatagcacggcctggatggccacgtacatggctggggtgttgaaggtctcaaacatgatctgggtcatcttctctctgttggccttggggttcaggggggcctcggtcagcagcactgggtgctcctcgggggccacgcgcagctcgttgtagaaggtgtggtgccagattttctccatgtcgtcccagttggtgacgatgccgtgctcgatggggtacttcagggtgaggatgcctctcttgctctgggcctcgtcgcccacgtaggagtccttctggcccatgcccaccatgacgccctggtgtctggggcgcccgacgatggaggggaagacggctcggggggcgtcgtcgcccgcgaagccggctttgcacatgccggagccgttgtcgatgacgagcgcggcgatatcatcatccatggtgagctggcggcgggtgtggacccaacttttttgtacaaagttggc

SEQ ID NO: 161951 - DNA, 1184 bp, Homo Sapiens
  misc_feature (515)..(565): n is a, c, g, or t
ggaaaagaaagcaccaactccccggggaggggctgcagacagcaagggggagaggactggaaggagagaagaggaccgtcgagggaagaggctcacaagtccctgggaagacagggcatgggcttacagagaggagagggggtacgggcagtggctgctcgtgtcctctgccacccctgcccactgtccaggggacttcaacacaaccgaggggacaggtttgtgtggggtcaggtctgatagaagaggagcaggagaaacaaatcgttaaaacctagcgaattcccctaagaaaacatttcttcctcctttccttctggaggctccttggttggtagggaaataggagttggtgggaaaagaggggggagaggagcttgtaccaagggactctactccattctcccctctcccccgcaaccaacttggagctcaccagggttgggagggaagtggctgagagctcacaggcaccccctccgcccccgagagggagcccacagctgtgggagggnnnnnnnnnnnnnnnnnnnnnnnnnnnnnnnnnnnnnnnnnnnnnnnnnnnattggacaaacctcaccagtacctttgttgcagagctcacagacatggtgaggaccctggctgtgcaccttcatgtggtccgaaatataagccgagctcagcatcttgccacacacgtgacatggcactttctcctcgtgtcgtactgtgtgcgcccgcagccgatccttcgtggcgaaagctgcctcacatttctcacatttgaagggccgttctgttgagtgcacttgtctgacgtgactgttgaggtgatccggcctggggacacgttggggttggggttagggcggaggtggtgcgccccaaatccaccaaaccgcaccacaggcctttccgaggatccctgcgcctcctcccggagcccaggccgtcacagcgacacttaagcaggaaatccctcccctggagcccagcagccgctgccgccgccgccgcctcctcccacgcgaagcttccgtcaaccccaaggcccacctcctcgacaaaggaccaccccttgctccctggtaaccgggagaggcttcctccctccgccctgggagtggctccccttccccagcctcagcagccgcctccctccccgccagccacggccaggccacctccgtcgcgtccccaa

SEQ ID NO: 161952 - DNA, 774 bp, Homo Sapiens
ttccccggagacgtccagtccggcgggcagcaatgagacccactttgcggccagcaggggcatctctgcggatggtggagggcttgccgatgtgctggtggttgccacctccaaaaggatgctccacagggattcatggccacaccccgtactcgtggccagcagttcctctttgccttatatttgtggtacgcccggccagccttcaagatgggtttgtcaattcggccacctccagccaccacaccaaccacagctctgttggctgaggagataaccttcttggagccggagggcagcttcacacgggtcttcttggtctcagggttgtgggagataacggtggcatagttccctgatgcccgggccagcttgccacggtgtccaggcttctcctccaggcagcacacgattgtaccctcaggcatggtgcccacagggagcacattgccaatgttgagctgggccttcttgccgcaatacacaaactggcccgtgtgaatgccctcggcggcaatgaacagctccgtccgcttcttaaaccgatacggatcccggaagaccaccttggcgaggggcgcgccgcggcccgggtcgtggatgatgtccttgacgatgcccttgatgtagccgtgccgctcagcgaaatccacggcgcgcaggcgcgcagcgcctttacggtgcttcacgtgcgcgcggaacacagacccggcgcccttcctctgtccacggatcacacggcccatggcgacgggtcctgttcaccagcgccaa

SEQ ID NO: 161953 - DNA, 1506 bp, Homo Sapiens
tttccaggggacaaagggctgccccctttgcatccactgcaagaagacgttcggcgggagagaagcccgtcaccaggcaacgtgatggtgcggactcccgcaaggtcaagtggttcccgggctggtggcagcaagtagacatcgggcctgtgcagggccacccccttgggccgggagattgtctgcttcagtggcgaggggcagggtctgtgtgggtcacggtgcacgtgaacctctccccggaattccagtcatcctcgcagatgctggcctcacccacggcgctgaaagtggcattggggtggctctcggagatgttggtgtgggttttcacagcttcgccattctggcgggtccaggagatggtcacgctgtcataggtggtcaggtctgtgaccaggcaggtcaacttggtggacttggtgaggaagatgctggcaaaggatggggggatggcgaagacccggatggctgtgtcttgatcggggacacacatggaggacgcattctgctggaaggtcaggcccctgtgatccacgcggcaggtgaacatgctctggctgagccagtcgctctctttgatggtcagtgtgctggtcaccttgtaggtcgtgggcccagactctttggcctcagcctgcacttggtccgtggtgacgccagaccccacctgcttcccctcgcgcagccaggacacttgaatctgccggggactgaaacccgtggcctggcagatgagcttggacttgcgggggttgccgaagaagccgtcgcggggtgggacgaagacgctcactttgggaggcagctcggcaatcactggaagaggcacgttcttttctttgttgccgttggggtgctggactttgcacaccacgtgttcgtctgtgccctgcatgacgtccttggaaggcagcagcacctgtgaggtggctgcgtacttgccccctctcaggactgatgggaagccccgggtgctgctgatgtcagagttgttcttgtatttccaggagaaagtgatggagtcgggaaggaagtcctgtgcgaggcagccaacggccacgctgcttgtatccgacggggaattctcacaggagacgagggggaaaagggttggggcggatgcactccctgaggagacggtgaccgtggtcccttggccccagacgtccataccgcgatactgatatcgacagctggccctgctacaagatccgtacttctctctcgcgcagtaatacacggccgtgtcttcgactctcaggctgctcatttgcagatacagtgacttcttggcgttgtctctggagatggtgaatcggccctccacagagtccacataataactctcacttccatcttgctttatattggccacccactccagccccttccctggagcctggcggacccacgtcatccaataggtactaaaggtgaatccagagcctacacaggagagtctcagggaccccccaggctggaccaagcctcccccagacccaa

SEQ ID NO: 161954 - DNA, 386 bp, Homo Sapiens
ccataatatttaagtttttcgatgtttagatatttttcttcggtgaagcacaagtttcttttcatggtccctgatcaattttaaacagttggaacaccggtggcactgttaactgctttctgggcagcctctttagcttggtgggcttgtagtacagctacagcttcatcaaccttagaacggagtgactctggagactcgagcatatgaagaagttctgaattatcaatctccaacaacatgccagtgattttaccagcaagagtagggtgcatggcttgaataagaggaaacagccgttcacccaacatttgcttttgctcttgaggaggggcttgatgcggaacatggaagccaacttttttgtacaaagtttttttatttgt

SEQ ID NO: 161955 - DNA, 841 bp, Homo Sapiens
  misc_feature (699)..(750): n is a, c, g, or t
tgtttaaacagagcagttacagggacgggacatggaggatggccacacatagcacagccaccagtgtcctcagaacttagcagtcagggtcacagaacagtattcaaaatgattgcccacctgttttagaaatctaaaattttacatgtaactaagagcaaagtgctatgtgggttttagaccatgactgtttgtttgctctcctgccctaccaccaagcaaagcagcagggctcctgggggagagggatttcaacccccctgatggcagggggtgctctggggaggagagaggagagaacaggctgttttggaaaattccagcactttgacttcgggccatgcgtctctcctggacgttctgagtacggatcgttcaggcttcctgccgtttccaaaaggattggtcagccggtctgcaggacacctctcagtttctccttttaccagcaggaaaatgtacatttaagcataaaccacaaggctgcacacggtgagaccaggccactgcccagggagctgttgtcggaggaggagtgtggaaaaggggccagggaccccgcaccccacaccaaattaggaacaggtagaatcccaaaggcaaggcccggccacttgtagctaccctgatccagtctcttgagcagcacaggtagaggcctgtggcccccgactcccagccatactcagacctgagcannnnnnnnnnnnnnnnnnnnnnnnnnnnnnnnnnnnnnnnnnnnnnnnnnnngggaggacccggcgggaagagcccgtgctcagagctccgaacttcactttacattccagtcccgggttacactagcacaaaggacacccaa

SEQ ID NO: 161956 - DNA, 902 bp, Homo Sapiens
  misc_feature (703)..(734): n is a, c, g, or t
tgtcttgggcgaggagggcccctgcggaattgtggtctatatcccccgatacatattttgcctcactggtctacctgttctcttgcaccctggttgtcagcaccctccatcacttctccctgcacaggagggttgaatactgtggtcgacgcccatagggtctccgcatgtagtaaggtgggaaccttcgcctgcggtagggccggcgttgttgggcctggccttcgggagcactctccgatccctcgttcttttccccactctcactattctggtaattttgctggtaattgcgtggaggacccctacgacgtggatagcgtctataatggttacggtctgctgcatatttactgccttgaactggaacaccaccaggacctgtaacatttgctgcctccgcacccttttctccttcaacaacatcaaactccacagtctctccatctcctacactgcgaaggtacttcctggggttattcttctttatggcagtctggtgtacaaatacatcttccttggtgtcattcctgttgatgaaaccatatccgttccttacattgaaccattttactgttcccaaaaccttcgttgcgatgaccttcttgtccccgccggcaggcgccgccgatgtgaggccgcccgggccaccgctccctgcgccgctgcccgtagtgccgggcttggtgtcggcggcgctgannnnnnnnnnnnnnnnnnnnnnnnnnnnnnnntgctgggtctcggcctcgctgctcatggttgcggtgatggtgactggggccggctgcggcagctgcggctcctcccggggtgtgatggtaactaggccggcggcggcggtggggctgctcagggctctctggggtccgctctccgctccccaacttttttgtacaaag

SEQ ID NO: 161957 - DNA, 981 bp, Homo Sapiens
  misc_feature (341)..(379): n is a, c, g, or t
ccccgggagccctgccaccaacagtccggccggcggcagcaccccgcaccagtaagatgccacaagagaccaaaccaaatgtacgagaccatccggcctggagaggcagagctccccaagggatctgggaaggcttcaacatatgaaaccaatcagccattggaagacgtggatggaagaggcgagggcaaaaggaagagatgaggggcatggagagagactcagggaagaaggagaaagagcaatcatgcagctttgggacaaatcttttgttgctttatcagattctcagtcaatcaattggtgtttgctagaaccggggtacgcaggggagtgttgannnnnnnnnnnnnnnnnnnnnnnnnnnnnnnnnnnnnnncgggcatcgccaagctgcccggggggccttcactttgcagtcatcatctgtacaaactcttcataattgacctggccatctccatcgatgtcagcctccctgatcatctcatccacctcctcatcggtcagcttctcccccaggttcgtcattacgtgacgcagctctgcggcgctgatgtagccattcccatccttgtcaaagacacggaacgcctctcggatctcctcctcactgtctgtgtccttcatctttctggccatcatggtcaggaactccgggaagtcaatggtcccgttcccatctgcatccacctcattgatcatatcctgcagctctgcttcagtggggttctgtcccagggatctcatcactgtccccaactccttggtggtgatagtgccatctccatccttgtcaaagagggagaaggcctccttgaactctgcaatctgctcctcagtcagctggtcagccatggcgaggcccggggtgtccggagcacggggatcaaggttcctccggcggcggcagcagctgcagcagttccagctccgccgcgcgtccgcgcctccacactcactgcccgcagcgcgcgccaa

SEQ ID NO: 161958 - DNA, 805 bp, Homo Sapiens
  misc_feature (108)..(163): n is a, c, g, or t
caacagcggggcctcggtcagccccgagtcgtcatccatggttgatgaagatgcccggggtctcgcattcaggcccctcctccccgaaaatccatggttcctcagacnnnnnnnnnnnnnnnnnnnnnnnnnnnnnnnnnnnnnnnnnnnnnnnnnnnnnnnncccactcctcccggcttcagcttctgttcctcctccagctgccgctttaaggccttctcctgggccagtcgcaggccgatgaggtcctgagggggccggggtgttggggccggggccaaggtcaggggctccagatcatcctcctccaagggccccgcaggcgcctccttggcctctggctcctgcttgccgctggcctccaagatggtcatgatggagttagggatgtgagcttgctggtggggggtgaaggagcggacatgggccagcaggggctcccggagctttgggcacttgtcaaagacggctcccagctgctggggcggcagctgcaggatgacctggaagctctggggctttgtgcgctggcagcacttgatgaagccctcccacaccttggggtacttccacacctgcttcatgatgaggcgggacaggatgttcatgacgaagccccccaggcgggggtacatggtcagggactggatgacggtcctcatgagcagcatgggcagggggctctgctccatcagctgctgcatcaccacggccagcacctctgacgtgtacacgttccgctccgcaaagcacaggttgttggcggttgatgatggatccaacttttttgtacaaagttccttt

SEQ ID NO: 161959 - DNA, 925 bp, Homo Sapiens
  misc_feature (411)..(466): n is a, c, g, or t
cataaaagacaactttgtacaaaaaagttggcgcaccaaccagcaccatgcccatgatactggggtactgggacatccgcgggctggcccacgccatccgcctgctcctggaatacacagactcaagctatgaggaaaagaagtacacgatgggggacgctcctgattatgacagaagccagtggctgaatgaaaaattcaagctgggcctggactttcccaatctgccctacttgattgatggggctcacaagatcacccagagcaatgccatcttgtggtacattgcccgcaagcacaacctgtgtggggagtcagaagaggagcagattcgtgtggacattttggagaaccagtttatggacagccgtatgcagctggccaaactctgctatgacccagattttgtannnnnnnnnnnnnnnnnnnnnnnnnnnnnnnnnnnnnnnnnnnnnnnnnnnnnnnntgcagagtttgtgtccaaaattgattccttctggtgagttcttggtcttgctgactctaagaatgaagccgcggtcctacacggtgagtgttacagttcttaaagatggtgtgtccggagtttgttccttcagatgttcagatgtgtccgcagtttcttccttccggtgggtttgtggtcttgctgacttcaggggtgaagccgcagaccttcgcagtgagtgctacagctcttaaaggtggcgcgtctggagttgtttattcctcttggtgggttcatggcctggctggcttcaggagtgaagctgcagaccttcatagtgaatgttatagctcataaaggtagttcaaacccaaagagtgagcaacagcacgatttatggtgacgagtgaaagaaaatacacttccacagcctggaagacaacctgagcacgttgctactgctgcttgggaaggcgg

SEQ ID NO: 161960 - DNA, 903 bp, Homo Sapiens
gacaggatcctccctgtcccatggctaaatgcctctcagaactcacagatggtcagtcgggaagtaccaggcagttcctgtcattccactgcccatctgtgtacatctccacacactgctcttttccccgacttgcgggctcccctcggtaccagttggtgtagtttacaggggtcccgtctgagtagcggaagtctccagggctgggaccctcagtcaggcctacataggcatatgtgttgtacttcttcacgaagcttgcaatggcctcattttcctctggattccttgggacagcaatgcggccgcctgctctggcacatgcctcctgaatggcatcaaaagtgatggactgcccattgctggagaagaccttctctcctactgtcattatggagccctgcagactgagggctccccttgtctgcaggatttgatgtctgaagtcgtggagtgtggcttggagctcctcatctagatgagctggaagccctggagggcctctctcgccaggctcccccttctctccacgctctccagggataccaggggctccaggcagcccattatttccaggaggacatggtgtttctccaggtggacccatggggcctggagggccagggtctcctttgacaccatctctcccgtccctgcctggcaggccgtgggatccaggagtgccggggataccagggcttccaacacaaacgtccttcacttcgcacgcagcaccagaggctgccatcaagatgaggttgagggccagagggcacagccacatggctctgggtccagtcgctgctcctggcacctggcatggcctcatgcttcaggcctccggctggaggttgtggggtctccaggccacacacagagcctccagctgcttgggtctcccaa

SEQ ID NO: 161961 - DNA, 1023 bp, Homo Sapiens
aaaaccgatcagaaaacaccgtttatagtattttcaaacagataaattattacagtaatactttatccccaacatttctgagcccattaatagagtacttctatacatataaagatataataaaaggatacggtatttattgcaacagcaaattaaaggttgttaaaatatatgtaacttaaatacccccccaacattgatatagtggcttcttattccttaaacatagaaattcccactcttcattgtagaaagataaagttctttcatcaaaaggcacattcttatcttcgaggatgattggcatcaaacaatgtgttgtcatcatcctcatcatcctgttctaaaggtgtcaattccatattttctatgttagtgtccaaaactccatatctcctagtctttcggtttcttcttctcatcctgaccgtcctgaccacgaagtacaccagcaccgcgccgctcaccaccatcaacacggtcagggcccgctgggtcatgggcttgtcgccagggttggggctcacagcaaggccgccacccaccgagccttccccggccttccctccgtgatcgtccgtctcaagcccggccacagggttgctgccattgcctccctcggagccccgcggctccgcagcttcagccagaccacggcccggctgctgggcaggggtagggcccggtggcagcggcggtaatgtccgtggtctagggtcaggaggcccaagacctggcgcggcctcggctgcctgcagcaggactgccaggggcccgcttagttcaggcagcaacagcaggaggaggacggaagccaagaggtggctgagacagcagcagcactgcgaggccttcatcgttcccggaccgctctctcaccacccgggagccgccaggcccgccacgctggctccaagagggaccataggcgcggtggagaatgaagcagaggtgaccaaacgccagggagaggcccggtcgtggcaggtggcagaagctacagcagtggcagctgcccgccaa

SEQ ID NO: 161962 - DNA, 1197 bp, Homo Sapiens
  misc_feature (167)..(183): n is a, c, g, or t
tccacccaccctcaactcacacacaccctggatcagcaggtctaggctgaaagagagaacagtgaggttcccagggtggcaggtgggtatgacaggcaccataccccaacctgctcaaaaccccaagttagcaaaggaagacagaagactggcttgcctgcccattnnnnnnnnnnnnnnnnnaacagcagcctcacatccctgatcagtaacactgtgattctgaggtgccaagaggaggggctttaccagcccctgggtgattactaccaaacggcccagaggccagagagagagggcagggaatttgccccactacctgctcagtattagcctatgctgctgctttcagcttgtgcttgtgggtgcttccagcccctctcccttccagaacaggtatggcttgaaaccagtcctcttgacagaagaagtcagttccaggaggtcctttctcccccagcctgggaggatgggttgtgacgccttgggacagctacacaagcttcttggcttcaaagaagctcttgaggtgccgcatctgccagacaccgatggccacgaggatgagggtctgcagaatggaccaccacagcacccgctggttggtgctctcactggtctgccggaagcgctcctctcgccaccgctggtagttctgctctttctggatctgctccacttgttccaccagctgtcgcactcgtagctgcaactcactcaacttgtctttagcagcaatttctgcatagtcattggcatgttcacctacctggatgtccaggtgaactctcagcatgcctccagcaaagagggagaacttggtggaattggagtgaagacagatctggtgctcaccaggggtatgggaagtgaaagtgaacctgccctcggagccatactgccgggccaggatgaccttgtcctctgggtccttcacctccacaaacatgccaagccccggggtggccggctggtactcctcccgctgcttgtcatacagctgcgtccggtagtttcctatgaccatggtctcgtccgggatctcctcaataaagcacttcttctccgtctctccgatgtgaaagtagagcgcgcttccgcgcgtcgccagccacagcaccagcaggagggtccgcatcactctacccagcccggttccgggccggggccggacgagcagcacgcccagctccccaa

SEQ ID NO: 161963 - DNA, 1383 bp, Homo Sapiens
tgtgggcacggctctgtacatcctcgggcagggtggcaggcatgaaggtggctgggcggcacgtggctcctctagggggtggtctgacccccaagcatcgcttatcaaagccactgccaagcagacttccgtcccatggcaatgtccccagcgctccctcctagggggcccccgacaccttccccgagagcccacctgccctgtgccagtgagccaggggctggcctccccccgaggacttcaggacaccgggtgggctctagggcacttggccctggcaggcaggctctgagctacggaacagattgaggctggaggccagtgtcactgctgcccggatttcttctccttctggaagctgaagctcgtacgtctgttcagttttctttgtttttgagcaaagtagtcagcctgggcagtgctagctcgcgattccaggatgtagttaaccttgagcacaatttcattgacggtagcagcgtccgattcaaagtagaggtgtttatagtcgtgattgcttagatacgtgagtttaaatattgcgtgactggggcttttctcttcagcaaggtcacaggcacagagcaggtcggaatcgattgagatgggtttctgcttaatccaaaacttagtgctggctttctgattcgtaacagggtctatctctactttgtctccagagatacctagctgtacgtcggttgtgaatcgcagtctgtggatcatgctgactttgaatgacttgtaatgatggctgctaagcatatcctgtactgtggctatgtcaatttgcgaatcctcctcaaaaaccccgtctgcccttgaacctgaaactttctgggatccttttcttcgcttcactgccttcagtaagatttccttcatggtaacctttgtgttgtccacctgaataagggagaatccatgagcagcatttattcgaacaaagagtgactctttggatgtcagaccaggagatgagtacttttcaaccagggccaaagtactgaagccaaacttatgaatgggctcattggaatccagcggggggaaatcggtgtccacctccccatcatcctcagcaatatgcaggcagtaggcactgacattgtcattgagcttcggctcccgtccttcgcttgtatactgccagcagatgagcccgatcaggtcctgcaccctggcgctggccattgtcaccacggtcattggcagcagtctgtcctggctcgagtgcagagggaggtagacatcgatcttcttggttgctgttgtacctacatgacccttgccatcaaatttggaatactcgttaaaagggttattcagctgcagagggcactgttctaggcgtacagataatatcgactgcttcccagccaa

SEQ ID NO: 161964 - DNA, 1013 bp, Homo Sapiens
ccagaaggtcaaagagcttcccggtcttctcgttgtccttcagttccacgtagtactgctgcaaacccatgcagcgtcaatttgtctcatcatccacgaagatctccattgggatcttgcatgaacttgcggcagactggacggatctctttgctcaaggtagcactgaacatcatgactgcttctcgtggggggtcatgcgaaaaatttcctggacatcccgacgcatgtcgagctgttcaagcatcttatcacattcatccaaaataaagtgtttaatgtgtttgaggttgaggctcttatttcgagccagggctaggatgcggcctggagtccccacgacgatatgcgggcagttcttcttcagcacctcttcatccttcttgatagacagaccaccaaaaaaaacagcaaccttgacattgggcatgtatttagagaagcgctcatattccttgctgatctgaaaagccaactcccgagtgtgacacatcaccagtacagacacctgcccagtaactggctccagctgttgcagtgtggccaagacaaacactgctgtctttcccatgcccgacttggcctggcacaggacatccattcccagaatggcctgagggatgcactcatgctggacttctgacggatgctcaaagccacagtcgacaatggcccggagcaactctggcttgagcaggaagtcacgaaagccagagctgtggatggagacataggagcccttgacatccttcttggcaggggcctcagccccatctcccccagctgctgtctccacctcatcatcttcatagtccaagagctcattgtccacatcgttctctgccataactgggccggcaggggaagaagggaagggggatctggatgggttctcgcaaaataggtgaaaacaaggggtgaagagtaggggattgaggaacagcaaaggaaaacaaagatactatttctaacagaagagctaaacagggagagcgcgtatggcggcagcccaa

SEQ ID NO: 161965 - DNA, 877 bp, Homo Sapiens
  misc_feature (277)..(290): n is a, c, g, or t
tttcaaaacagatttgtaaaaattgtatttgttaacactgtgcacaaacgttttatactaaataaatatcaaactacattcttctgaaagatgtttctattatttcttaggtcacttccatatatattatgtatagtgaaaccatttttaaaaagcaatgacttaggcaaaccaaccctagtttgttaaaccatttccctgtttttatttaaaaatgataaggttgtgcttctgtataaagtttgtacatctagcaatgtaaaatactgacacattnnnnnnnnnnnnnngtagaaactcaattcttttgattcagtgctcttgtgtttttaaaaaaggaacaaaaagtaatgcaagactcaaaattttggagtggttggcgtgcctctcttcattttactttttgactggctgcctgtatgccgatgatgatgtagctgagctgtttgtgctgctgctgctgccatagccatttgatgctgcaagaatcgcaactgcagctgcctgtgactgcataaaacttcctactccagtaaggttaataacagcagcttgctgagcagataaggcctgttcttgactggttgaaccttgctcagaaccctgctcccctggctgttgaggactacaagttgtgggctgctgaggttgttgtggtgtaaactgggagagctgctgttgctgctgctgcagagtgttaaaaataagtgaaccacctggaagctggagtagatttaagggcctgagacttgaagtattttttaaaccaaatggaacacctgcttgagaagctgcctgcattgcactgggcagtgctttttggtggcagacctccaacttttttgtacaaagttggcctctttaaagaagcattgct

SEQ ID NO: 161966 - DNA, 448 bp, Homo Sapiens
accacttggtttccttttgagccgcgtcataaggaggcaatctgtaaaactagcacaggtctcccgcggttccactggctcacccacatgattagcagagtgcacgaaaaaataaaacttctattaaggaatcatgctgagcacaagatcagagaggttgtgacattgcaaactcgatagatgcagggggcctgggagactggcgttctccaaagggctcccaacaccatctctcctctgatttctgtgacaaatgtggaaagctacttgcttggaggtactgggggaactgatgggggaactttcatcctgttaggaactccgctttccattcctgggtctctgtcttgctccctggagatggatggatcacggagggggccacagtcagctggggcaacaggtactccctacggcccaacttttttgtacaaagttttttattgtt

SEQ ID NO: 161967 - DNA, 912 bp, Homo Sapiens
ttggggagcccagccctgggattttcaggtgttttcatttggtgatcaggactgaacagagagaactcaccatggagtttgggctgaggtggctttttcttgtggctattttaaaaggtgtccagtgtgaggtgcagctgttggagtctgggggaggcttggtacagcctggggggtccctgagactctcctgtgcagcctctgggttcacttttagcggctatgccttgagctgggtccgccaggctccagggaaggggctggagtgggtctcagctattagtggtagtggctagtagcacatactacgcagactccgtgaggggccggttcaccatctccagagacaattccaagagcacggtgtttctgcaaatgaatagcctgagagccgaggacacggccgtatattactgtgcgaaactgtcttttggggtaggaccctgggggtacggtttggacttctggggcctggggaccctggtcaccgtctcctcagcctccaccaagggcccatcggtcttccccctggcaccctcctccaagagcacctctgggggcacagcggccctgggctgcctggtcaaggactacttccccgaaccggtgacggtgtcgtggaactcaggcgccctgaccagcggcgtgcacaccttcccggctgtcctacagtcctcaggactctactccctcagcagcgtggtgaccgtgccctccagcagcttggggcacccagacctacatctgcaacgtgaatcacaagcccagcaacaccaaggtggacaagagagttgagcccaaatcttgtgacaaaactctcacatgcccaccgtgcccagcacctgaactcctggggggaccgtcagtcttcctcttcccccaaaccccaagacaccctcatgatctcccgga

SEQ ID NO: 161968 - DNA, 1495 bp, Homo Sapiens
gagaacccgggggagcggggggcttggccggccaatggcactcatttacccggggacagggagagggtttttctgcgtgtagtggttgtgcagagcctcatgcatcacggagcatgagaagacgttcccctgctgccacctgctctttgtccacggtgagcttgctatagaggaagaaggagccgtcggagtccagcacgggaggcgtggtcttgtagttgttctccggctgcccattgctctcccactccacggcgatgtcgctgggatagaagcctttgaccaggcaggtcaggctgacctggttcttggtcatctcctcccgggatgggggcagggtgtacacctgtggttctcggggctgccctttggctttggagatggttttctcgatgggggctgggagggctttgttggagaccttgcacttgtactccttgccattcagccagtcctggtgcaggacggtgaggacgctgaccacacggtacgtgctgttgtactgctcctcccgcggctttgtcttggcattatgcacctccacgccgtccacgtaccagttgaacttgacctcagggtcttcgtggctcacgtccaccaccacgcatgtgacctcaggggtccgggagatcatgagggtgtccttgggttttggggggaagaggaagactgacggtccccccaggagttcaggtgctgggcacggtgggcatgtgtgagttttgtcacaagatttgggctcaactctcttgtccaccttggtgttgctgggcttgtgattcacgttgcagatgtaggtctgggtgcccaagctgctggagggcacggtcaccacgctgctgagggagtagagtcctgaggactgtaggacagccgggaaggtgtgcacgccgctggtcagggcgcctgagttccacgacaccgtcaccggttcggggaagtagtccttgaccaggcagcccagggccgctgtgcccccagaggtgctcttggaggagggtgccagggggaagaccgatgggcccttggtggaggctgaggagacggtgaccagtgtcccttggccccagatattggatcgcgttcggccagtcaccgtagtcctcgcacagtaatagacagccgtgtcttcagatctcagcctgctcagttccatgtaggctgtgctcgcggatgtgtccctggtaatgttgactctgccctggaacttctgtgaatattttgtgttacctttgccagcgttgatccatcccatccactcaagcctttgtccgggggcctggcgcacccaatgcatatcatggcttgtgagggtgtctccagaggccttgcaggaaaccttcactgaggccccaggcttcttcacctcagccccagactgcacaagctggacctgggagtgggcacctgtggctgctgtcaccaaaaagaggatcctccaggtccagtccatggtgaggggttgtgctctgggggcttctccaacttttttgta

SEQ ID NO: 161969 - DNA, 827 bp, Homo Sapiens
ttggcgcctcaccatggactggacctggaggatcctctttttggtggcagcagccacaggtgtccactcccaggtccaacttgtgcagtctggggctgaggtgaagaggcctggggcctcagtgaaggtttcctgcaaggcttctggatacaccttcactaaatatgctctccattgggtgcgccaggcccccggacaaaggcttgagtggatgggatgggtcaaccctggcaatgataacataaaatattcacggaagttccagggcagagtcacctttaccagtgacacatccgcgagcgtggcccaaatggagttgacaagtctgagatctgaggacgcggctgtgtatttctgtgcgagagcttcttgtggtagtgattgctacactagcggataccactttgacctctggggccagggagccctggtcaccgtctcctcagcatccccgaccagccccaaggtcttcccgctgagcctctgcagcacccagccagatgggaacgtggtcatcgcctgcctggtccagggcttcttcccccaggagccactcagtgtgacctggagcgaaagcggacagggcgtgaccgccagaaacttcccacccagccaggatgcctccggggacctgtacaccacgagcagccagctgaccctgccggccacacagtgcctagccggcaagtccgtgacatgccacgtgaagcactacacgaatcccagcccaggatgtgactgtgccctgcccagttccctcaactccaccctaccccatctccctcaactccacctaccccatctccctcatgctgccaccccccgac

SEQ ID NO: 161970 - DNA, 1233 bp, Homo Sapiens
tttttgttgattagtaaaagagaccaattcccatattctcgtccgactcctccgactcttccttggagtgagccttagctggggctgcagcagcagctggagcagatgtaaaggcagcagccacaggtgcagcagccacaaaggcagatggatcagccaagaaggccttgaccttttcagcaagtgggaaggtgtaatccgtctccacagacaaggccaggactcgtttgtacccgttgatgatagaatggggtactgatgcaacagttgggtagccaatctgcagacagacactggcaacattgcggacacccaggatttcaatggtgcccctggagattttagtggtgatacctaaagcctggaaaaaggaggtcttctcgggcccgagaccagtgttctgggctggcacagtgacttcacatggggcaatggcaccagcacgggcaagcagctggcactttattggcccagcaaccatttccctgatctcagtgaggtccttcttggtgaacacaaagccccacattcccccaggatatgaggcagcagtttttccagagctgggttgttttccaggtgccctcggatggccttgcgcatcatggtgttcttgcccatcagcaccacagccttcccgcgaagggacatgcggatctgctgcatctgcttggagcccacattgtctgctcccacaatgaaacatttcggataatcatccaatagttggatgatttggcactaaagcagagctagtaatgctttttgagtttcatgttggtttattttcacagattggggtaacgtgcactgtaagacgtatgtaacatgatgttaactttgtgtggtttaaagtgtttagctgtcaagccggatgcctaagtagaccaaatcttgttattgaagtgttttgagctgtatcttgatgtttagaaaagtattcgttacattttgtaggatttactttttgaacttttcattccctgtagttgacaattttgcatgtactagtcctctagaaataggttaaactgaagcaacttgatggaaggatctttccacagggcttgttttccaaagaaaagtattgtttggaggagcaaagttaaaagcctacctaagcatattgtaaagctgttcaaaaataactcagacccagtcttgtggatggaaatgtagtgctcgagtcacattttgcttaaagttgtaacaaatacagatgagttaaaagat

SEQ ID NO: 161971 - DNA, 916 bp, Homo Sapiens
  misc_feature (495)..(521): n is a, c, g, or t
gcacacatgtgcacatatacacatgcaggcatacttgccgaggacccatgcagcaaccatgagcataggttcgtcagacagaaacaagccaaagcccatcaggaagtaaatgtgctacagatcagcacttcctagctgtttctgttctaccatcattttttccccctagaagactgtatgtatcccttcttttcttcatatcaaatacagtagctctaataactatcatttggtgaatgaccattatgcagagcaccttgcagacattttctcattttaatgtgaacaatttcaagggctaggtggtagatgggagtggttatactggcatgacaccagtcccaaatccaatggccttgtctctctgactagtctgacctctcagcagtgtctgatacttgtaattaccacccctcttgcctagagcaggctcttacatggtgtatgtgacattatactccttctcctccaacatctgctcttccctgatacatnnnnnnnnnnnnnnnnnnnnnnnnnnngaagacagtgagttttctccaggactcagctcttggccttcttctctcttgcacctagagcaaccttatccatattcaaaatttcaaatatcctctctgtgtggatgactcccagatttatagtgagttctcatttttaaagagatttccatataaatgttctgccacaacttccaattcaatgggtctaagaggaagtcgggtgtcctctaagcctgtgccacctcctctatattttctttgtggtcctgatctctccatctccagagatgtggtactcactacctcacaatatccccgcctccattgttggatagtcctaatgggtatatagttctctttattctgaactacaatctggttccctttcccttccacatattggtcctacccaa

SEQ ID NO: 161972 - DNA, 913 bp, Homo Sapiens
  misc_feature (320)..(329): n is a, c, g, or t
  misc_feature (510)..(510): n is a, c, g, or t
ccaaaccatccacttgcaaattctttggtctcccatcagctggagttaagtaggtacagtgtgtatctttgagatcatgtatttgtctccactttggtggatacaagaaaggaaggcacgaacagctgaaaaagaagggtatcacaccgctccagctggaatccagcaggaacctctgagcatgccacagctgaacacttaaaagaggaaagaaggacagctgctcttcatttattttgaaagcaaattcatttgaaagtgcataaatggtcatcataagtcaaacgtatcaattagaccttcaacctaggaaacaaaannnnnnnnnnctatttaataatacaccacactgaaattatttgccaatgaatcccaaagatttggtacaaatagtacaattcgtatttgctttcctctttcctttcttcagacaaacaccaaataaaatgcaggtgaaagagatgaaccacgactagaggctgacttagaaatttatgctgactcgatctnaaaaaaaattatgttggttaatgttaatctatctaaaatagagcattttgggaatgcttttcaaagaaggtcaagtaacagtcatacagctagaaaagtccctgaaaaaaagaattgttaagaagtataataaccttttcaaaacccacaatgcagcttagttttcctttatttatttgtggtcatgaagactatccccatttctccataaaatcctccctccatactgctgcattatggcacaaaagactctaagtgccaccagacagaaggaccagagtttctgattataaacaatgatgctgggtaatgtttaaatgagaacattggatatggatggtcagatgaaagccaacttttttgtacaaagttggcccttttaaagaagcattgctcatcaatt

SEQ ID NO: 161973 - DNA, 933 bp, Homo Sapiens
  misc_feature (427)..(519): n is a, c, g, or t
tttcaatttctccacgtcaagagaaaagccaacatgtttttcctccaatgcataaaaggaacttccatagggctggcaggagtcaggctgttcaagacaactggaaggagttgaataacatctatccagtgagtcgtgcaagacttcaggctctactacctccagcagctccgtgctgagcatggggcatggtgggcttggtcttcttcctcttcttggtcctttttaattctgtccacgtcaagagccaagccaaggtactgttcctccaatgagtaaacagcactgctgtagggctggcctaagtcaggcagttcaagataacctgaaggagtcgaataacatctatccagtgagtcctgcaagacttcaggctctttctcatccagcagctccctgctgagcctggggcatggtgggttttgannnnnnnnnnnnnnnnnnnnnnnnnnnnnnnnnnnnnnnnnnnnnnnnnnnnnnnnnnnnnnnnnnnnnnnnnnnnnnnnnnnnnnnnnnnnnacgtcaagagaaaagccaacatgtttttcctccaatgcataaaaggaacttccatagggctggcaggagtcaggctgttcaagacaactggaaggagttgaataacatctatccagtgagtcctgcaagacttcaggctctactacctccagcagctccctgctgagcctggggcatggtgggccttggtcttcttcctcttcttggtcctttttaattctgtccaagtcaagagccaagccaaggtactgttcctccaatgagtaaacagcactgctgtagggctggcctaagtcaggcagttcaagataacctgaaggagtcgaataccatctacccagtgagtcctgcaagacttcaggctctttctcatccagcagctccctgctgagcctggggcatgatgggtcccaa

SEQ ID NO: 161974 - DNA, 1324 bp, Homo Sapiens
  misc_feature (118)..(118): n is a, c, g, or t
  misc_feature (122)..(122): n is a, c, g, or t
  misc_feature (331)..(331): n is a, c, g, or t
  misc_feature (338)..(338): n is a, c, g, or t
  misc_feature (843)..(856): n is a, c, g, or t
  misc_feature (1073)..(1132): n is a, c, g, or t
atacgcacggcccgatcatattgtgtatattcgtgtggcgtcggcgtgcatgtttcgttgtgacgatcttagtatcgctgcaatatttccattggtgatatagagttaaagtaagagntgtnatagcagcgcgcggagagtgatataataaatagagagggggcgtgtagtatgagtgcagctatataatgtattgagtagtgatgatattttttcggagtggcgccgcgtcgggcggggtgcggtgcttatagatatatggtgtagtaagataagtatagagtacgtctagggcggtctgttgaactatagaggccgtgtggcgtgtacnacatctntataatcacaagatgtgattttcgagcgtgggagcgggcccgataaaatagggccggtggctcgagtacacgtcttgttaagtgtgagcgcgcgacatcaatggtttatgtgtgcgtgtggagtgtcgtgtatagaggaaaaagaggatgtgtgaggagaaaatgtgagtctgtgtggtggaggcgtctatacgcagtgggtgagggaggtaataaaagcgggtgttgggaggtgtaaaggatttgcggcgttaattagtcgggtgcgggggcgggagaagagtaatggggacaacacaaggcgcgcggggcaacaagcgtgtttttataacaaggagaagaggagaggggtctattatttatatagacgaaacaatacaatcagaggggaaaaaaaagagcggaagagggagttgtaaatggtgagggagaaaaagaggggcgggcacacatattggggagaaaaatttttcgcgaaaagaacgtggggggagatatattttannnnnnnnnnnnnngggccggccgcggattgggagtttaaaagattatgggagtgggggggaaaagggagctggattataaataattgttaaattggtgaaaattgaaatataaatctacataaaaaaaacggtggaacaaactagggggggagaagaggggggcctccaagaggtttagggaggggaatgtggttacgcggtgtgaggggacataaagggatgggtatannnnnnnnnnnnnnnnnnnnnnnnnnnnnnnnnnnnnnnnnnnnnnnnnnnnnnnnnnnngaagaggcggggtggcggccgaggaggggacccggggtcgggcttgggccggggccgcagtgccgccgccgccccacgtcgcgcagcccggaccccgctccgcggaccgcgcggggaacagcgccgccgccgccgccagcgcggacccctctacctgggcctcgtctgagacgccacccaggcctcgctacc

SEQ ID NO: 161975 - DNA, 853 bp, Homo Sapiens
ggaggagggggtgaggtgaaagatgagctggaggaccgcaataggggtaggtcccagtggaaaaagggtcagaggccaaaggatgggaggggtcaggctggaactgaggagcaggtgggggcacttctccctctaacactctcccctgttgaagctctttgtgacgggcgagctcaggccctgatgggtgacttcgcaggcgtagactttgtgtttctcgtagtctgctttgctcagcgtcagggtgctgctgaggctgtaggtgctgtccttgctgtcctgctctgtgacactctcctgggagttacccgattggagggcgttatccaccttccactgtactttggcctctctgggatagaagttattcagcaggcacacaacagaggcagttccagatttcaactgctcatcagatggcgggaagatgaagacagatggtgcagccacagttcgtttgatctccaccttggtccctccgccgaaagtgggaggccagttactatactgctgacagtaataaactgcaaaatcttcaggctccagtctgctgatggtgagagtgaagtctgtcccagacccactgccactgaacctgtctgggatgccagtggccctgctggatgcaccatagatgaggagcctgggagcctggccaggtttctgctggtaccaggctaagtagctgttgctaacactctgactggccctgcaggagagggtggctctttcccctggagacaaagacagggtgtctggagactgcgtcaacacaatttctccggtggtatctgggagccagagtagcaggaggaagagaagctgcgctggggtttccatggttccctcccaa

SEQ ID NO: 161976 - DNA, 910 bp, Homo Sapiens
ctttatttattcaatctcctccaacattagcatattaaagccaaggaggaggaggggggtgaggtgaaagatgagctggaggaccgcaataggggtaggtcccctgtggaaaaagggtcagaggccaaaggatgggagggggtcaggctggaactgaggagcaggtgggggcacttctccctctaacactctcccctgttgaagctctttgtgacgggcgagctcaggccctgatgggtgacttcgcaggcgtagactttgtgtttctcgtagtctgctttgctcagcgtcagggtgctgctgaggctgtaggtgctgtccttgctgtcctgctctgtgacactctcctgggagttacccgattggagggcgttatccaccttccactgtactttggcctctctgggatagaagttattcagcaggcacacaacagaggcagttccagatttcaactgctcatcagatggcgggaagatgaagacagatggtgcagccacagttcgtttgatctccaccttggtcccctggccgaacgtgtacgggtaactgttattctgttgacagtaataagttgcaaaatcttcaggctgcaggctgttgatggtgagagtgaattctgtcccagatccactgccgctgatccttgatggggccccaccttccaaactggacgccttatagattagaagtttaggggctttcccaggtttctgctgataccaggccaaccaattattaacactctgactggcccggcaagtgatggtgacgctgtctcctacagatgcagacagggtggagggagactgggtcatctggatgtcacacttggcacctgggagccagagcagcaggagccccaggagctgagcggggaccctcatgtccatgctgtgtcctgacccaa

SEQ ID NO: 161977 - DNA, 898 bp, Homo Sapiens
tactccttgatgaaagggattggacctgtgggcatccttcagctgggacaggtatcggtttgtcacctcagggggcttgcccagggtgctgggacaggacgatgagttgaccagcgtctcgggtagccactatccttgtctagcgcctcctgcagcaggccctcagcggcctcccagcggccctgggccatgtggcaggccgcctgcccattgagcagcagcagggtgggtgagcacttgtcagccatctcctggaagatgtagtaggcatcctgcagcttctcaccacccgtggccaggctgacccaggcagtggcgagctgggtgagggtggcatcctcgtccaggtcctgcattctcttcagctccttccgggcgaggtccaggcggtccagcttcagcaggatctgcactgtcatggctgtgcactccaggctgtccccctggtgcagcgcacgcagggcggcatccgggttctggtcgtggagatagatggaggcggccatgagcaggaaggtggtgttggtcacgtccacgctcctgctcatctctcggtccagctcggccacgatgctgtccctccgactctcgtgggcgaggtagtcagcaaacatgcgcacggcctggagctcaggggccgaggagggcttgatctcatccaggaccacaccgaacttcctctgcgccaggtacgctctatacaggaagacgtccctctccacgtctctctctgggcttgatagcttcacccgctgcgcctcgtttatgcactgctggtagctgccgatgtagaaggcgttctttacgtcgaacagctcgtctacctccccggagccgccggaggccgggccgggggccggaggcgccccaacttttttgtacaaagttgcctttatcg

SEQ ID NO: 161978 - DNA, 931 bp, Homo Sapiens
  misc_feature (106)..(117): n is a, c, g, or t
  misc_feature (638)..(656): n is a, c, g, or t
taaagtaagcctctttcagaaatgacattttgttactcctctttttgggaaaaaagaattctttgaaaaaattgataagccatgtttgtgaaacacaaactgttcnnnnnnnnnnnnccagcaaaacgtcattctttccaagagccatcatgcatttctgacaataaacaatgaatagggtaagctttcgattctagcttctgaggcacacaggataggaattactctttacctgaagatgagccaaaataggatttggggcttctggcggtatgatcttgtacaaaaacactaccttttctctccagtgaacagcaataagcaatctattccccaacacaacctctatcccaaggaaattgtgatgcccagaattttaggtgaaagccaaagcaattattatataggattattaactttggccattgaagtttttcctcttcagaagtgttactaaaggggaaacagagcagttttctttgacttaaaattttaggactcatagactttgttccttcactaacagcagtgtccttcactaacagggagctggaatgaactgataaagcaaagcaagaaacaaaaagcaaggagccagagatgggccccaagggaaatgtaaggaaatggtagggacnnnnnnnnnnnnnnnnnnncaaattcacaagaaacaatcatctatctgtaatttagattctgaacaaccctcctcaccctctcaaaattcttaagtttcaacactgtaaaaatctcaaagagcatactagttaccatgaacctaacattcttccctaaaaaggcttccaaaaaagcactaggctattgtagtgattttgttagtgctgaggaccagctttctttaaaagccactggagagctatgatttcagaggctggttgccaacttttttgtacaaagtttgcttttatgt

SEQ ID NO: 161979 - DNA, 836 bp, Homo Sapiens
tggtgagtcccgcgtggccccgaggcctgcaggcccgggcctgtctgaggcgtacggggatccctgacgcccctcttttgttgggctgggcgggagggattggtggccactcagtgaccagcgcccgatggcaccttggagcggcaaggcccgcccgacccttttctcccccagggctctttgcacgcgcgtgtgctgccggtgtgtaaggcaggggggcgagaacccgggcgcacgcgcagcgtctcacctgcttctgcagggcctttgtggatgtgtaatatcttgggtaaaaatcatggtgccaggcagggagcttgacccagcgtttcctgaaaatttctggaaaaacctgaagaaggaaaacatttgaccttggaataaactaaggttgaccttaaagctggtctggttgctcaccggaggagcgacaacgacccctaacagacgtaaggaatcgggaattaaacttggaatattggcaggacaagcgtttagaaagtttcttccactctttgaccgagtattggttgaaaggagtgctgctgaaactgtaaccaaaggaggcattatgcttccagaaaaatctcaaggaaaagtattgcaagcaacagtagtcgctgttggatcgggttctaaaggaaagggtggagagattcaaccagttagcgtgaaagttggagataaagttcttctcccagaatatggaggcaccaaagtagttctagatgacaaggattatttcctatttagagatggtgacattcatggaaagtacgtaaactgaaataagtcactattgaaatggcatcaacatgatgctgcccattccactg

SEQ ID NO: 161980 - DNA, 1249 bp, Homo Sapiens
ctgactttggactttattctttaaacaaattgcagagaatagagaaaaaaataggttatttacagaaaacaatatctacatatgtacttagaggtacaaatttggtgacagaaaagacttcagtatatgctggcatcttagaagcagttctcaaagagcttagttttattttcttgaattttaagaatgcctaagatccttcttcatcctcgatcttgggagccaagtagtattttaagtgtcccatatccgcaattttatactctacaacaaggggtacatctgcagacatactgagtgtcaccgttgaagagagtggagtggcttttgtaaagaagttcaggtacctcagtgcaaaagttagttgaactggttcattcatctctatggtaacagcttcctcctctttatcgacattacttgtctgtgacaatttaatgtttccatttccaagttctccacttgcagaaagtttcagactatgaaatgaagttgatggatttagatgttgaacaacttgggattccagaacaggagtacagctgtgtagtaaagatgccttctggtgaatttgcacgtatatgccgagatctcagccatattggagatgctgttgtaatttcctgtgcaaaagacggagtgaaattttctgcaagtggagaacttggaaatggaaacattaaattgtcacagacaagtaatgtcgataaagaggaggaagctgttaccatagagatgaatgaaccagttcaactaacttttgcactgaggtacctgaacttctttacaaaagccactccactctcttcaacggtgacactcagtatgtctgcagatgtaccccttgttgtagagtataaaattgcggatatgggacacttaaaatactacttggctcccaagatcgaggatgaagaaggatcttaggcattcttaaaattcaagaaaataaaactaagctctttgagaactgcttctaagatgccagcatatactgaagtcttttctgtcaccaaatttgtacctctaagtacatatgtagatattgttttctgtaaataacctatttttttctctattctctgcaatttgtttaaagaataaagtccaaagtcagatctggtctagttaacctagaagtatttttgtctcttagaaatacttgtgatttttataatacaaaagggtcttgactctaaatgcagttttaagaattgtttttgaatttaaataaagttacttgaatttc

SEQ ID NO: 161981 - DNA, 969 bp, Homo Sapiens
taattaggggggccagcaaaaatatcaagggtcaaatatcgcacatttctgtttaggccatctatggctttcatctcctctgaagtcaactggaattcaaacacctgcacgttctgtctgatgcggctgctcattgtagctcttggccaggaccacaaccccacgctgtagctggtagcgcagggcaatcagggctggggttcgcttgtgctttttttgccaaggcacaaaggactgggtcctccaagagcaccggggagttcgggtccacccatggttcttctcggtgggatcccagagcactataggcaaccagaacaatgtcttttgacttgcagaaatccagcagttttctctggttgaagtaaggatgacattccacctggttgcagacaggcttgtacttgagccctggcttgttgaggatcatctccagctgcctgtggttgaagttggacaccccgatggacttggccaatcctgcatctttacacttctccatggcctcccacgtggcacagagatccactgtgtcaaatagtatttttccattttcatcttttgggatcacttcctcacctggctttacagacactggaaaatgaataaggtagaggtcaacatagtccaattgaagatttttcagtgacctttccaaggctggtcggaccaactctggtcgatgggaattgctccaaagctttgaagtgtagaatatgtcttctctcttcacactgccatctgcaatcttgcttcggatggccagtccaacctgctcctcattattgtaaacatgtgcagaatcaatatggtggaacccggcttctattgccaatttgacggcctctagagctttacttttaggaacctctgcaggcgcataggtgccaaatcccaggacaggcatgaagtgaccatcattcagcttcacacactggtatttggaatccatttcccaacttttttgta

SEQ ID NO: 161982 - DNA, 1053 bp, Homo Sapiens
aagtgcaagggacgaaagcttaagctgtcagacattcttttctggacaaaaagatcaaagtttctacaaattgctaaagctttgcacaagggagaagttacatgtactagtgcatggaatcagtttcatcttatttcatggggactcttctcccactggaaagaaacagaatgaggaatgaatcttaattggtctcttcatcagaagtggtaaacttggtctctatattcacgaagtcagacagttttttaagcagactgtggaagcagacagaaccagcttcctgtagccacagaccactacatggtatctaagctaaagcaaagatgaacaattatccagattcacttgaactgtactaaagggcaaggttcaccactacaaaaaggaagttgtctaaaagcaagaattcaattaacgctgggtaagaaaagtcaaaacactaatgagttgtccatgaagccaactgctaagaacgcgctcaactatacgcgacatgaagacactatgcacgaagccttacttggcgagtctgaatttctattaactaagggcagagtgagggagaacaaagagctacttccgtaacattttagtatccagatagtacagcagaaacggttcccggggcaatgggtgctgcattaatcacactgattaaagcagatgaatcattcgtttttcttttctttttgtttgagaagtttgtttatctccctcttggccattccaatgtacttcaaaatgattccatgttggtttagtccaggaagcaatagtaaggaagtcactatcaggtaggtgagaagcaggttgtggacttgttgtcccacccaagcaaccgcagcaagggaaacgatcatggtcatgaagtacatcttaggtttttcttcctttagtgtgaagaggcgtttccaccaacccacagctctgcgtcgagtttttactagattgctgcaaatttcatggaatctttgctgttgttcagtggtccatttattggagccaaaaattctaggcgctagaatgggaacaaggtagtcagccaagcac

SEQ ID NO: 161983 - DNA, 635 bp, Homo Sapiens
cctttttaattacatttatttttaatgctgaatttactcccgtgccataagtttttgtttcttcagtttcttctgggatatctttttcttctgggcaacctcctcttctggtttaggaacaattttttccttttccgtaaggatcatctcaatgtggcagggagagctcatgtatgggttaatccgaccatgagctctgtaggtccggcggcgcatcttaggtgctttgttcacttggatatgctcaatgaccagagaatgtacatctaaacctttaagttcagcattactctctgcgtttttaagcatgtgcagcaaaaattcagcgctctttttgggccaccgaccttgtgtccagccccattgcttggcctgcgcacacctgccaactccaccattgtaaggtcggaatggtacacactgtttctgtaaagtgacatctttcagatacttcgtggcttttcgtatatgcatacccttgatggcctgagcagtttcacgagtgttcttaaagtgaacacgaagattggaacctcttgatttgcatgatttcgtggggttctccgggtcaagtgaatagcgaaccattttctacaggatcacctcaggcccaactttttgtacaaaggcgcctt

SEQ ID NO: 161984 - DNA, 926 bp, Homo Sapiens
  misc_feature (416)..(453): n is a, c, g, or t
  misc_feature (514)..(546): n is a, c, g, or t
aaaatgggcgccgccggattcctcgtttgctccgagcccggctcccgggggtcctcggtcgccaggcaactcgggtcttttgttaccccaaagcagtcggcgatgtgcagaatcgccgcacttttagttactctgtgtgtgtgtccccggcgtggatctggatgagtacccgggctgctaaggtgcggagctgcagtgccagggctcccgacgcgacccccaggccggcttccgaatcgcagacggggcggaggagcccgcggtagtttgtgcagtcttcggggagctcacggcggcgactcagtcccaacgcgttagaagccatacaaaaagagaaaggaaacaagcacgggtctaccggctggcgacgcacggcagccagaatccgcgctgcaccccctttttttggtggaaannnnnnnnnnnnnnnnnnnnnnnnnnnnnnnnnnnnnnagttacctacgttttaactgtagatggcgtctgaggcttttccaagatcgcgagctctccnnnnnnnnnnnnnnnnnnnnnnnnnnnnnnnnnttgcaagggagcatttaacttggtgcggtcagcgctgccaacaaaagattgcaaaagctgggcacagagttgcggcgcgggctgggcgcaggtaccgcgacaaagccctgggctcggcccgccgcgcggaggtcagcacaggctcatgctgtcgccgctcgctcgcgccccaggtcttcctccgaatgcagccagacgtgcaggagagaacgaggacagatcggcggtctccgatttcgccggcacgagcttgcgggggtcctgcgggcgctgcaaggggagctgcgtccctggcccttccaacgcgcggcgttcctttgcccctttcccgctggagaactggatctcgtcgtggccggggatctcggagcgagcgccaa

SEQ ID NO: 161985 - DNA, 1358 bp, Homo Sapiens
taaatttttattggcaggttcaggagaagagccgggggtaagggtcccttccttcccatccctctacccagaagacaccctccaaaggacagcagaagccccagagcttgctgcctcagaggacctggaggcagacaaattgttgtagtgatcttcctgtccctcgagcaggctgcggtaggtggcaatctcctgctccagccgcgacttgatgtccatgagccgctggtactcctgattctgccgctcactatcagctcgcacatcgcccagctgggcttcaataccgctgatcagcgcctggatatgcgccagctgggctccaaagcgcgcctccgtttctgccagtgtgtcttccaaggcagctttcatgctcagctgtgactgcagctcaatctcaagaccctgaagggtgcgccgcaggtcagtaacctcggacctgctcatctggagctgctccgtgtggccagcgacctcccggttcaattcttcagtccggctggtgaaccaggcttcagcatccttccggttctgctcggccatgacctcatattggcttcgcatgtcactcaggatcttggcgagatcggtgcccggagcggaatccacctccacactgacctggcctcccacttggcccctcagcgtactgatttcctcctcgtggttcttcttcaggtaggccagctcttccttgaggttttcgatctgcatctccaggtcggttctggccagggtcagctcatccagcaccctgcgcaggccgttgatgtcggcctccacgctcatgcgcagggcctgttctgtctcaaacttggttcggaagtcatctgcagccagacgggcgttgtcgatctgtagcaggatgttggcattgtccacggtggctgtgaggatcttgttctgcagctcctcaattgtcctgtagtactggctgtagtcacgggcgggccccggggcctgcctctggtaccagtcacggatcttcacctccagctcagtgttggcctcctccagggcacgcaccttgtccaggtaggaggccaggcggtcattgaggttctgcatggtggccttctcacctccagccagcagcccatcaacacccccaaagctgctgccatagccaccaccagagccaaagctgtagcagctggagtagctgctacccccgagggtgctgcccaggccgccagcagatcccagcctgcaggagccggcacccaggccgccagacagccggcaggaggtgcgggacgagccgccccccaggccggaggagcccttgatgcagctggagtagctgctacccccgagggtgctgcccaggccgccagcagatcccagccggcccaact

SEQ ID NO: 161986 - DNA, 769 bp, Homo Sapiens
  misc_feature (200)..(227): n is a, c, g, or t
aactaaaggacatttatttatttttaccaagactttatcttgaggacatgggttaaactgcatttccaccccccaccccatcttgaagaagggttagtatgtgaatgttataaagtagatatgaacagttgaaggactggaaccaacattaagtgacgaagaacaacttccatctaaatcatcataaaaatgtttaagtnnnnnnnnnnnnnnnnnnnnnnnnnnnngaggaggtaacgggggtttccgattgaacaagatcctcacatttcatctaatacagtcaatcttggctagagtataacaaagtggaaacaggattactatgatacaaaacttccactacagcacgctgtacacacctgtgttccaagcccaccccaacccccccagtgcttccaacacaattatttcccagcctgttgggcctgccgacgaaggagcacgtagatcttctctttaatccagtctttgttataaggctggtatgtctgggtatcagctcggtaaaccaggcagctgaggtctgccagatcatcgatgaaatcaaacaactgactgatgtcatatgtgatagagggactgttgggattcattcttttcagatgttcttcatacattttacaaacaccttccatgcattcattcacagattcgtagtcagcataagttctgccttctggcctcttggtaggctgtaccagcaaaatggtgtgagacatcgcttccaagctctcttcgctccaacttttttgtacaaagttgcctt

SEQ ID NO: 161987 - DNA, 892 bp, Homo Sapiens
  misc_feature (649)..(697): n is a, c, g, or t
ttttttaaagtttcagctgtgaggtagggccagcagggcaatctgaagaatgacgatgctccgctgccgccattctgactgtagggccaaaggagggaatgttttcacacatattcatttgatggacaaaattaccgccaccaacacggtctgcactttctgttgctggtgatagatttttgcacctttccatcctccaggtttcaaaatagcagtatcagtgtcataatatcacccttccactgagttactgccgacagctggggagtaaagaaaagtcattgggacacactgttgtctccacatgccactgtgtctgtctgcaaatgtaggcaggctggggtcctgccccagggaagacagagtcataacagagtaataaagaggcatgtttgagacacaggagtgtctatgtctatcctcattcctccctcacagccatcaccagagcatgtttcttgcaccaggtcaacagacagtaagagaggcatgaaaagcccattgtccacacatgttgcagcttctttttggagaatgttttccaggccttttatgttctgtctctgattctcggaactctgcaaggtcagtgtgaccaccctgctccaaatctaagaaaacagaggtttccagaggaaggagaaattgnnnnnnnnnnnnnnnnnnnnnnnnnnnnnnnnnnnnnnnnnnnnnnnnnctctgcctgcaggaccctctcatttcccctgtttcccttcttgacaaaggatcttcttcactcttgaggtaagattgttctgtcagaaaaccctctcccagttcccctgcagctcttcaggaacccacatctctgcagagctctttgttctcatgggtggcacctccagagtgacaaaggatcttcttcacccaa

SEQ ID NO: 161988 - DNA, 583 bp, Homo Sapiens
agagttataatccaatctttatttaaaaatgtaatctgccagtttagcgttttccaccaactcggggagctgaaactttcacaggcttcacaatcttttgcttaggtgctgcctttgtaggtgccttagcagcagccattgcagtctttttagatgcttgcttagccttttttgcttccttagcagccctgatagcttgttctcgttgagcctttctaacttcaggtattctgattcctcttggccattatatcagcaagagatgcaccagtaatggccctctggaatttgactgctcggcgggttcttttcttttgaatttcttccgactgtccctttttgtgcttccttctgtagaggacagtccagtttatctgccgaggattcctcttggaaaggaaagccgactcgcatttcgcattaagaaactggaaaaccttcccgtcggtcctggcgtagcgcctcccgtgtccggggtagatcttgtacccgctaaaactgcacagctcgaccttcatggcgacagttcttttctaaagagaaagacaaaaccaacttttttgtacaaagtagacttttacag

SEQ ID NO: 161989 - DNA, 944 bp, Homo Sapiens
  misc_feature (58)..(73): n is a, c, g, or t
  misc_feature (330)..(343): n is a, c, g, or t
ttttttaaaaaggatagtaaagaaaatgcggaagctctggctctccaaagcaaagtcnnnnnnnnnnnnnnnngcgggggggaatgcgaggaacattttattacacctcctgattttcactccttgagttttattttctccccttgtttatttgtttaatgctagaaactgtattcttaagagagcatacctctttcaggtgagcatgataattggaagattttgatacttagagtatgaacatataattaagaagtgattacctaataaagataacaatgtgactattttaattattttggtggcagggagttggttttacatcacccnnnnnnnnnnnnnngccctggtttcaaattcattggtaataaatatgctaactttctgaatcaaaatggagagcctctcaagaaaaagagctatgcagtcagcaatgacttaaattagtcaggatagcaggcatctggggttaaggctgtttccaccattttggtctcaccaccatatacgagtgggaccacagctgtgtagcacttgtttctgtcataagtgtagcaggtctctgtagcactgtcttcatcacagatattgctctgggtagcagtaactatctgattatccagctccacttctgtaggatcacattttttacagaggtcagacaaatggtacacaaatctggttctcaatggtgaggtgggatcagagatattctccctgttgttcagaggaacaataattcggatttttctctccacaatgtcctcattaggatcttcggaagaacggatgatcctggaagtaatccgggcacacttacatttgttgtcaacaagaacaatcctttcatcttcttgggctttcacatgaacagccttaataaaaaccgccaggactccccagaaaagcaaatggttcttcattttgagttcacttcttcccaa

SEQ ID NO: 161990 - DNA, 930 bp, Homo Sapiens
  misc_feature (347)..(362): n is a, c, g, or t
taaaaatgctacaaacaccattaagttgccatcaataagaaatttacttgtttttaaaaaatccaaaatgctggcattgtcccagaaaaatttaaacaggtttatttataattattataaagttgaaccgctgaaacttgttcactgaaacattttaacttgcattaatgctttacgtctccgcatttatattaaaaattcacacacaaatgaaaatggaaaaactgccaatacctgatttctgtcccctatttttccactcgcaatcatatacttaggtaccttttgaccccatggaaaaaaaatatctaacgttcagaactaccaataacaggaagaagagaaannnnnnnnnnnnnnnngagaatgaaatgtttcccatcatagtggattcttaagcacgttctccacgtatgcggcgtgctagctggatgtcttttggcataattgttacacgtttggcatggatagcacacaggttggtgtcttcaaaaaggccaaccagataggcctcacttgcctcctgcaaagcaccgatagctgcgctctggaagcgcagatctgttttaaagtcctgagcaatttctcgcaccagacgctggaagggaagtttgcgaatcagaagttcagtggacttctgataacgtctaatttcacggagcgccacagtaccaggcctgtaacgatgaggtttcttcacccctccagtagagggcgcactcttgcgagcggcttttgtagccagttgcttcctgggtgctttaccaccggtcgatttgcgggcagtctgctttgtacgagccatggtacagagacctccttacttaccccccttctccttcggctggagctcggcgagcgagaggcggcgctggcgttggagaggcgacggcggcgcgccaacttttttgtacaaagttggctatttgt

SEQ ID NO: 161991 - DNA, 550 bp, Homo Sapiens
  misc_feature (335)..(397): n is a, c, g, or t
atcaaatgaatactttattagagacataacacgtataaaataaatttcttttcatcatggagttaccagattttaaaaccaaccaacactttctcatttttacagctaagacatgttaaattcttaaatgccataatttttgttcaactgctttgtcattcaactcacaagtctagaatgtgattaagctacaaatctaagtattcacagatgtgtcttaggcttggtttgtaacaatctagaagcaatctgtttacaaaagtgccaccaaagcattttaaagaaaccaatttaatgccaccaaaataacagctaataccactgatgaacccacnnnnnnnnnnnnnnnnnnnnnnnnnnnnnnnnnnnnnnnnnnnnnnnnnnnnnnnnnnnnnnngctcccaacagattctcctacccagcccactactgggtccttctgcccaggacctgttactctctgctctgacttggagagtcattcaacagaggccgtgttgggggatgctttggtagatttctccctgaagctctaccacgccttctcagc

SEQ ID NO: 161992 - DNA, 813 bp, Homo Sapiens
ggatgacttgggatggggagagagaccccctcccctgggatcctgcagctcccaggctcccggtgggtggggttagagttgggaacctatgaacattctgtaggggccactgtcttctccacggtgctcccttcatgcgtgacctggcagctgtagcttctgtgggacttccactgctcggggcgtcaggctcaggtagctgctggccgcgtacttgttgttgctttgtttggagggtttggtggtctccactcccgccttgacggggctgctatctgccttccaggccactgtcacggctcccgggtagaagtcacttatgagacacactagtgtggccttgttggcttggagctcctcagaggagggcgggaacagagtgaccgtggggttggccttgggctgacctaggacggtgagcttggtcccagttccgaagacataatgatcagtattactatcccacacttgacagtaatagtcggcctcatccccggcgtcgaccctgctgatggtcagggtggccgtgttcccagagttgacgccagagattcggtcagggatccctgagggccggtcgtcatcatcatagacgaccaacacaggggcctggcctgacctctgttggtaccagtgcacacttttacttcctatgttgtctcccccacaggtaatactggccgtctgccctggggccactgacaccgagggtggctgagtcaacacatagggggttacagagcctgtgcagtgagagaggaggccgaggaggagaacggtccaggccatggttgagggaccaccagtgcccaa

SEQ ID NO: 161993 - DNA, 1200 bp, Homo Sapiens
  misc_feature (820)..(879): n is a, c, g, or t
ttgggatgaattgaaagaagtgtttgaagatgctgcggagatcagattagtcagcaaggatgggaaaagtaaagggattgcttatattgaatttaagacagaagctgatgcagagaaaacctttgaagaaaagcagggaacagagatcgatgggcgatctatttccctgtactatactggagagaaaggtcaaaatcaagactatagaggtggaaagaatagcacttggagtggtgaatcaaaaactctggttttaagcaacctctcctacagtgcaacagaagaaactcttcaggaagtatttgagaaagcaacttttatcaaagtaccccagaaccaaaatggcaaatctaaagggtatgcatttatagagtttgcttcattcgaagacgctaaagaagctttaaattcctgtaataaaagggaaattgagggcagagcaatcaggctggagttgcaaggacccaggggatcacctaatgccagaagccagccatccaaaactctgtttgtcaaaggcctgtctgaggataccactgaagagacattaaaggagtcatttgacggctccgttcgggcaaggatagttactgaccgggaaactgggtcctccaaagggtttggttttgtagacttcaacagtgaggaggatgccaaagctgccaaggaggccatggaagacggtgaaattgatggaaataaagttaccttggactgggccaaacctaagggtgaaggtggcttctggggtcgtggtggaggcagaggcggctttggaggacgaggtggtggtagaggaggccgaggaggatttggtggnnnnnnnnnnnnnnnnnnnnnnnnnnnnnnnnnnnnnnnnnnnnnnnnnnnnnnnnnnnntgaccacaagccacaaggaaagaagacgaagtttgaatagcttctgtccctctgctttcccttttccatttgaaagaaaggactctggggtttttactgttacctgatcaatgacagagccttctgaggacattccaagacagtatacagtcctgtggtctccttggaaatccgtctagttaacatttcaagggcaataccgtgttggttttgactggatattcatataaaacttttaaagagttgagtgatagagctaccccttatctgtaagtttgaatttatattgtttcttcccatgtacaaacccattttttctac

SEQ ID NO: 161994 - DNA, 1092 bp, Homo Sapiens
  misc_feature (796)..(844): n is a, c, g, or t
  misc_feature (887)..(935): n is a, c, g, or t
ttggggctcgggtcgttgtggtgcgctgtcttcccgcttgcgtcagggacctgcccgactcagtggccgccatggcatcagatgaaggcaaactttttgttggagggctgagttttgacaccaatgagcagtcgctggagcaggtcttctcaaagtacggacagatctctgaagtggtggttgtgaaagacagggagacccagagatctcggggatttgggtttgtcacctttgagaacattgacgacgctaaggatgccatgatggccatgaatgggaagtctgtagatggacggcagatccgagtagaccaggcaggcaagtcgtcagacaaccgatcccgtgggtaccgtggtggctctgccgggggccggggcttcttccgtgggggccgaggacggggccgtgggttctctagaggaggaggggaccgaggctatggggggaaccggttcgagtccaggagtgggggctacggaggctccagagactactatagcagccggagtcagagtggtggctacagtgaccggagctcgggcgggtcctacagagacagttatgacagttacgctacacacaacgagtaaaaacccttcctgctcaagatcgtccttccaatggctgtgtgtttaaagattgtgggagcttcgctgaacgttaatgtgtagtaaatgcacctccttgtattcccactttcgtagtcatttcggttctgatcttgtcaaacccagcctgaccgcttctgacgccgggatggcctcgttactagacttttctttttaaggaagtgctnnnnnnnnnnnnnnnnnnnnnnnnnnnnnnnnnnnnnnnnnnnnnnnnngaccacgagccatgagttttcaaaaaaatcgggggttgtgtgnnnnnnnnnnnnnnnnnnnnnnnnnnnnnnnnnnnnnnnnnnnnnnnnnagtggggttggccccatgaagtgggtgccccactcacttctctgagatcgaacggactgtgaatccgctcttttgtcggaagctgagcaagctgtggcttttttcaactccgtgtgacgtttctgagtgtagtgtgggtaagaccccggcgggtgtg

SEQ ID NO: 161995 - DNA, 505 bp, Homo Sapiens
ggcctagagagcaagatacctgcacacacctgctgcatcctgggtaacacatcactaagtaactggcactgagggagatacccctggaacctctctttcacagttcaatcttggatggggttactaatattgatccatctgctatcaacaaaagtggccaggaaacctggccccatggagtggggcttgggacagccctactgggaaggggtccctcagccatgctgtggggggccctgggccctgaccttagcaggttatgggcagctgtctcggagctcagggcgcagccagcacacacaggagcccacaggacagccacgtcttcacagaaactacagaagtcaggacccaggcgaggacctcaggaacaagtgccccctgcagacagagagacgcagtagcaacagcttctgaacaactacataataatgcggggagaatcctgaagaccactgcatcccacaagcactgacaaccacttcaggattttatttcctcccaa

SEQ ID NO: 161996 - DNA, 918 bp, Homo Sapiens
accatttaaagccaactttgtacaaaaaagttggcgtggagactcagcgacagccaggccccaagggagaccccggcaggcctggattcagctacccaggaccccgaggagcacccggagaaaaaggcgagcccggcccacgcggccccgagggaggccgaggcgactttggcttgaaaggagaacctgggaggaaaggagagaaaggagagcctgcggatcctggtccccctggtgagccaggccctcgggggccaagaggagtcccaggacccgagggtgagcccggcccccctggagaccccggtctcacggagtgtgacgtcatgacctacgtgagggagacctgcgggtgctgcgactgtgagaagcgctgtggcgccctggacgtggtcttcgtcatcgacagctccgagagcattgggtacaccaacttcacactggagaagaacttcgtcatcaacgtggtcaacaggctgggtgccatcgctaaggaccccaagtccgagacagggacgcgtgtgggcgtggtgcagtacagccacgagggcacctttgaggccatccagctggacgacgaacatatcgactccctgtcgagcttcaaggaggctgtcaagaacctcgagtggattgcaggtggcacctggacaccctcagccctcaaagtttgcctacgaccgcctcatcaaggagagccggcgccagaagacacgtgtgtttgcggtagtcatcacggacggggcgccacgaccctcgggacgatgacctcaacttgcgggcgctgtgcgaccgcgacgtcacagtgacggccatcggcatcggggacatgttccacgagaaagcacgagagtgaaaacctctactccatcgcctgcgacaagcacagcaaggtgcgcaacatgacgcctgttctcc

SEQ ID NO: 161997 - DNA, 935 bp, Homo Sapiens
  misc_feature (510)..(540): n is a, c, g, or t
ttgggctgcagccggagcctgggagacgatgcatcactgtaagcgataccgctcccctgaaccagacccgtacctgagctaccgatggaagaggaggaggtcctacagtcgggaacatgaagggagactgcgatacccgtcccgaagggagcctcccccacgaagatctcggtccagaagccatgaccgcctgccctaccagaggaggtaccgggagcgccgtgacagcgatacataccggtgtgaagagcggagcccatcctttggagaggactactatggaccttcacgttctcgtcatcgtcggcgatcgcgggagagggggccataccggacccgcaagcatgcccaccactgccacaaacgccgcaccaggtcttgtagcagcgcctcctcggtgagtggtagccagagtgtgctggctggggcttaaaggcctcatctcttcctagccttctctcaggctggctggtccgggtgagtactgccagccctgtgcacgtgcactgnnnnnnnnnnnnnnnnnnnnnnnnnnnnnnnctggtccaggtgtagggctgatcacagggtcctggcctctgtgtcttctggctctttccagtggcaactgtaggaactctggctccgatgctggctggcccctggcctgtctatgtctacacagtgctccagacaaaggccacgtggtgcaagtggctggggacacttcttatgacacttcttatgggatcctagtagagtggctggtatggtggtctgcagctatatggcctggtccttcccacccagagactgcctcctcgtgtaactgagtgctctgatgtggactgcacccacctctgcgtctcatctgcacaccccttcccaaaggcccccagtctggagtgcctcacagaccggagatttgcctgtcagccagctcagactgggaactt

SEQ ID NO: 161998 - DNA, 890 bp, Homo Sapiens
  misc_feature (138)..(158): n is a, c, g, or t
  misc_feature (660)..(723): n is a, c, g, or t
aacataaaaaccaactttgtacaaaaaagttgggggggacgcggggacgcaagggacgcattgagcagaagctgcaagcggatgacccatgggccaagtcaagtctgctgacgtgttttacttggcccacacagtggnnnnnnnnnnnnnnnnnnnnncttaaagcttcagtaagttgtctgcctttaaagttgggagcattcccctaaaaatttccggatatcctttttctaataataacaacagaagcaaacatttctatgtgacttaccacaggcctggctcagctctagacaactcccatccctttgctcctgggatccccaaacagttccaaggtggtgcttcctgtgatcatccccattctacagctaaaaaagcaaaggcaggcctttaaccgggcactcctggctgtgcccatgttcctgtgtggccaccccttcaggctgggcacggcctctccactcccccagcctcctagcccactgtactcaggttcccccctgctcaaagcttgtgggcgtggactttgtaccccccgggcttggagagggcaaggtgactgtgggagtccagctgctgctccttaagttgagttgtctgtcactgacttaccctccctccctctctccctactgtctccattcttctctttccccnnnnnnnnnnnnnnnnnnnnnnnnnnnnnnnnnnnnnnnnnnnnnnnnnnnnnnnnnnnnnnnntccttcactcccttcctcccattcatctggtgcttaccgggggccaccaggtaggcacgtcgcacactacttctgcttcatgtgaagggttcatggtggcttctccctaccttcagaccacaccttctggtggaaggtgctgcgtgaggatcccaagggtgaactga

SEQ ID NO: 161999 - DNA, 963 bp, Homo Sapiens
  misc_feature (261)..(308): n is a, c, g, or t
aattgatgagcaatgcttttacattaaaaacaactttgtacaaaaaagttgggtgacttaataaaacgacatgtagatttctaggaggatagacatatgtttatgagttagtaaaatgtacctcatgtttggttgtagaataaggaaaaaagaagggatcatcagtagctggtttcactgttttgagaaagaaatgttcattccactaggtctgttccttcatcttaagtgacaaatgacctggaaatactactttctgannnnnnnnnnnnnnnnnnnnnnnnnnnnnnnnnnnnnnnnnnnnnnnntgaaagatgagttgtaactacaacccatcttctcagtgggacatgttctactcccttgccccatggagagagcaaaagctggaaaaaacccaaagaagaaaagccctcacaacagcagttctggggcaggacaggtctgagacattccaggtggatgagtgaacaatattcaacatagaaaattcccaaagacaggaaataacatcctctaggtctagttgtagaattattttctaaggagtgatcaagtgaggcagaagagggaggggagagacccatcagtgtgagttcctttgagtgcttactgtgtgctggacacttgcttggtgcttttgagatattaaccattgaatgaagtatggttatcctcccctctttttttgataatcaagtaggccccaggctctgatctgcccctgtggttaaaggctggtgagtggcaaagccaggcagaagctcaaggcttctggccgagggagcccatgctcctttttatgactagcatcaccggtgaatataaggaacatcgcagtgttgggggcctggggaacattctgctttttgtttttgagaatatagtggctcaaagtcttggttttcagatgacgacagccacaggcaagtcaccagtctgctcattgtctacaagcaaatt

SEQ ID NO: 162000 - DNA, 1042 bp, Homo Sapiens
  misc_feature (595)..(595): n is a, c, g, or t
  misc_feature (627)..(635): n is a, c, g, or t
agaaaactttgtacaaaaaagttggcaactggcttcaagcaatggtaaaaaaggaaaccctgccattctgggtacgactcttcttttggaagcaggtggcagaaaaaatcccactgcagccaaaacatttcaggattttgaatccagttatcatcaaagagactgcctttgacatccttcagtactcagagcctcagtcaaggttctggggccgagataagaacgtccccacaatcggtgtcattgccgttgtcttagccacacatctgtgcgatgaagtcagtttggcgggttttggatatgacctcaatcaacccagaacacctttgcactacttcgacagtcaatgcatggctgctatgaactttcagaccatgcataatgtgacaacggaaaccaagttcctcttaaagctggtcaaagagggagtggtgaaagatctcagtggaggcattgatcgtgaattttgaacacagaaaacctcagttgaaaatgcaactctaactctgagagctgtttttgacagccttcttgatgtatttctccatcctgcagatactttgaagtgcagctcatgtttttaacttttaatttnaaaaacacaaaaaaattttagctcttcccacnnnnnnnnncctatttatttgaggtcagtgtttgtttttgcacaccattttgtaaatgaaacttaagaattgaattggaaagacttctcaaaagagaaattgtatgtaacgatgttgtattgatttttaagaaaagtaatttaatttgtaaaacttctgctcgtttacactgcacattgaatacaggtaactaattggaagggagaggggaggtcactccttttgatggtggcccctgaacctctttctggttccctgctgcgctgcttggtgtgacccacggaggatccactcccaggatgacgtgctccgtagctctgctgctgatactgggtctgcgatgcagcggcgtgaggcctgggctggttggagaaggtcacaacccttctctgttggtctgccttctgctgaaagac

SEQ ID NO: 162001 - DNA, 948 bp, Homo Sapiens
  misc_feature (210)..(251): n is a, c, g, or t
tctttcatccctacttctttctttgtctttatctttcttctctcctttttatgtctcgtaggggatggtgagcgggacaattttcttttaggagaccgaggctttttaggagatcttgtgccactcctgcttcttcgtcgtcgtctctctctgcttgcacttctagaacgtctggctgtgctgtaactttttggtggtgttttagaacgnnnnnnnnnnnnnnnnnnnnnnnnnnnnnnnnnnnnnnnnnntgtgctccttgaccttctacctctttctctggaatgagatcttctccgccttgggcttttggatcgtcgccgactcctagacttagaatgtgaccgccgtctcgatctgcttcttgaccgcctgtgtctagaagatgagggagtcctcctcctcctagaacgtgatcttgatcttgaatgccttcttttttcttctttcttatctggttctatagcagcagaaattagggactgtgcttctcgtactcttttcatagcttcctctatttctttactagaggtatccgatttcagacttggtgaaacgagaccagcagctacatgattcaacttgggatcaacagtactcataagcttcagcaactgatctgcagcaagagactgagagttcaagtttgctccaggaagcccaagtgcagcaagggcaggatcaagagtaggagcccccaaagcagccagtggaacagcgccaatctgggtaagtgggttaggagtaggcaggagtccaccaccaggcagaagacctgccactgcattagctggtgccaacagagacaaagctttagcttcatcaggaataactcctgcagagaaacatccttgcattagaacacattcttttctaagacagaaaacacacaaaaactaccctaagaaaatgtctcccaacttttttgtacaaagttttctatatgtt

SEQ ID NO: 162002 - DNA, 905 bp, Homo Sapiens
  misc_feature (330)..(338): n is a, c, g, or t
ttttacaaaatggccccccacagtgattaaagaccagagacttatatctctgcatttgtcaagctggaacagtctttagtgaacacagcttacctcttttaaaactgttggtttctactgaaggaaacatggatgacatttagtgtttctgtgactggtctggcacttactttttttgacaaagatgggaaggggtctaaaagtcatgtcacttataaaagaacttgggaggaactttttttcaaaagatccaaagattttggaaggagagattagagcagaactaagaccacttagaagataggtagatttcagctcaatataaggaannnnnnnnnaatatcagtgcagttccaaatggaataagctgtttgaacatggcttagcagaagctgaatgacaacctgttagaaattctagggaattctgcactgagtacaacattggattatttctttgggctgtttccaactcaagattctgttatttcattataagcattttgaggaaggcagttggtataaaggtgaccttagtaataaaagtcagtgtgaagtctaaagaaattccacaatgaatttaaagacaagaattttagggacaaggatacagaaatttgcctagtaacttgcacacagcagatggtaaatatttattgactcaatggagtaatgttaaaaataaggtttcccatggactgtgtgagggccaggcatacttaacatcctttgtgagagagaggatggaaacggagtctactgtgaaagccacaagttttggggaaatacactcctgcaaagaagctggaggttaacaaccaaggcaaaggggccagaccacagggagatcttccccaacttttttgtacaaagttggcccttataaagaagcattgctcatcaatt

SEQ ID NO: 162003 - DNA, 828 bp, Homo Sapiens
ccaaaataaaaaatgcaatttttatttgttgaacataatttgaaactgtaaaaagatttctctgtccatcaccagaaatccagaagacacctgaagaggactgactgtttctttgccacggggaaggtgtgatgaaacaattaaaatcccatgcatccctggcccttcctccacgttgcccctcagaatgcctgcagctgcagcaggcaggaggcagcaggagaacccgggctgtggaaggcccctctgcctctctgggaaagtttgctggggaagccagaggtcacagtgcattggaggcctggctttcagccactggccaggccaaaatgaaacatctgctcaagtctccccaggcaccttgctgggggtgagtgggagaaagaagtggagaaaactgatgctggaccacaagttatcaccctgtaccttggctttgaagtggcccctgctggtacaggagcagggtgagagtaaaagtaaataaataaaagcaacatgcttcaaggagagagggtgacagacccactgaagcaccccgtgtcctggctcgaccagggataagccagggcgtgatgatttaaaacactctgatctgaggccaatggcatcaaaatacaaattgctgaagtggaagaggaagtgaagggctgtttgttagggggactacagtggagattctggtgagtgtgggtgggctcgccagtgaccccaatattttctttgtgtaacaaccagagtaagcattatgatgcccaggctgccctctactggcagtttctgggaaggaccacaacagcagcacccaccctgcaacccacaacagcc

SEQ ID NO: 162004 - DNA, 911 bp, Homo Sapiens
  misc_feature (240)..(248): n is a, c, g, or t
ttggcagcagtgtaaatgactcagattatcctcttgacttgaaccacagtgaaaccttcctgcaaactacaacatttcttcctgaagacttcacctactttgcaaacatcacatacgacgccttgtataaaaacataactgtcaacctgacacccgagctggctcaggtgaacgagtactgagaggagagaatgtacgtttgctttacccaccgccaccaagaaagcagtccgatgagannnnnnnnnggaggggggagggtctacacagcaagagaacagaaatactgtgtctcatgaaggatcacagagttcagggggaaaatgtgacagcacacgcacaaacgccttcactggatcagccgctggaactgagggagtgagcttggggacttccttcgtcagcactggctttctgttttcacaagacagacgtctgtcccgctgctctctccccatctcctaccccacatcctgtcttagccgcagtctccagaacccatgatgaactgtgatctgccgtggtcctgccgtggagcctgtccctacacatgaccttggagcctcttggccttcagagcagaggcaaacccaccacagggcagctgcgttttaggaagagcaaatgaaactccacaccattcttctagatctctggtgttctctttggtttcatttttttaaaaaattaccttctttgggtggggattgagggtggaggggagggtgtttgggaaagataaatagacataaatatataacaaatcacttcttgaagaagtataattgtaaataagccatgtaaaatgcctttttaaaatttaatttttctagctggctccaattcaaattgaggatttatgtattaagccacttacttggttggcagtgcaaggacttagtttaaatgca

SEQ ID NO: 162005 - DNA, 928 bp, Homo Sapiens
  misc_feature (398)..(413): n is a, c, g, or t
  misc_feature (535)..(551): n is a, c, g, or t
ccaattatggggaaaaactttcccatttcacaggctgggtagaaactgttctgaatacagcgtaacatacacagcaattcagatctttagaaactcaactgttgccagttaatacagtaaagtagaactttattcagcttcaccccttatttcatttttcccatatatttaagtgatcctttctataccttttaaggtaagcaatcatctcaagattatcagacatctaaagaaaactttggtaaactggactatagtaatcgtatgagaaaaaaatagctcaagattcctaactgctacaagaatagtgttgatgggatcaaactcctaattatcctaatagacctaattcatttttaaatgtggaaaatatgcaagataaattaaatgcttagttnnnnnnnnnnnnnnnngtttcaccaactgttttccattactgagaagcccccacactgccccactgtgcatattcctagtatttcatccatgtcctgctctgctgtgctgccctacaaaaaaaccctcccgggggggnnnnnnnnnnnnnnnnncggtgtagtgtgaactgctgaagaacttaaatgttcaagacatctttaaagtctaggagtacctgaaaactgtgggtaaacatggaccattttccttgcgtatcaacttcacactaagcatctaacattcaaacaaaaaagtgcaaaatttgtaattatttttaacagcaagaattcccaacctcctgccatccactgatgttccatcctgtttgaggttctacattaaaacatgattacttttgccataaaagaaaatattacccttaaaatatctatttgatatgtacaaaccacatttttattctgacaggtcacagattttgagcaagtgcttccctaggtccaacttttttgtacaaagtttgctattatgt

SEQ ID NO: 162006 - DNA, 919 bp, Homo Sapiens
  misc_feature (126)..(142): n is a, c, g, or t
  misc_feature (778)..(838): n is a, c, g, or t
accaaaaagacaactttgtacaaaaaagttggggatgcagctaattcatcaaaattcaaatcattgaatacttttattgggaaggaaaaaagatctcaatcaaggatctattaccttaagaaactnnnnnnnnnnnnnnnnngggcaaattaaacccataataaatagtaagaaggaaataataaagatgaggcagaaaacaatcaaattaaacacaaaaaaccaatgaacatgattaaagccaaaagcatattctagaattatgatttttagtaaaatcattgtatacaaggtatcactgaaaaccaactatttctatctaccagctacaaacagaaaatagaatttactttataaaaggctatttacagtggcagcagaaaatatcaaattccagaatttgatattttcaaattctaggaataatttggcaaaatatgggcaagactttacactgaaaactataagttgtgttgaaagaaattgaagaagaattttttaaatgatggtatatatactattcatgtattagatgactcagtattataagggggttgattcttctgaaattgatctgtagatttgatgtaattccaataaaaattctaactttaaaaaaatttgatcaaattgattgttaaatttttatggaaatgcagaagtgtcaagaataaccaaagacacttgtttcaagggatggagtcttgctgtgttgcccaggctagatgcaatgtcgtgatccttgctcactgcagcctggaactcgtgagctcaaggnnnnnnnnnnnnnnnnnnnnnnnnnnnnnnnnnnnnnnnnnnnnnnnnnnnnnnnnnnnnnaatcaagacacttttttaagaagaggaacatgcagagcgatttgctctactaacatagaagacttataagttatagtaaag

SEQ ID NO: 162007 - DNA, 939 bp, Homo Sapiens
  misc_feature (337)..(359): n is a, c, g, or t
ttgggagcatttgattccgatggagatggaagatactcattcctggagctaagggtagctttaggtatctagcttcatcaggcatattttagaaatggactgcctaatatctatttacctaacaacaaaacaacccttacttacccatcagtcctctagtcctccaaactactgtagcagatactttgccaccttttaacttggttgaagaagctatataaaagttatttttttaaagaagaagaccattttacttatgatgttcagaaatctatgatttcctacaaccagtaagatcttacattttaaaattgccagaaaaaaaattaaagccctnnnnnnnnnnnnnnnnnnnnnnngaggggaggagaccttatcttttaaagctgggaaatgtatatagagagagaataagccacttttatatttcacttaaatttgccttaaattagctgcactttatagagactcagaaaatgtcttttctttaaaagataggccttttctgtttgtaaatatttaaatgaaagaaagcattgtgcatattgtgtggaaagtaggaagaatggttttgaacaggatatgaacaaatgacttattaaaaattgctgatctggtgtaggtggcagctgaaactacatccatgtctccataaggcatccctcaaaggcccaggcgctgccagggggtttgtcctggtagctggaggaaccgatttcagggaatagacactggagacaatactgactccaggcatggctcatggaagtaggattctggttctttgttcctattccctcagctaatcccaacctgggaatcagagaagtcttggggatttttctcatttttagtactatttcacggtttatgagcataaaaagttatccattgggggagctccattttccctgctgagtgagctagattgccttcccc

SEQ ID NO: 162008 - DNA, 840 bp, Homo Sapiens
  misc_feature (67)..(75): n is a, c, g, or t
gcgaagcgtcagcagggcgccccgccccctcggtcggcacgggagggggcccggaagagcccgaggnnnnnnnnncctccgcggtggggcgttgccatggagacgcgggcggcagaaaacacggccatctttatgtgtaaatgttgtaacctcttctcaccaaatcagtcggaactcctctcccacgtttcagagaagcacatggaagaaggggttaatgttgatgagattattattccccttaggcctctgagtacacctgaaccccccaactcaagcaaaaccggagatgagtttttggtcatgaagaggaagagaggcaggcctaaggggtccacgaagaagtccagcacagaagaggagctggcagaaaacatcgtgagtccgactgaggacagcccgctggctccggaggaagggaacagcctgcctccaagcagcttggagtgtagcaagtgctgtcggaagttctccaacacgcgccagctgcggaagcacatctgcattatcgtgctgaatttgggtgaggaggaaggagaagcaggtaacgagtctgaccttgaactagaaaagaagtgtaaggaagatgatcgggaaaaagcctcgaaaagaccacggtcacagaaaacagagaaagtccagaagatctcatgaaaggaggccagacagctttctggggcgaagaaacccatcataagtgtggttttaactgcacacgaagcaattccaggtgctaccaagattgtgccagtggaggctgggccccctgaaacatgagctacaaattctgagaccacttcagcagacctggtgcctcggagaggctaccaggaatacgcc

SEQ ID NO: 162009 - DNA, 939 bp, Homo Sapiens
  misc_feature (217)..(248): n is a, c, g, or t
acataaaagcaaactttgtacaaaaaagttggggtttttcttttctcttcaagaaccatgggagtgaattgtttacatgcattctaggggagagtagaaggcacattttgagaaacttcaccgccttctttacttgacctcaacagatgaactaggtagtacagccccaccctcttttggcttctgtgacagcatactcctggctttcttccccccnnnnnnnnnnnnnnnnnnnnnnnnnnnnnnnnaaacattagaacttttaaaaagcttgttcctaaagcccttttctgtacttaaactcttaccttagccattttcatcaatttctatgactttacatgacatccacatgccaatatgttccaaattgatagtccagctgaaactctgagcccttgtcctgtcctgagagctgccttactgttaacatcaacactcatacctcacatgtcccatctcccaagagaactcttaagctttctccataaaccttttcatctccatgaatggtgcctgtatccgtcaagttgcttctgcccaccatctaagagtcatcagcattttcccctcacctgctgtattcatcctcactacatccatttcagttctctatccaaaatataaatcaaatctgtacttttttttctctgttaccactgccagtcaccctagctcagacagtccttatcacacacctggactcctacctagtccttttcctcaagttctgtcaccccaccctcacccctaatttcccgatccagcaagcatcttcatagattctaagttacatgtatcttccttgctcaaccctttagtgacttttctttgcccttatgatgctacattctctagccatatcaattgtgctttctcttcctggagttgctcaccccttttctaatccagacttttgcatgttctttcctgtctttt

SEQ ID NO: 162010 - DNA, 986 bp, Homo Sapiens
  misc_feature (258)..(274): n is a, c, g, or t
  misc_feature (642)..(674): n is a, c, g, or t
tttttttaaaagaaatttaaatgatatttcaatgagcaagggtagagatggcgggagggaggaaatgggctaagagttcccttattaaaacaacagtcctctattggcacggtggcactcccgtgcagtaaactgctagtaattgcactatagcattttagaccactgacgtatcaaaacctgatactattaagaaacttcgatttataaaaaaacaattctctgtcactctctcatttgggagggaagtagataaannnnnnnnnnnnnnnnncatggaaggctcccagaatctgctgtttttaagacccatggtttagggcttgtggaagagacgagcaaaatttaatctattcgatatcctccagctctagggctccctggtgctacactaagtccctgaatggactaagtatgaaatgaaaccggtctcactgctaccgaggaggaaagacattcagaaccaaaacaaaggcagggcttcaacgaaatgaaattacgaatatgatttcctcttcccactcctgagtatggtatcactgaaacttaactgtggaaggggcaaagatactgttatgagtgagttattatttcaaagggaaagggggtggacagggagacatggataaaggaaaccaattnnnnnnnnnnnnnnnnnnnnnnnnnnnnnnnnncacatggaagcgaaggcactccaaactatatagatacactatacattgctagagttattgttacaataatacaggccggtacctactgtacagagttaaaactatatggctttaaaaagctcgtctacattttgtctgattattaaacagaatcactgccctgaacagtaactttttgctcattaataacagttcctgggtccacatatttacatacaaaacaataaaacttaaatttaaaaacacagaaagaaaatataatgtacaagcttgaatttggccaacttttttgtacaaagttgtctattatgt

SEQ ID NO: 162011 - DNA, 998 bp, Homo Sapiens
  misc_feature (376)..(431): n is a, c, g, or t
ccccatttttaatagagtttcatttgaatgagttcataattctaaagtcacttttccccacaagaatgttttcatttcagtatataaactgctaagcggcaaatgactaagtcagttataaagaatttgtacccacagtaaatgctaatttacaataactgtcaatagaaaccctataaacttctacacccacgcctaaaagttactatagtattgaggtcagaactaacatgattcttccatttggtcaaatttcatttactaaatcatactgtcaagaaatccaaagaagaaactttagtggattcttccaaagctgtgtaattttccaaatgattttcctctggttgcaaagcctgttcagtccttcaatccnnnnnnnnnnnnnnnnnnnnnnnnnnnnnnnnnnnnnnnnnnnnnnnnnnnnnnnnctccttctccctggcctcaatcatcttggccaatttccaagacagtacagcacttgctaggaacagtggagtaagggccaaaataacggttgtaaggaagccataggggtcctttgcagcccattccacaacatactcagcccaagcctttatatcaaacatcttcacagcagtcttatgaaaactggggcttatgcttgagtagtgatcccttaactttgtcctggtgttattagtgacccaatcacgacttcagatgacccttggtagtctgtcttcttgagttctactgtacacatctgagagacggtttaaattctgtacaattggcctatcggggctgcagacccacggaggccacgttcactcctgcccgtcggccttggcaagcgcgggccccttgtcgcgcagagcggagggtcctgggagatcctgggttggcccagccacaccttgcgccgccgccgtttctgctggacaccaggagaaaaccacggcagctgcagccaccaacttcccctacatagccccacgggatcggatcccactccccactcaccgccccaa

SEQ ID NO: 162012 - DNA, 1064 bp, Homo Sapiens
  misc_feature (574)..(619): n is a, c, g, or t
cccttgtcccttgtttatttcactttcatgccggctgttaattagctccacagcactctgcagcactccttttgggaggtacccaggcccagtgatcattattttctctcagtcacacctcatgctgtcaccaatacaagcgaagtggatccaggataggtgtttagtcatcaagcaccctagtttcctttcctctccgtgggtactggacatttattaactcttgcagcatttgggcctgctgcttttgcagcacagtggcgctggttccggtcattctgcctggcccaatgaagggtgaagtcacgagctagctgtggtggaaggcaacctggcaggattcaccgtcaatctgcatggaatttgggattctacatttccttgccagcacagactttgtccagttctaccagtcttgtggaacacactgcagcttgaattccgtggctctgccaggcctactgatgctacacctgattcagtttccaacaccctccacacagagggacccccgatccctgccgagcgaggctgttttaactggttgggaaaatggcacaggtgatggtccttnnnnnnnnnnnnnnnnnnnnnnnnnnnnnnnnnnnnnnnnnnnnnnataagcaagaaggtggtcaaaaagatctggaatgcttatgccacttcccaagacaaagaggtcgggagaaaaggaactacaaggcctactgtactaagtaatgcagatgattaaaataaaagtttccattccaaatgtacattccttgagggtatatgtgtatatatatgtgtatctacatatgtatgtaggcacacacattatgtttacatctatacaaacatggacacttgtacatgcatggagggtctcgagaaggatacacatcgaaccagtagcagtggctgcctctgggaatgggaactgatcaactgaagcatgggtgttaagatacacacgtttagatggtttatattttttcctatgtgcacatttcctgtaaatatttaaatgtacattggccaaggattgagccaacttttttgtacaaagttgttttttaggt

SEQ ID NO: 162013 - DNA, 909 bp, Homo Sapiens
  misc_feature (630)..(658): n is a, c, g, or t
acataaaaaagcaactttgtacaaaaaagttggcttggggaacaagggtgagcatcccagtggcctcaaccctccctcagcccctcttgccccccaccccagcctaagatgaagaggatcggaggcttgtcagagctgggaggggttttcgaagctcagcccacccccctcattttggatataggtcagtgaggcccagggagaggccatgattcgcccaaagccagacagcaacggggaggccaagtgcaggctggcaccgccttctctaaatgaggggcctcaggtttgcctgagggcgaggggagggtggcaggtgaccttctgggaaatggcttgaagccaagtcagctttgccttccacgctgtctccagacccccaccccttccccactgcctgcccacccgtggagatgggatgcttgcctagggcctggtccatgatggagtcaggtttggggttcgtggaaagggtgctgcttccctctgcctgtcactctcaggcatgcctgtgtgacatcagtggcatggctccagtctgctgccctccatcccgacatggacccggagctaacactggcccctagaatcagcctaggggtcagggaccaaggacccctcaccttgcannnnnnnnnnnnnnnnnnnnnnnnnnnnnggaggagaaatctcacttttctccatgagttttttctcttgggctgagactggatactgcccggggcagctgccagagaagcatcggagggaattgaggtctgctcggccgtcttcactcgcccccgggtttggcgggccaaggaactgccgaccgaggctggagctggcgtctgtctttcaagggcttacacgtggaggaatgctcccccatcctccccttccctgcaaacatgggtgttggctgggccc

SEQ ID NO: 162014 - DNA, 921 bp, Homo Sapiens
  misc_feature (126)..(135): n is a, c, g, or t
  misc_feature (193)..(229): n is a, c, g, or t
ttggcaatattggaaagacttgttcttccacggtgactacagtacatgctgaagcgtgccgtttcagccctcatttaattcaatttgtaagtagcgcagcagcctctgtgggggaggataggctgnnnnnnnnnngtgggctcgtatttatctacaggactccatatagtcatatataggcatataaatctannnnnnnnnnnnnnnnnnnnnnnnnnnnnnnnnnnnnaaaggtttgcattaacttttcaaagtagttcctataggggcattgaggagcttcctcattctgggaaaactgagaaaacccatattctcctaatacaacccgtaatagcatttttgcctgcctcgaggcagagtttcccgtgagcaataaactcagcttttttgtggggcacagtactggatttgacagtgattccccacgtgtgttcatctgcacccaccgagccaggcagaggccagccctccgtggtgcacacagcacgcgcctcagtccatcccattttagtctttaaaccctcaggaagtcacagtctccggacaccacaccacatgagcccaacaggtccacgatggatccaccagtcccaccccagccttttcctttcatctgaacagaatgtgcatttttggaagcctccctcactctccatgctggcagagcaggagggagactgaagtaagagatggcagagggagatggtggcaaaaaggtttagatgcacgagaacagtaagatggatggttccggccagagtcgatgtggggaggaacagagggctgaatgggagagggggctgactgttccattctagctttggcacaaagcagcagaaggggaaagccaatagaaatttccttagcttcccaccatatgtatttctaggatttgagaggaaagagaggaaaatgggg

SEQ ID NO: 162015 - DNA, 895 bp, Homo Sapiens
  misc_feature (72)..(81): n is a, c, g, or t
  misc_feature (621)..(642): n is a, c, g, or t
ttggggcgtctccctcgcagagcccttctcgtttcttttttaaactaatcaccatattgtaaatttcagggnnnnnnnnnngtttaagctgactctttgctctaattttggaaaaaaagaaatgtgaagggtcaactccaacgtatgtggttatctgtgaaagttgcacagcgtggcttttcctaaactggtgtttttcccccgcatttggtggattttttattattattcaaaaacataactgagttttttaaaagaggagaaaatttatatctgggttaagtgtttatcatatatatgggtactttgtaatatctaaaaacttagaaacggaaatggaatcctgctcacaaaatcactttaagatcttttcgaagctgttaatttttcttagtgttgtggacactgcagacttgtccagtgctcccacggcctgtacggacactgtggaaggcctccctctgtcggctttttgccatctgtgatatgccataggtgtgacaatccgagcagtggagtcattcagcgggagcactgcgcgctatcccctcacattctctatgtactatgtatgtatgtattattattattgctgccaagagggtctgatggcacgttgtnnnnnnnnnnnnnnnnnnnnnnaagtgctctaacttttcttaaggttttgttgctagcccttcaagtgcactgagctatgtgactcggatggtctttcacacggcacatttggacatttccaagaactaccatgagatggttttagacgggaattcatgcaaatgaaggggtcaaaaatggtatagtgaccccgtccacgtcctccaagctcacgaccttggagccccgtggagctggactgagagaagctgcacagcgggagagcagctggtcc

SEQ ID NO: 162016 - DNA, 774 bp, Homo Sapiens
  misc_feature (642)..(652): n is a, c, g, or t
ccagcccattgcctggaattgcaaagtagcaggtgcaggggaaagggtggcactaggaaggttcccctcctgcttgtggtgcttagcgaagctggggcagcttttcaagctgctccaagtcccaattcaaggcacacagagaaggaagcctgggcctcacaaccgccctttcttcctcacatgcccagtcttgtcctctccctccttacctttcaggtaggttcctcctccaagccccgtcaccaaaagaccctacatctcagcatggagccaggtctttaaaacaatttgcccttacatgtgaatcagatgggaatacttacaatttaagacaggagtttgtttacccaaaggaatccctgattggagtaaagtgtgggaaactaagacacacttagcccttaatttattaaggggaaaatgatgagaaaaggcaaacagaaacagcaactctctttagaaaggcttaaagaacacccagacctggtaatgcttctctggtgctcagggcatagaaagctacagagcagagggttgagaagaatccacaagaacatacaaacatatggacccctcagctatgtcatgcactatgatctcatttattcctgttagaaatattatttgaaatactattttatnnnnnnnnnnntagttgtcaactcccggccttcgccctccccactgcatcctgcagtctttcagtgtttcctacaactgtctccaatattgctgatcaaaaagcaggcttttggcccgggcgcagtggcttat

SEQ ID NO: 162017 - DNA, 897 bp, Homo Sapiens
  misc_feature (542)..(565): n is a, c, g, or t
ttgcagatatgattctgaggtcagcaggaatttcggtctcctcttttacttccaccagatccccaaccacaacttcctccgcatttatgctcattttctcaccattttgaatcacaagggcttgctgagggaccatgtttttgaaggattccatgatctttgaacttttagcttcttgatagtaggagaagcaaccagttatgattacaacggctgatagcaccacacccaggtacagattatcgttttgaggttcctcttctgtagcagcttggatgctataagccaagaaacaaagaatcgctccaatccacagtaacattgagaaccccccaaagagctgccgacaaaacttgatccattcaggagtagtgggagggggagtgagggcgttgggaccatctcgcgccaggatctcagctgcacgagcagatgttaatccccggctcaagtctgttccatatttacgatgaagttcatcaaggctaagtttatgatcatccatagaaacttctttcttcagttcatccatgtccctgtcnnnnnnnnnnnnnnnnnnnnnnnnatcaccttgttctgaaacagctgcaggctcatacttatcacgtccaacccccttccccatggtggcggtgctcagtgcccggcgccgggtcctgtcgctggagaatcagagagaaaagcacagagcagctcccggccgagcgagcgggaccaggggagccaagtggagggagctagggctgccgcggggcgggagggtgggagggcggccggcggctcgggccgatgccgccgccgctgttgctgccgccgcccgggctgctaccgctgttgccacgtgtccgcctcctcccgccgctgctctgcgccccagaccccgccgcagctccccaa

SEQ ID NO: 162018 - DNA, 891 bp, Homo Sapiens
  misc_feature (517)..(538): n is a, c, g, or t
  misc_feature (646)..(656): n is a, c, g, or t
gagaacaatttgagactcactattttcccattattcatttttcccacataattatttctagctacttactaaaacatttggggattgaatccctgaagttacatatttaaaatttgaggaaatcctttttctcctcttctagttttttctttattgaagtcactagagatgacaaacttttttattataaacttttttccaacaaaaaagatattttaggtgactattagattgatagctaaatatcctcatcaaagtcaaaacatctgtaactaaaaagtgctgtcttttgcaagctacacaattaagagcttagctatcaataatgtaattttgtactcctggaagagtattcctgatctaggtatcaaaggtttacgtaggaatatatttactatataatatgagaaattcaaagagcagagataaaaagcacagatctaatggccataccatttttagaagttacaatagctagaatattgctatttctcaatggattatagtattttaattnnnnnnnnnnnnnnnnnnnnnnccgcacaagattcatcataatgcatataaagtatttagcacaatgcttggtacacaataactattcaataaatattagctctataataaacaagggattaaaataatnnnnnnnnnnncaaacaggagaacccaaaatgaagggaaaaacttagagctaatttcctagagtatgtatttaaatggaaagtcggagctcacagagagcagtcaggaattctgcattttctggatctatcttttgtgccttctcatagtactcagcagcttgcctcttttctccttccagcttgtaaacaaaccctagggcacttaaactctgcacatagtaaagcattgtgccaacttttttgt

SEQ ID NO: 162019 - DNA, 923 bp, Homo Sapiens
aaaactttgtacaaaaaagttggtgccgtagctccctcttcaaagccagcgaatttattccttaaaaccagaaactgaacctcggcacgggaaaggagtccgcggaggagcaaaaccacagcagagcaagaagagcttcagagagcagccttcccggagcaccaactccgtgtcgggagtgcagaaaccaacaagtgagagggcgccgcgttcccggggcgcagctgcgggcggcgggagcaggcgcaggaggaggaagcgagcgcccccgagccccgagcccgagtccccgagcctgagccgcaatcgctgcggtactctgctccggattcgtgtgcgcgggctgcgccgagcgctgggcaggaggcttcgttttgccctggttgcaagcagcggctgggagcagccggtccctggggaatatgcggcgcgcgtggatcctgctcaccttgggcttggtggcctgcgtgtcggcggagtcgagagcagagctgacatctgataaagacatgtaccttgacaacagctccattgaagaagcttcaggagtgtatcctattgatgacgatgactatgcttctgcgtctggctcgggagctgatgaggatgtagagagtccagagctgacaacatctcgaccacttccaaagatactgttgactagtgctgctccaaaagtggaaaccacgacgctgaatatacagaacaagatacctgctcagacaaagtcacctgaagaaactgataaagagaaagttcacctctctgactcagaaaggaaaatggacccagccgaagaggatacaaatgtgtatactgagaaacactcagacagtctgtttaaacggacagaagtcctagcagctgtcattgctggtggagttattggctttctctttgcatttttcttatcctgctgttgg

SEQ ID NO: 162020 - DNA, 705 bp, Homo Sapiens
  misc_feature (207)..(221): n is a, c, g, or t
ttttatgggaaaagctctagagatttcacagatccacccaaaaagtattacaactaattaaattcagcatagtagcagcatacaaaattaacatgcaaatatcacttttgtttctatacagtaatgatgaataattagaaaacaaatttaagcaaacaagcacatttacaatagcactgaaaagaataaaatacgtcgggagtaacnnnnnnnnnnnnnnnttctattttgcagaaatagaaaaatcctacttaaatttcatatggaatctcaagggaccccaatgagtcaaaattatcttgaaaaagaagtccagtgttacaaaatgtacacttattcattccaaagcttaatacaaagttccaaaatagtgtggtactggcaaagagacacacatatggacactggaacagtataaagcagcatatggtcaaataatttttgatggggatacaaagaccgttcaatgggcaaaggactgtctttataacaattggtgctgggaaaaaatggatatccacaagcaaaaggatgaagttgaacatttaccctacaccataaacaaataaaaatgcatcaaagacctaaaggtaagaacttaaagtataaaatttttgaataaaatataagtagaaaacatcatgacaatatcacaaatataatgacacatttaaaaaagtagatgtggccaggcatggtggctca

SEQ ID NO: 162021 - DNA, 864 bp, Homo Sapiens
  misc_feature (21)..(21): n is a, c, g, or t
  misc_feature (67)..(67): n is a, c, g, or t
  misc_feature (110)..(118): n is a, c, g, or t
  misc_feature (291)..(319): n is a, c, g, or t
gatatccaaaagccacagggngcaaatgtttagggttttattttccaattttaattttggttttctnacaaagggttgacattttcccataacaggtgtaagagtgttgnnnnnnnnnttcaaatttttgggggagcgggggaaggagttaatgaaactgtattgcacaatgctctgatcaatccttctttttctcttttgcccacaatttaagcaagtagatgtgcagaagaaatggaaggattcagctttcagttaaaaaagaagaagaagaaatggcaaagagaaagnnnnnnnnnnnnnnnnnnnnnnnnnnnnnagattgagttcatttatttgaaacagactgggccaatgtccacaaagaattcctggtcagcaccaccgatgtccaaaggtgcaatatcaaggaagggcaggcgtgatggcttatttgttttgtattcaatgattgtctttccccattcatttgtctttttagagcagccatctacaagaacagtgtaagtgaacctgctgttgccctcagcaacaagttcaacatcattagagccctgtagaatgacagcctttttcaggttgccagtctcctcatccatgtatgcaatgctgttcttgcagtggtaggtgatgttctgagaggcatagttggccagcaggcgcatgaaggcaagttgggtagccatttccttggaagtcactccttctacattatattcaaactggctgccagcattgatagtttctcctagccagacgtgtttcttgtccttggagctcctataccagttcttggctgggatgttttcaggttgggcccggatacaggtttcgccagtagagaaatcacagtatactttccaa

SEQ ID NO: 162022 - DNA, 872 bp, Homo Sapiens
  misc_feature (666)..(676): n is a, c, g, or t
ttgggcttgttgccttgtttattccggaacataccaatttaagcttaaggtccagcagttggagaaagcactgtggcagtcacagccatcctcataatacacaagcgccaggagaggccaaagaacctttactccaggacacaaatgtgtgacgactgaaatcaggaagatttttctatcagcacccaggtcttagttttcacctctagttctggatgtacattccatttccatccacagtgtactttaagattgtcttaagaaatgtatctgcatgaactccgtgggaactaaaggaagtgggaacttagaaccagacagttttccaaagatgttacaatttcttttgaaaaaccttttgtttattagcaccaatttcttgccactaagctatttgttttattatacatcctttaattaaaaactatatatgtaacttcttagatattagcaaatgtctctgctaccatttccttaaggtgttgagctttaactctatgctgactcagtgagacacagtaggtagtatggttgtggacctatttgttttaacattgtaaaattttgagtcagattttaatattgtaaaatcttgggtcaaataattcaaagccttaatgcagatgcactaaaacaaagaaatggtaaatgaattgtttgcatttnnnnnnnnnnnctcttaagaaaactgtactaaatctgaatcatgttttgagcttgtttgcagtacttttaaacattattcactactgtttttgaagtgagaaagtatcagccatttagcattttaagttggggtatttagagcctgtaatctaaatgctggctcaatttattccccagctacttcttataccactattcttttaatg

SEQ ID NO: 162023 - DNA, 774 bp, Homo Sapiens
  misc_feature (241)..(250): n is a, c, g, or t
  misc_feature (492)..(534): n is a, c, g, or t
tttactttcattctaaacgtctcagtataaaccttaccacaacactatccattattcttgccaaaaacatttaacataaatcatgagaaaacaaattgagactgtcagccaaaattctttaaatatatcaacctcatgaaagacactaaaaaaagagaggggaagaagggtggccagggatctgttttgaagacgactaaagaatcattacaataaaatgaaatctgtgatccttgattgnnnnnnnnnntctgcaaatgactttttttaacattggggaaatttgagtatggactctgtattagttaatattaccttatcgatgttaatttctttgggtgtggtaatggtgatgtcttcgttagaaaatgtacttgttcttaaaaaatacatgctgagatatttagaggtgaagtgtcaccatggctgcaacttttaaatggtcagcaaaaaaactgtgcatatatgtatatatatatttgtgtgtatgtnnnnnnnnnnnnnnnnnnnnnnnnnnnnnnnnnnnnnnnnnnnaatagaacaaattcagcaaaaagttaacaattggtgaatctagataaagggtatggggtgttaattgtaccttcctttaaatttttgaggtttaaatttttcccatgaaagtatggggaaacacttactatatattggagcattgagagatctttgttgtagacaacatataattattgtcaaattatttcatcaacactaaaaacacttcagcactaggccaggctcagtggctcacac

SEQ ID NO: 162024 - DNA, 925 bp, Homo Sapiens
  misc_feature (481)..(490): n is a, c, g, or t
caaaacatgctcctcaaacatggaggtattattacagtacttaggtatgaactttccagtttaatactggccgcaaaagccacctctcattacccaggatgtatacaaaaggcggatgtgtcaatggtatttacagaaatgttccccaggggtatcaaatggcaaaaccccttatgtggcatctgctggaacttaagcaccattttaaaaagaaggaatgactttctgttgtttggaaacttggaacacacaaggtgacttcaacagccccagaggctcccaaccgtcaccaacgtttagcgctgtcatggaggtgaggtggaggaggctgcagggccacccagcatcctgggatgcaggctctccaaggtcccagcagaaccccacactggtggtcctactgcccacccagagccgaactcgacaggggaccgatttgaaagtaaaccaacattcttaatgtcaacacaatgtttgtttnnnnnnnnnntcaaaatgtgcaaagtggcagtgactgtccagttttgagaagcgtctagcaagtccgagcgtgttcaattttctttagcaactgctgctgtcttgcctgcaatttttccttttccagcaaaagctggtgctcctcggcctggagggagtggacatactcagtggcctttttcaaaatgaccaccttggcggccttctcattctttaccaactccggcacgtggtccctgagcgtgagaaagctggaccgaaggtcgttgcggcgctggcgctccaggatgttgtggtttctgcgacgctcactgtcctccgagtcagagtttcgggggctcaagctcttagcctttggggggatgacactcttgagcggacgtggggacgcctcgctctttatcttcttctgtgggggtgcatccccaacttttttgtacaaagt

SEQ ID NO: 162025 - DNA, 992 bp, Homo Sapiens
  misc_feature (224)..(237): n is a, c, g, or t
acataatgaaaactttgtacaaaaaagttgggttctaaggttttgtggtcaaatgaagatactttttaaagtcaataaaaaggtataaaacaatacactgtcaatatggatagcacagaaagatattaagaaagaagtttaaaacacttagaatttccattctaaagatgacattttgctctcagtccagacttctgtgcttatatttaatatttatgtatggnnnnnnnnnnnnnntttaaagtgtgatcgtactccacttactgttatttaacctactctgctcacttaaaaatgtattcgttattccaggtcaaagaaatggcagatgtccttaacccattaatcactgcagtatttctagaggttagtaattgtttttaagtctctgactccaaaggtattacgtataattaactcttctgaagccttttgcttttggcttttttattttattcaccatattggtagtttagccatattgatgtagatatgacagaaatagtgtatatttgatgtgtattccttccttattaattagaaagcatacagttgaagctgcagggtactggaagaagcagtagattgtcattacttagtactaatccttgacagcttaatggacggttcacagtaatgaaacaccttctgaataccagctggtaaacatgaagggctgaaaattataaacaggtaagcactgcttcctaatttaggactaaagtttatgcagaggtttgttacaaaacaaaacatgttgtcatttccttgccaggaaatcatgctttgttttgtcagaaaggtagtgtttacattatcctcatcattccattagatttgagaaggtagatggtttaagtcaatggaaaagaggatcctgtgactgattaatacctccccatagtgatgatgttctcgagacttcgatgtattaagactctaccttgtaaactaactgtgcagacacatagacttttgatgatttgtttaaa

SEQ ID NO: 162026 - DNA, 980 bp, Homo Sapiens
  misc_feature (488)..(497): n is a, c, g, or t
ttatagtttgccattaatttttactttttaatgcagctggatctagcaatggggtgggacatgcttccgaagtaagctggtataaatctatcagataacctgtctcttatgtttcaaagttaaatattaaattcatatattgtggtcttcaaaaaggtattgctaggacattttaaaatgaaattttgactgcaagcagtggttgttcaactaacctctttttagcgatgacttttaaagaaacttacgttccaggtgtgaacctcaaatggactgaataaccctgagttggttgcagtcccaggagcctgatgttaatgaggctgccaggatgaaatactccagaactgttggggatccaaattcgggtctcaccctagcagaactgatccaagaacgtcacaacttttgaagtcgattggcacagatcaagaccaagatttggccctttgtctgtaataagtagaggaacttggtgtgagttaacnnnnnnnnnncccccagccattggtgtctggagttcccatcatcaatagaaggattagagaattctaggaatgatttcttttgatttggcaagggagatttggtcaattaggggaactactggaactgtggctctcactctgtgacagtgtgacatgtaggtgtgttggaattgggtgaatgactggctgctccttgatatcctaccccttgtgaccatcatttctgaaagcttgtttactgtgaaagattaaaacaaaacacatttagaatagtgcaattcgccatatatgacatctcagcatcttctgcttttcctggactccaaaattaaattgcagttcttgaaaatgtatgtatgccctttgttacagcaacagtagccttctgtcacaggggttatcttgcctaaaagatggataagaaagatgtatttatcaccaacacattcttcagctagatccaacttttttgtacaaagttggtttttatgt

SEQ ID NO: 162027 - DNA, 879 bp, Homo Sapiens
  misc_feature (202)..(211): n is a, c, g, or t
aaaaaagttggtactagcttctttcctcttaattaaaaaaagtgcctctttacataaaaccaaatgcttgtctgctagcatactttttcaaatgggaatccactgttttctcactttcctcccatatctccgtccttcatccaaaaccttcccagaatccatcagcaagcatgtttgaggcctgtggtgtaggggactgaannnnnnnnnnaacttctattccattttaattgtaggatatctttgtccatatacccaggtgtcctgatttgaatgtactatttgatcctcattgtgttcaggcaaaaaataggaaatgagtaattttgagtttgaaatctctcccagaagacaaactacttcagtgagtaaaagctttgacattttatgttttattcataaagggggttaattatttgctacaaagaagcacgatctattttcatcatcgatttgaaaatatctgtaactcctatagatcctataggcagagagttttcctttctgactttttccctttgctttcgtgtgaccacatgttttctgtaccagtcactggggaaagaagtgagtttatctcgtttgttttaaaagttttgcttgtctatttagcattcctttttgggtctcaagatttatggaacaataaatgtcatttaatgctgtgtgcttattttgaattcctcatcaggttttagaagcggggtaaaaatacttagatgcttatcagacttgaaattatactgagtggcattgaacgtgagtttgtcccaatgaaacaggctaaataaatttaggcaccagcaaattttgttactttgtttttttaatagtaggatgtacccctattcatatataaatgtttctgattgttttgcc

SEQ ID NO: 162028 - DNA, 627 bp, Homo Sapiens
  misc_feature (139)..(149): n is a, c, g, or t
  misc_feature (280)..(289): n is a, c, g, or t
  misc_feature (418)..(438): n is a, c, g, or t
ccccgccagcatttttgatgtcagaaggagggtgcgtgtgattgtgtcacattcatttggagcaccactgattgatttttcaccaggtggccagtttgatccaaatgaccgcttttcatgagacacccaggatgctgtnnnnnnnnnnncagcacttggatgtgttgaggaagggggccagtttgctgtgctctgtttgttgctgctctctctgggggccgcacaatgttcgcacacatcacggaggggagaaaggcattcgtacccaacggaacaaccnnnnnnnnnnaccatgttcatacccggacatgtgaggctctattatcaacaggtggtgaggaaaattctgtttttattcgctttttggtaaattctgtaggccctggctcaaggacttagcattttgtttcatgtacannnnnnnnnnnnnnnnnnnnngccatttttggaattgtccttggtttttccttaggtcataggtcatagatgcagaaaagtagtatttaaggcatccgcatccagcatcagatggctttgcatcccgaaaaaccttgataaatcagtttgaagcccccagcatgtgtaatatggctttatacaatataataaatgcctaatgttaaggtt

SEQ ID NO: 162029 - DNA, 804 bp, Homo Sapiens
tgttagcccatcaggcctaggtgccgctccctcagggccctggagcccagcagcacccggccgtccccggcagaaatgccagcgttcccgcaacaccagcaccactctctgggcagggtcttgagtagtggcgttagaggcagcctggccctgtgggcaggaccttggtgggtatggcaggaaggggtcctgggtcctcacgggaagcacagcaccagagctgctggcgcacagcaggaagtctgtgcagtagcctggaggcacagtcaggtcctggcggtatttctcctcccccagcagctggcgcaacccctcagctactatgtccttgtgactgtacttgcagcgggcacggtcggtgatgagaggctggggaaagatgggcacttgctgccttcggggaaggcggggaccccggtatcctgggagctccagctccacggccgtgtccagcagggagaggtagcgacgcacaatcagagcatgaggggtgccactgatgtagttgatgaagccaggggaaaaaacaaagtgcagggctctgaagggcaggcaccgcagttggcacagtgacatcaagatgttgactgtagccaggggtgccacccctgcttcccgagccaggatcctctcaaggcagggcataaactgctgttccaggggcaggtagttcagtcgcccaaagggcaggaccaacttctgtaccaccttgctgctgagttgcgtttcctgaaccaccaggaatgtggtgtctaagtggcttccagaagcccaacttttttgtacaaagttggcttttatagg

SEQ ID NO: 162030 - DNA, 501 bp, Homo Sapiens
cagagaagggaaagagccttcattctttaggtttgtttttgcctcaaagacatttctatatgggtatctaaagttttagtttataagtctcataatgatttgacccatgcagtccaacttttagatagtatttccataccccccaaaagctggcaggtggtagtcgcactagattcagaccaagactctccgcattgtcatcctaggtccttctaatgaagaagtcaatactctagtttatttaacaaataaaggagtctaagtacatggaagttaagggagtaagggtgggggtaatgagattattacattaaaataaagacttcacacacgtgtgtcccatgtctaaaattgttgaaaatctgattggagaagattagaagtaattagcaactcaattatttataaacaaatataaaaatgcacaaaccaaatgatgcaaaaatatcttttatggtaatctaaaaattcccaacttttttgtacaaagttttttaatgt

SEQ ID NO: 162031 - DNA, 851 bp, Homo Sapiens
  misc_feature (520)..(531): n is a, c, g, or t
ggtcccggttctgtagtggccgccccagacagaggcagtctgaattggggtccaggtgtccgtttttgcacatcgctgggcccctcctccacctcatcctcctggttcacccagagcctcacaaagctggcaggaaaccatccctcctcatcgtcgatctggccccaccaccaatccttgttggaagcatccaagactttgatgacgtcgccagctttaaatgccaactcccggttggccatggtgacgtgatcccatactgcctcagcactaacgatggaatctccagtgatcagcttggaggttaccgctttcaacattttctggtgctcttctctcccactgctctatagacatcatcccttcagtactaaaaccagaacctgactttccctccctgctcagggtcccaaacaggtctgaccatatcacagcgaggccatgttgaagctcaaaacgttttcccccctgagtaagaaagcttgttctttctctctctttccctgtctctgtctgtgannnnnnnnnnnnctcggtggctctcgggatgaaatcaaagcgagagttcgcgacagctcaggtggctggactccattcagcgcgttcccaggaaaaacatgagtatgacattgacaagcaggaggactacaatcacggcaaaaacgactacagtttgcacatccagggtcatggtgcaatgcagaacactgtagtgttccaggtggggggccggcagattgggagatgtcagtctctgttctgtcagactgtccatacagccaccatgctagaaaggagaggaggaagtagggtggttagagaagggctgggtttggcgcccgagtttagtc

SEQ ID NO: 162032 - DNA, 777 bp, Homo Sapiens
ttggtgaaccagagccaacaagcccaggcgagggaagccctcaagaagtacttattctactttgagaggtgggaaaaccacaataaaagcttgcagctagaggcacagacataccagcggattcacgagaagattcaggagagggtcatgaacaatctggggacatggatcgactggcagtacctacagaatgctgccaagctcttggccaagtgtcgatacaccctgcaatacacctacccatatgcatattacatggagtccggacccaggaagaagctgtttgaataccagcaggctcagctggaggctgagatcgaaaacctctcatggaaagtggagcgtgcagacagctatgacagaggggacttggagaaccagatgcatatagcggagcagcggaggagaaccctgctgaaagatttccatgacacctaagttgggatgtggatgtgccggggtgaggaagatgtggctgcaaggtctcccggctgccatactgcatgctgcaggctctgcctttcatgaccccaggcaacagccagggccccactcctgagagacactggcaacacctcttagttgatttctgttttcttctcttttcactttttgtttctaccagggtagaggccatgttgaactggcctcttttcaggacttttatttccccctggatggttgttgggagggagggaaagtgttttctgaatggctattaatagtattagatcattacaacttatgtaactttcaaaggttgtacaattatacaaa

SEQ ID NO: 162033 - DNA, 930 bp, Homo Sapiens
  misc_feature (558)..(570): n is a, c, g, or t
ttggctggactaatcttcttagtcgtgtcactcttcttgaaacagaaatgcttttgtctaaaaagaatgatgaatttatagagtttaatgaagttagtgaagactacgcttcttgtagtgacatggaccttctgaatcctcacagaaaaagcgaagtagagaggccagcaagtattcctctgtcctctggctatagtacagcatcatcagattcaactcccagagcctctactgttaattactgtggtttgaatgagatttcagaggaaacaacaatccagaaaatggaaaggatgaaaaaaatgtttgaagaaactgcagagttactgaaatgtccaaatcactacttgtaggattttctacatgaacttttttctaggactttggttactatacatattgtatattttaagaattctttatacaattttaatatactgcaatactgcagtttttgacaatttggattccatttggtatatgaatttttgcattcattattgaataactcttttaatatttttgagcaatgattatactgctttaccttgtgtcacnnnnnnnnnnnnnaggaaaaactcatgttccagtatatttctcttacagagtgaagtcattacagcactgtatttctgtgttgacatttgttggcagtgtgctaagtaatgttttttaaagcacaggcttgaggactatggtttacatcctgttggaaacattccaaatgggacttgtgtattatacccaggaggctctcatatataccatcttggcatctgtactgatgaataagttataatgaacagttaaaaatgctcattgaaaattaaataaaacaaaaaggcagttatttcatgcttggtcaaaaacatcaataccctttccaattaacactgagaaattaagttaagattctcctttttgtactgg

SEQ ID NO: 162034 - DNA, 914 bp, Homo Sapiens
  misc_feature (228)..(261): n is a, c, g, or t
gccagtttaatgctttttggtcatgttctttgtttcttccgtttctgctgtacatttcctaacaaagaataagcagtggctttaaaaatatcttacatgggaacaatcaacacgaaacatgcctttgtacatgagcttgactcggcgacgaatcaacaataccaaggaacaaaaagaaatatcggttcagacaactccagcacacaccacgtttttggtgcgttcttnnnnnnnnnnnnnnnnnnnnnnnnnnnnnnnnnntatcccaggagtacagtgttgtcttgtaactggagcttggcttagccaatgggggtcctcctctccaccccgccccccattctggctggggcaggcctctagtggccctgggtcttgggcggcttgggctcatggatgacagcggctgctgacagccacggcccgatggcccgggcagtgctctgcttggccacgctgtagtggctgatgactgtgtagaagcggcttctggaattggggtcctgggaggagtagtaagcatccagggaggctgggatacagcgtttgtgcttatagacgaatccctctgggcagctgtgatcataggtgaaggctttgtaaaccaccaggaacacgatgcacgcaaggaaagctagggccaggctgacaaggatggtgaccgtaaattcagcgattttcggcacccggaacttccctttgttcttctgttccggctgatattccgttcttgtcttcacaatcaccttttctggagcaggcagctgtaagtgattaacctccaagggagtgatgagagggacggtctggaagccatcctcaactgaaggcggcttggttcccttctcgctggggttactgttcagcttcaccatccttacgcccaacttttttgtacaaagttgttttttatg

SEQ ID NO: 162035 - DNA, 1252 bp, Homo Sapiens
  misc_feature (265)..(265): n is a, c, g, or t
  misc_feature (726)..(793): n is a, c, g, or t
gcagtgtgcggggcgctgtcggatctccgcagagcgatgccatgcagacatccattcttcctcagatctggggtagcggatccacaaagttcctgacactacttccatatttgcgctacaggagattcacgctacaaaagggaggccagtccgttctggtcttctcgtagattgccttgactcaggcatggccagcgtttcgcgcgatggttggacaccgtagtgctaagtccagtagagcgatggacctcagcatagcatgctngtcgtggcagggatgccacagcccacgtcacaggggagaaccccaagtgatactcgttccctgactgtactcgtctgacctacctgcctgagccatgttcacctgcccagcttgtccccgtgctgcctgcccaaagaccccagccatttggcctgtcaacccacccattggcctgtctgctgggtgctaacaaagctctcatcactccttcacttggtctgtctgtctctgtcttggtagttgccggtggacagcatggccgtgccagcctcccacactgaggccaggtctaccccccatcataccagcccccaggaccactaccccacggccagccaggggtccagagctagcccaggctggggatctcgactcagacaagatggtgacaatgccttgagtctgaggcatcctctgcctgctttcctgcctgccccacctgcctcatattgtgtgggccnnnnnnnnnnnnnnnnnnnnnnnnnnnnnnnnnnnnnnnnnnnnnnnnnnnnnnnnnnnnnnnnnnnnaaatgcaatatctctgtatacagactggctgggccccaccccctgcgtgtggccctcccacagtattttgtgcaatgaagccctgctcccagcctttcagagacagggacacagcccctatttggaaccctgatcatcaccagaccctgggattggctatgggaaagcatgccacagccactcgccttcctacccccgcccgccatccccagttgcagggggatctggggactaccagagactctgggaaatggacaaggtggggggccccactctttctctcctgcagtcccgtagctggggcctccttccttctcagggtctccccagcccagtccccttgctcccatcccactcggtgctgttgggtaggggccctgccaggaactgaccagctcagcgaggagccataatgtgcatatgtgcacaagcagggttgggggaagggggtgtgaaggg

SEQ ID NO: 162036 - DNA, 450 bp, Homo Sapiens
tcactttagactttttaatatttcatacagcgattatggtgcattcaggaacccaaccccccaaacccactaggagggctcccacccctgccctcccaccccatttcagggccccagggcttagggtggaggaatggtcagttcctggcagggcccctacccaacagcaccgagtgggatgggagcaaggggactgggctggggagaccctgagaaggaaggaggccccagctacgggactgcaggagagaaagagtggggccccccaccttgtccatttcccagagtctctggtagtccccagatccccctgcaactggggatggcgggcgggggtaggaaggcgagtggctgtggcatgctttcccatagccaatcccagggtctggtgatgatcagggttccaaataggggctgtgtccctgtctctgaaaggctgggagcagggct

SEQ ID NO: 162037 - DNA, 610 bp, Homo Sapiens
acatatataaaacaactttgtacaaaaaagttggcttgcagagccacatgtatcaaacttcatggagcccccaagccccatgcatgccccacctgtgccaagtgcttcctgtctcggacagagctgcagctgcatgaagctttcaagcaccgtggtgagaagctgtttgtgtgtgaggagtgtgggcaccgggcctcgagccggaatggcctgcagatgcacatcaaggccaagcacaggaatgagaggccacacgtatgtgagttctgcagccacgccttcacccaaaaggccaatctcaacatgcacctgcgcacacacacgggtgagaagcccttccagtgccacctctgtggcaagaccttccgaacccaagccagcctggacaagcacaaccgcacccacaccggggaaaggcccttcagttgcgagttctgtgaacagcgcttcactgagaaggggcccctcctgaggcacgtggccagccgccatcaggagggccggccccacttctgccagatatgcggcaagaccttcaaagccgtggagcaactgcgtgtgcacgtcagacggcacaagggggtgaggaagtttgagtgcaccgagtgtg

SEQ ID NO: 162038 - DNA, 962 bp, Homo Sapiens
  misc_feature (288)..(298): n is a, c, g, or t
tatcgataaaacagttaatggtattactgtaaatatcaggaaaggctacaaaaaaagaaataagatttcttttttgtcttcaaagtgttttccatgcaatgaagcacttgctgtgttgaactgaatgcactactggagaatgttctgggtcccgagatgctcttgagagacaagactaggcttttcaaatcaaacactcaaaggaatcatgcaaccctcttatgactgggataccgtcatgtgccacttaccaatgctgtctctccagaaaaccattcaagacgcttnnnnnnnnnnntcagacttatatgataaatatacataaaatgaagacaccaactgctatttgacacgactacgggtaatgcctgtgctatgtgaaagcacctttaaaaagcctatgcggcaagagataagtgtctaaagattcaaaatgaatcaacagtattggataacaatataattctcaactcagaagctgcctcaagattaggtgcatcttcagttaatgtaacaggaaaaaaaggcaatggattttattttattaattgtatccacttacaaaccgacctaaggtcaccccgatgtgtagacacaatgagatttttgttgtttatagtctttaattgaagtgataagggaaatagatctatttaaaaacaaaaccaaacagctatttctgtctagattaagaggtggccccgggtgtgggattcacattttgagtggccacttgtggtgcgacctcgatgatccggggtttgtctatgattctggctgtgcggttgcccttctctacaatcccaataatccatgcttggtggccttcaccatatttgggggactttatctctgcacagaaccgagctgcttgctcacgtggtaaacagatcagaaggccgcctgaagtctccgggcaggtcccgtgcatgaggccgaacatccaacttttttgtacaaag

SEQ ID NO: 162039 - DNA, 873 bp, Homo Sapiens
  misc_feature (123)..(148): n is a, c, g, or t
ttggcaggcctcaggccccctcaccatcctagaggtcaagatcagctctggctagttctcacaggtctgacccaacaagtagcactgacatttttacgtttgctggatgtacacacggaagtnnnnnnnnnnnnnnnnnnnnnnnnnngcagctccttagctcaagagcaagtggcccaaggcctcagaagactagaaggaagttcctggccattcagcatggtttcccacgggtcctcgccctccctcctggaggccctgagcagcgacttcctggcctgtaaaatctgcctggagcagctgcgggcacccaagacactgccctgcctgcatacctactgccaagactgcctggcacagctggcggatggcggccgcgtccgctgccccgagtgccgcgagacagtgcctgtgccgcccgagggtgtggcctccttcaagaccaacttcttcgtcaatgggctgctggacctggtgaaggcccgggcctgtggagacctgcgtgccgggaagccagcctgtgccctgtgtcccctggtgggtggcaccagcaccggggggccggccacggcccggtgcctggactgtgccgatgacttgtgccaggcctgtgccgacgggcaccgctgcacccgccagacccacacccaccgcgtggtggacctggtgggctacagggccgggtggtatgatgaggaggcccgggagcgccaagcggcccagtgtccccagcaccccggggaggcactgcgcttcctgtgccagccctgctcacagtttgctgtgcagagagtgccgcctagacccccacctggaccaccccctgcctgcctctggctgaagctgtgcgtgcccggaggccgggcctggagg

SEQ ID NO: 162040 - DNA, 958 bp, Homo Sapiens
  misc_feature (117)..(125): n is a, c, g, or t
aaagagcatctaaagaaaatcctcctagcttcaacctacctaaatgcacacggtttataaaaaagcatttttatattaggctctaataaagaagccttcataatgaacagcaccctnnnnnnnnnctaggagcatattcaaaataaagactgtggcaaataaactattagagaaaataagtcaaagtggcggccagtggcaataagtacaatacacaaatctgggcaagtctgggagcattattccaaaattattttaagtaaatcccaattactaaataaaatctttttataattttaaaaaaattctgtcacatactacatagtctaaatttaattaccttcagaataaaactactctccttcatttatccaattagaacactgctcaaagtgaaggagggatttagaatttcttccctagaaatgagtaacagctaaacatttgtagtctgacagaattttactttttaaaaagatttcttaaacattctaatgagggggaattttttttcataatactgctgatttaagaactgctacatacaccagtagccaatatttcatgatcagaaatggtatgatgtcagcacaaaggttgagctggacacatcagctttccaacaggagaaacatcaatgacatctgaaggcagcactgagtttcctgaactaatggctacttttccacaaaaaaattagcacaatctttatggactgactagataccacttccttacatttaatcataaactttgattatgcacaaagcatggccataaacaatgaggttaatgttatttttcttgccaaagttcattttgtataaatcagttgcatcagctttgttctcaaactatgaggttctgtaagaactaaggacatatagttgtagggttactcctccattatctgcaaactatttcccccaacttttttgtacaaagttttctattatgt

SEQ ID NO: 162041 - DNA, 841 bp, Homo Sapiens
  misc_feature (181)..(201): n is a, c, g, or t
acttaagccaactttgtacaaaaaagttggccagagtacagtatcagctgagctgaccttactctgaggactaactcttttgctggaagcggtttctgatttacagctcttggtttctcccagacatgttggtgggagagattttggtttttaaggggttgttagatggagtaaattttcnnnnnnnnnnnnnnnnnnnnnaactaaaaaggggtcacagaatttcagcagttctctgatttttatattttattcctcttcctatccaatccctgccttttgagtccaggtggtaagtacattttctttaacgtttttcctgcttttcttcccaaatgtgtctttttctttgggctactgtaccctgcttccagtgctgtccccggcataggtccatctctgcagaagccatttcaggagtacctggaggctcaacggcagaagcttcaccacaaaagcgaaatgggcacaccacagggagaaaactggttgtcctggatgtttgaaaagttggtcgttgtcatggtgtgttacttcatcctatctatcattaactccatggcacaaagttatgccaaacgaatccagcagcggttgaactcagaggagaaaactaaataagtagagaaagttttaaactgcagaaattggagtggatgggttctgccttaaattgggaggactccaagccgggaaggaaaattcccttttcccacctgtatcaatttttacaactttttttcctgaaagcagtttagtccatactttgcactgacatactttttccttctgtgctaaggtaaggtatccaccctcgatgcaatccaccttgtgttttctt

SEQ ID NO: 162042 - DNA, 913 bp, Homo Sapiens
  misc_feature (280)..(307): n is a, c, g, or t
ttggagtaaaagtgctgattgccaccatcgtcgttgttctgggctaattgttataatatcctcataatggtttcatcttaatagtggtgattactgaaacacaattaggatttttcatgctcattcagatgtcttctctaattacaagcattagtgtttaacatgtgagcagccggggaatggatgtttcttggcctcagttctgaaatgggtccatttgcatccctgagggaggcctcaggcaggagggctgctggtggggacaggctgaccttggacnnnnnnnnnnnnnnnnnnnnnnnnnnnnccacacctccactgcatgtctgcattgtcaacagcaaatcccattcagcaggtgccactgcccacctgcacctgccagtgagcctctagtgaggggtttccacagcaccaagcagtcactgccacatttagcgatgctctgatgttttggcaaaatggagtgccaggtgaagatctgaggtgatggcccacaggtcctcagcatgaaagagcctttttctgtgctgagccactttacaatctgggtctgcccctgggcattcccaccccctacccccaataaatacctgcatcccagggtactcaattggctctgtcaagatgagtggaccgtggctccatcctcgcagaggcagcttacctccacttcacctgagagtttagacatgggccatggtcagatgcaagggtcaagctggagccaggcagagcatgctggagcccggaccagcatgtaagagctagaccgagtgtgctggagtcagactgagtgtgctggaacagcgaaaacagagaacttggctgcagctgggtgatgaagctgcatgaactaagccctgaaaggatcaaggtttcccaggcagagtgaagggggatgaagaaccga

SEQ ID NO: 162043 - DNA, 810 bp, Homo Sapiens
  misc_feature (64)..(102): n is a, c, g, or t
  misc_feature (351)..(413): n is a, c, g, or t
  misc_feature (489)..(549): n is a, c, g, or t
agaaattttaaggtcagtttattaggttcaatgatgaaagctatcagaagaatatttttcctgnnnnnnnnnnnnnnnnnnnnnnnnnnnnnnnnnnnnnnncataaccctctgagcatagccacagatgcttgtggcagtcaagcctctgtgcagatggggacagtccattagtcagctgagtcactctctgggtcagcaggattatagtctggatcatcttcatcatcctccagctccaagtcatccatttcttggaacaaagactcatctacctccacgttgtttccagcatcctccaagaactggatatcagatgtgtcaagattatgatctgtttcaaatagttgnnnnnnnnnnnnnnnnnnnnnnnnnnnnnnnnnnnnnnnnnnnnnnnnnnnnnnnnnnnnnnncaagagttctgcatcaaacttggctttccaatttaagaaattctcaattgtaactggagtaccatggaataattgnnnnnnnnnnnnnnnnnnnnnnnnnnnnnnnnnnnnnnnnnnnnnnnnnnnnnnnnnnnnnatctgatctactatttcatttaatttttcttgcacagctgtcactagagtaaaaatcatcaccataccaagattttcttcagcctgtaatgctagtaattttaaaatgtctgagacatcattatcttctagattttcctgggagaatatttcataaaggggagcttcatctgggtatttttcactgtatgtaaacttgagggtagtcttgacggttttgatcattttcccaacttttttgtacaaagttctttattatgtt

SEQ ID NO: 162044 - DNA, 1100 bp, Homo Sapiens
  misc_feature (59)..(87): n is a, c, g, or t
  misc_feature (301)..(942): n is a, c, g, or t
  misc_feature (989)..(989): n is a, c, g, or t
gtgccaagctaaaattaccctcactaaagggaataagcttgcggccgcggctgtaggcnnnnnnnnnnnnnnnnnnnnnnnnnnnnncacatccaagaactttattggacacagctccgcgcagggccacgggcccggatgtgagggcggctccatccaggaagtctcagcaacaggaacccacaaggcgccccaccccctaagagtgctctgtgtatgcggatgatttagaattgtcatttctctttactggatgtttatttataaagatctgacctgttcccctcgtgccgaattcttnnnnnnnnnnnnnnnnnnnnnnnnnnnnnnnnnnnnnnnnnnnnnnnnnnnnnnnnnnnnnnnnnnnnnnnnnnnnnnnnnnnnnnnnnnnnnnnnnnnnnnnnnnnnnnnnnnnnnnnnnnnnnnnnnnnnnnnnnnnnnnnnnnnnnnnnnnnnnnnnnnnnnnnnnnnnnnnnnnnnnnnnnnnnnnnnnnnnnnnnnnnnnnnnnnnnnnnnnnnnnnnnnnnnnnnnnnnnnnnnnnnnnnnnnnnnnnnnnnnnnnnnnnnnnnnnnnnnnnnnnnnnnnnnnnnnnnnnnnnnnnnnnnnnnnnnnnnnnnnnnnnnnnnnnnnnnnnnnnnnnnnnnnnnnnnnnnnnnnnnnnnnnnnnnnnnnnnnnnnnnnnnnnnnnnnnnnnnnnnnnnnnnnnnnnnnnnnnnnnnnnnnnnnnnnnnnnnnnnnnnnnnnnnnnnnnnnnnnnnnnnnnnnnnnnnnnnnnnnnnnnnnnnnnnnnnnnnnnnnnnnnnnnnnnnnnnnnnnnnnnnnnnnnnnnnnnnnnnnnnnnnnnnnnnnnnnnnnnnnnnnnnnnnnnnnnnnnnnnnnnnnnnnnnnnnnnnnnnnnnnnnnnnnnnnnnnnnnnnnnnnnnnnnnnnnnnnnnnnnnnnctatagttcagctgtaagtatccagttcgtgtatgtcttcgttccanctgggtgtttgatatccccgttcacccacgctgccctaccggaacttctcttgatcacccggaggaaagtatccatggagagcatggtcagatagatacaggttttgggtc

SEQ ID NO: 162045 - DNA, 925 bp, Homo Sapiens
ccatttcatggagaagggactgaatttgttctttggatcatcttcgatattctgggttctgcctccacagggacctgctcctcgggctcagtgtgtgggctcagcctcttctggcgggactgctggctctgaaagtagatctctctttaagtcctaataaaactttggcatcatccacatcaaaatctccatcaccatcagcatcatagattcctagttttcctagaacttcctcatagtcaacaagatcaaaccaaacgacagctacagatgtccagacgcccagcaatgcaatcaccataaaccacgtgaagaatgaagttcctgagagtccgcctttcctcccattcttgtgtcctccatgctttgtctctctccgggccccggggctgctgctgcccgcactcgtgctaccgctgccggagccgctgctgctgctgttgccgctgctcttggcattcttacgctgggccattgcacggtccgcgggggctggtgagggctggtggacctccttcagtgcgcgggggtacacacgcgacgcgggagccgctggcggcggcgggccgctggagcgggttcgggccgctgctcctgcagcagaccctgtgcctcagcaccgcctgcagcacctgggaagacttcacccgcgtgccggctgcgcgcgcccggcctcgcgtgtacgaacctgtgactccctcccggggcgagagcgcgcggctcgccgcccgacggccacgccccttcccggcctcgccccgcccccggaaggctgagtgacggcgcctgggacccaatcgcaagggcccttacgaggcggcggtaccctgccgcgctccccgcccctgctcacttagggctgttcctcttgtgtctaggtacgcagctgcctgccaacttttttgtacaaagacccttcatgggt

SEQ ID NO: 162046 - DNA, 999 bp, Homo Sapiens
  misc_feature (403)..(438): n is a, c, g, or t
gcaataggggaactttgtacaaaaaagttggcagctttaagatctctattatagaatagtaagtatatatttataaaatctgaattgtgtgtttcttctatggcttactgtgtgtttctctttcagcaataggatgctctctaaaacattcactagcctactagcctacttactaaatttttgtatatgtgtgtttgtgcacttgtatgtgtgtaaagttttttccccaacttgacacaccttatctcagacattcaaaaaaagagaacattttgtatggaggacagtctgccaactttttgcctctctacagctcttagcctgtatatttactgctgatcattcattatgccttctagataaccagtccaggttttgtcatatacctgtgtccctctattcnnnnnnnnnnnnnnnnnnnnnnnnnnnnnnnnnnnnccctccccagaaatcaggcttgtgttggaattcttctctataatactttgtttcccgcagatgcaaagtaacaaagtaactgagtaaaattagaaatctcattctgcacaactgtgcgctcagatatttaactcagccttctaatacttttaagtacgtttctgttatttatctttttgttgtttttgttttaatcccatagattgtcatcagacaataatagagtgattgagagagaaagatataaatgccacttctaactttttgataaaacttttttgagcatttttcaaaaaatttgtatgtttgtggtaatgggggaattaaacaccttttacagctgatgtatgttgggaaatcattttatgtacatttaccaactggtacttatctttcaagttggaatttttcacatccataaaagggagacttgcatcatatataattttcagtatactttgctgtccagcccttttaaacaattacagtaacattttgagttctgtgatgaatagttctaggggaagggatggaactttcgacatgtaaagtccattgttt

SEQ ID NO: 162047 - DNA, 1184 bp, Homo Sapiens
  misc_feature (475)..(514): n is a, c, g, or t
gccagttcgcaacctgttgtatacactccacaataaaaataaatggatccacacagtagcaaaatatgtgtacaaaacctaccaggaagaccagggacagacccctaccctccggtcaacatgagacaaggagagggaaggaaggctgagaatggggcaggagcccttgcagcaccagcctgtgtctgcagccctgggtcctgaggtaccactgggggatggaagaactccaaggagagccccagctgggtcctaataccccaggagccttctggcttcttcactttgggcctgcagggtctcgcttgcatacttctggaggagttccattttcttcttcgcaccagtgcctcctcaatctcttgctgcgagggaacagggacgtgagcaatgaacttctgctggctgtcgtcccctcctttctcctggctgcttcctcgtccgactcctcctcggtgactgcatagatgttgannnnnnnnnnnnnnnnnnnnnnnnnnnnnnnnnnnnnnnntgccagccgagcctctctctctgctttccacttttccactaactcggctctgagtttcttttcatattcctgttccaaaggcacaataacaccatcatcttcatctaggtaaccatagtactcaaaatcgattgccttcatgagctcagcacgtgtctttctgggaggaggaagaggttctttttcaaacagctctctaacaccaggcaaatcttttgctgctccaaagtacttgtaacctcggtttcctgggacttcttttccttcatgatccagcattttagggccaacttttccataatcaggacctcccagctcctttatccggacctcccagtgtcctttctcccttagcagcttgttaatttcatcattcaggtcacgaattcgaaattcacctaaaccagcattctgaatctgagccacttttttagagatctctccaatgatctgtcgtctccacttctcagctttaggcagttcagtacattctgaggccagaaagggtcttcgttccttcacttttccctcttccagctgagcctggcgaaatcttgctaaggccgtcatggccttttctgcatttcgggccatggtgtcgctaagggcgccgtcctggagccccgcggcccctgtccaagaaactccacaggcccagaagacgccccaa

SEQ ID NO: 162048 - DNA, 976 bp, Homo Sapiens
  misc_feature (296)..(308): n is a, c, g, or t
actaatagcaaactttgtacaaaaaagttggaaattttccccaaggtctgtgtacactgggctcagtaagttgttatgttgctggaattgaactactccaccagaaactagagctccctgacaatgtatccggtgaatttggatggtccttctgcctggcttgtgtctctgctcccttacagttcatggcttctgctctcttcatctgggctgctcacaccaaccggaaagagtacaccttaatgaaggcatatcgtgtggcatgagcaagaaactgcctgctttacaattgccannnnnnnnnnnnnaaaataatactgatattttccccacctctcaattgtttttaatttttatttgtggatataccattttattatgaaaatctattttatttatacacattcaccactaaatacacacttaataccactaaaatttatgtggtttactttaagcgatgccatctttcaaataaactaatctaggtctagacagaaagaaatggatagagacttgacacaaatttatgaaagaaaattgggagtaggaatgtgaccgaaaacaagttgtgctaatgtctgttagacttttcagtaaaactaaagtaactgtatctgttcaactaaaaactctatattagtttctttgggaaacctctcatcgtcaaaactttatgttcactttgctgttgtagatagccagtcaacccagcagtattagtgctgttttcaaagatttaagctctataaaattgggaaattatctaagatcattttccctaagcatttgacacatagcttccatctgaggtgagatatggcagctgtttgtatctgcactgtgtctgtctacaaaaagtgaaaaatacagtgtttacttgaaattttaaactttgtaactgcaagaattccatttcagccgggcgagggataatataatttttacctccccgtaagattttcataacccccaa

SEQ ID NO: 162049 - DNA, 588 bp, Homo Sapiens
  misc_feature (201)..(227): n is a, c, g, or t
  misc_feature (477)..(540): n is a, c, g, or t
aacataaagaaaactttgtacaaaaaagttgggtgtccaagtgactgtgttgcaggcggcccggctctggcagggactggtggggacgcggggagcggcccaggcccctgccccgccgggctcagcctcccatgcgctcgcgcttgcctgtgtcccgggcttgtctgtgaagtgggcgtgaagatcgttgccaccttccannnnnnnnnnnnnnnnnnnnnnnnnnncaccatgatctctggattgttcatgtcgtcgtgctgcgccgggagccaccgccctccggagacagggcagctcccctacgaccctagcgcctccgccctccgcggcccctctcctctcttcctgctctgtccctccttctccatcagggagcagcgtgacttcagcgagtcccgcgagcacctggctagacagttaacaagcacgtccttccagcctgagccagcgcaggtttgggagggggcttcctgnnnnnnnnnnnnnnnnnnnnnnnnnnnnnnnnnnnnnnnnnnnnnnnnnnnnnnnnnnnnnnnncgtagtgacgaattcctaactcttccctctccgcaggcttaatgaatc

SEQ ID NO: 162050 - DNA, 956 bp, Homo Sapiens
  misc_feature (731)..(739): n is a, c, g, or t
ttggtgacgctaatccaaaaatgtgattttcccattatgaagttttcactctacttcttggcttatgaggataaaaatgacatccctaaagaaaaagatgaaaaaatagcctgggcgctctccagaaaagctacacttgagctgacacacaattggggcactgaagatgatgagacccagagttaccacaatggcaattcagaccctcgaggattcggtcatattggaattgctgttcctgatgtatacagtgcttgtaaaaggtttgaagaactgggagtcaaatttgtgaagaaacctgatgatggtaaaatgaaaggcctggcatttattcaagatcctgatggctactggattgaaattttgaatcctaacaaaatggcaaccttaatgtagtgctgtgagaattctcctttgagatttcagaagaaaggaaacaatgtgattcaagatatttacataccagaagcatctaggactgatggatcactgtcccgattcaaattattcttcagtccatttccccttcctatttcagctgttccttttcacctaactgttcagtcattctggttttcaagcagtgctttatctcatgtccttgaatatagttgtgtaactttattttttaggtaataattagaacagttcccttcagaggctgcatttgccttcttctgccacctaaatattacttcccttcaaatctgcctttgaatcatcattttttnnnnnnnnnttaacatgtttttgttgtagttatcttctggggtttcaattcctcagaaacaacttttttcacaacggaaaggaaagaacactagtgttctttcagtaaagtacaaagtgtttattttaccaaagagtaggtactcttgagagcaattcaaatcatgctgacaaggatactgatagaaaaagtgattttcttcttattataaagtacattttaagtt

SEQ ID NO: 162051 - DNA, 881 bp, Homo Sapiens
  misc_feature (121)..(129): n is a, c, g, or t
ttggattggaacgtgaagaattatggaaaaaattagaggagctaaagctaaagaaagctctagaaaaacagaatagtgcttacaacatgcacagtattctcagcaatacaagtgccgaatnnnnnnnnngcctcccacctctgccggataggcagagttttgtatgcttttttgaaatatgtaaaaattacaaaacaaacctcatcagtataatataattaaaaggccaattttttctggcaactgtaaatggaaaaatatatggactaaacgtagccctgtgctgtatcatggccatagtatattgtaacctttgtctaatcattggatttattgtgtcacttctgaagtttcacagaaatgaatgaattttatcatctatgataagagtgagataattatgggagtggtaagaattatgacttgaattcttctttgattgtgttgcacatagatatggtagtctgctctgtatatttttcccttttataatgtgcttttcacactgctgcaaaccttagttacatcctaggaaaaaatacttcctaaaataaaactaaggtatcatccttacccttctctttgtctcacccagaaaatatgatggggggaattacctgccctaacccctccctcaataaatacattactgtactctggaatttaggcaaaaccttaaatctccaggctttttaaagcacaaaatataaataaaagctgggaaagtaaaccaaaaattctttcagattgttcctcatgaatatcccccttcctctgcaattctcccgagtggtaacagatgggtagaggcagctcacgtgaattacccggcttgcctctcaattcattcctcctcttcctctcaaggctgaaggcagggc

SEQ ID NO: 162052 - DNA, 807 bp, Homo Sapiens
  misc_feature (657)..(666): n is a, c, g, or t
cgtattaaattttattggtataagccacatgaccttatttagtagaaatccattacaagattttaaattatcattagtcaactccacaaagacaataatttgctgtggaagaccgaaggggaaaaaaactgatatatttatttacaattccctatattgtaaacatttaatctatatattgttactaacttataatgagacaaggaaatgatgccctgtatttctattcatattcagcaatagcatattataatagaacatcagattttcttttccattagcattatgctttctttaaataattatctaaactttcaaaagaactaaatatgtaagtgctatacaactaaatctacttaagccaaatatttggcttataatttcatttttagaataacttaaagtgctataagcaacctggcaatcaacactttctgtaagaacaaaactacctttaaacattaatttacaagatatacaatgtttatctggaatagctgaaatttcagcacaaagtcactgtcacatgtataacagcaggattcttttttgcataacatgaagctttaaaatcaactgatgaattattgccacaatggctattattggtttcctacaaaagaggataagaactactagtgtattctatcttttcannnnnnnnnngaggtcacttgacagtaagtttgcatattcaacaagtctactgagttacaatattgtctactataatcattgccctttataagagcaaatgctaatggtaattaataacccaacttttttgtacaaagttgtcttttatgt

SEQ ID NO: 162053 - DNA, 840 bp, Homo Sapiens
  misc_feature (42)..(70): n is a, c, g, or t
  misc_feature (449)..(501): n is a, c, g, or t
accattaaagacaactttgtacaaaaaagttggccgtctccnnnnnnnnnnnnnnnnnnnnnnnnnnnnntggatacttgcaaatttacatttatttttgcactgagagtttactgttaaattgtctacaccatcatccctttttctttttatccttagttctagtccaaattatttttgatttgtaaattattaggaaagtttttatactagtttttttaaccctatgtattattacagatggaagtaattatggcatgtgtgagttataatctaaattaggggcaagtatccctttttttatatgatgaaattgtgcataataacttggctagggcaagtctccaaagtaattcagatttaactcttcactgctagacccagttgtgttcaactttttacatattattgccaacacactttatctctctgtgtacagtgttaatctnnnnnnnnnnnnnnnnnnnnnnnnnnnnnnnnnnnnnnnnnnnnnnnnnnnnngaagccaatcataaagataatatagcataagacattttcttttctaaaaacaatcagcatcattttaaaaggatgaactaatacaggtgtatgtaatagcagtgtttccaaactggcaatttatgctttaaatttaaaaataaggtcatttttctccatcaggggcaaatgtttacttgtaatttttcttcctacagttcgtgttaaattactttttactattattatatttgtaaaactccttgggatttggcaccatttaaaaattcatctttgtattccctttatatttggaacagtatttgtacatatggtaggtacttaataaagggtttgaat

SEQ ID NO: 162054 - DNA, 926 bp, Homo Sapiens
  misc_feature (273)..(308): n is a, c, g, or t
  misc_feature (337)..(345): n is a, c, g, or t
  misc_feature (427)..(465): n is a, c, g, or t
  misc_feature (734)..(793): n is a, c, g, or t
tgcttttttataatgccaactttgtacaaaaaagttggttttttctgcagcagttgggttagaggaggaggagccttttagcctctcataaactgacctctctacttcctcgtgtatttttaagattgattgatgatgtggaaagggctttgcttgtctgctactgaaaactttatccttgcggtttttgtggaaactgcttttggaaagagaaaagaaatgaactttactgacttgacatttttgcacctcccgtttttctaatctgggctnnnnnnnnnnnnnnnnnnnnnnnnnnnnnnnnnnnngatcttcagctacagtaagttattccaannnnnnnnnaacatttttcctgactttccgctgatttcctttttattgttgttactagttactattacttattattattatattaatactnnnnnnnnnnnnnnnnnnnnnnnnnnnnnnnnnnnnnnnttttaaccggattaaaatcgagtttttctgaatgtttctaagaatttctccggcctcctgattgactttggagttttgcatcttgggagagaaagcgaaggcattagtatttttaagtggtttgatcacgtaaaccttttctctcccaaccccacccttgccctcatccccttccccacactgaaaaggattttactggctgttaagtctatgaccttatttttcctgatctttaacttaactgttttagagcatctctggacgtctgnnnnnnnnnnnnnnnnnnnnnnnnnnnnnnnnnnnnnnnnnnnnnnnnnnnnnnnnnnnnaaactgtgctgcaataaaatgtgtgtggtactacttaacacttatgatcgtgatggcattttccctgaaagccatcttcctcctgtttcccttgaaatcccatcctgcttttcctgtacactacccctcacaa

SEQ ID NO: 162055 - DNA, 963 bp, Homo Sapiens
  misc_feature (398)..(455): n is a, c, g, or t
aaaatcatgcatggataaaagatcctttcaaagtgcgagactaatgaattttaccatagcagactatggaaagtttacgaataggatttcagattccacacttaactatctttaagaaaatctcatgtggacagttttggtctagtatcaaagaccaccacccagttatctgcaaaggctatcgaaaccatctttccttttaccatctacttttccatctgtgtgaggccagctttccttcatatacttcaaccaaaacctgagactacaatagactgaaggcagaagcagatacaagcatccattgtctcctattaatccagacattgaagagatttgcaagaatgtaaaacaatgtcacctttatcactaatcatttttggcttgggaaaagttgnnnnnnnnnnnnnnnnnnnnnnnnnnnnnnnnnnnnnnnnnnnnnnnnnnnnnnnnnnttctagtttggtaaattaatgataaatataatcataacgtgaaaaacagctctttgagtatgaacacatttttcagagtgtaaagtgagtctaaggagactgagaactgctggtatattccagtccacttctgcttcttgagggcctggacgagtgttagcactgagacactgaatacattcggttcaataaagatctagtgcaccctcttcaatttccaaagaagtgatcagtattttcagtcacacaactaatcagaagcaattcccctgttcccaagatcctaccaccacgcaaatactgcattccagataccctggcaaataaagtgagctcaactttccaaacaggaattaaaattgaggcaatggagataaagaactttattacctcaactaaaagaattatgctcctacaatttagagtttatttagatttaagactttagtgtacaaaaaggataccaaattggacaaattggtatcaagagagtgtaattttaagccaa

SEQ ID NO: 162056 - DNA, 883 bp, Homo Sapiens
  misc_feature (546)..(555): n is a, c, g, or t
ttggagcaaaagaccatattttttggtagagttattaaaaggaattatccctggaaaatatgtatagcaaattatttcatagttgacacattttagatagttttaattttaataccagcttgacattactgtcatttataaaattgataatttgtacaataaatgagttttgtggttttatctgactttaaaacattttgtaagtagctaatatgtttgtaagaattagcctggtgttgctttatcagacttgaccttaaaaaggttttaagatttatttattcatgtttgcaaaaagtttttcttgctgataggaagaaagtttttcaaatcaaaacttcatgtaactgaattgtgaccttttacatttgagatccatgatagaattaatatttgaagttttcatttggagatactgtggtagctgtcttaactgccttaaaagaattagtccacagctgattggaaatgtagaacacctagttgtccttgcagctgattggggaagtacctgtttatactctgaaataatttcagtgctttttnnnnnnnnnngacaaattattaaacactttgactttgctgactatgatctagcatggtagagactttgatataatactgtttataaatgaatttattgaggggcaagatgaaaaaaatctcatagctatatcagtatgctatacgggtcagctatatcagtatgctgatcagcttaggttttaacatttttacaataaattattggtttattctttaaaagagactgaatggtgaacctctggatatttttgaatcactgggataatcaggattttgattctgaagaagaaactgttgaggattctctagtggaagactcagaaattggcacgtgtgc

SEQ ID NO: 162057 - DNA, 901 bp, Homo Sapiens
  misc_feature (354)..(393): n is a, c, g, or t
tacaaaaaagttgagctttgtgtgctcccaagcacttccttcttttctaacatggcctggagagagtctctctctccttgtctctgtctcttaataatagtttttaacgtggacatctcttccttggtacagtggtttttaaatcctgagaagaaccaagtcaggttttttaaagcagactaaaagcatgaaattgctttcagaagaatgtatatcatcgggaaaagtttgggggcagagtgggggaatcaggctttattcaaaagaaacagttgaaaacatggactttttctacccaatgcccatttcacgactcctctgagactaattgggaaacggggaaattcttggaannnnnnnnnnnnnnnnnnnnnnnnnnnnnnnnnnnnnnnnaggtcacttattagtgaaacctcattttagatctgacattggtagatagatggatttaggcaaatatgatgcgtttgtggggaatccacgtggttgacgttagaacctcccttctgcagactgttgcctgtcatctaagcgaattggaaatgctgagcttccataagtcagctgagttttaaaggtaaacgttatggctgaagtagtaaagcacctgaccacaaaacctcttgtaaaaacagccctgagtaggtatttccagggctccacaaagttgcttatgggaatcctgagctgcttttcaccatctcaagaagcctaagaagttatatatttaatcaggtagacaaaacagttcaaagcataaggtccatggtggtggaaaatggatgcaagtgattctaagtttgtggatttgtggatagcagagggatcgggacctcttggagaaccctggggtaccaagctcccaggccctttctctatcatggatgctgggtgacttttg

SEQ ID NO: 162058 - DNA, 957 bp, Homo Sapiens
  misc_feature (333)..(341): n is a, c, g, or t
  misc_feature (859)..(867): n is a, c, g, or t
aaaaaaccataattcaccttgccctttgctttaagctgcacaaacagcaaatgagacaaagaggttgccctatatacacagtagccaatagactaaaatatttgttgttggtggtgagaccagacattgtatgggctggcagaaacacgcaaaagatcatggtgggttatttcagaagacaggagaatcacacccaatacagtcagtttcctttgattactcatgtatatctttgcaaaattctgttttggcttccctgtggaaaacagatgagcaagtgacctaggggcataatagtggcaatatctgatacaattcacaattttcagaggnnnnnnnnntattactttcttgatgagtttggtcagttttctaccagtctcttatgccataagaagagaagcaagacatcaatctgtggatgactttgggactcagagaggctctgtaatgtgttttggtttggccagagatggccttaaaccagtctgctctcagggttactgttccctacctccaggatacacctatgctttgtactttcacaagcaagatttgtagttccgtatgataaatatttattgggcatctactgcccacgggccttgctaagaactgttgggtgcgcaagatatataaaaacataattcagtcttgtttattcctcccatccatttgttaaaagacctcatcaggtgtggacacagttgcctttggcacctactttatttttcctttcttaacaactgtttattgatcactattttatatccatcaccaaacttagtgccaaagagtagaataactatttttagaataaaatgtagcatatatgaattagacaaaatatagcagcttnnnnnnnnngtctcctcattaacttcgtctagatttttacacttttcaagggtaacggccctgtgttgcctgtgtgccaacttttttgtacaaagttgg

SEQ ID NO: 162059 - DNA, 1116 bp, Homo Sapiens
  misc_feature (697)..(739): n is a, c, g, or t
gagagcccgagcggggaagaagttccgcagcaagccgcagctggcgcgctacctgggcggctccatggacctgagcaccttcgacttccgcacgggcaagatgctgatgagcaagatgaacaagagccgccagcgcgtgcgctacgactcctccaaccaggtcaagggcaagcccgacctgaacacggcgctgcccgtgcgccagacggcgtccatcttcaagcagccggtgaccaagattaccaaccaccccagcaacaaggtcaagagcgacccgcagaaggcggtggaccagccgcgccagctcttctgggagaagaagctgagcggcctgaacgccttcgacattgctgaggagctggtcaagaccatggacctccccaagggcctgcagggggtgggacctggctgcacggatgagacgctgctgtcggccatcgccagcgccctgcacactagcaccatgcccatcacgggacagctctcggccgccgtggagaagaaccccggcgtatggctcaacaccacgcagcccctgtgcaaagccttcatggtgaccgacgaggacatcaggaagcaggaagagctggtgcagcaggtgcggaagcggctggaggaggcgctgatggccgacatgctggcgcacgtggaggagctggcccgtgacggggaggcgccgctggacaaggcctgcgcnnnnnnnnnnnnnnnnnnnnnnnnnnnnnnnnnnnnnnnnnnncccgacccggacccggagatggagcacgtctagggcagaggccctgccgagagcccgtgctgcctgctggagccgcctgcagacgcggtcctcggccccacgtgaaccaggctcggcggcgaagcccagccttggagacacccaggaggaaggccgtgctcctggctccctcctcggcccgtccccacttcccggggcctcggggcacactgctggggctgcccccacccgaaaagaccctccacgctcgtcctctacagagtccggcttcgggaagtgccgggtgctcctgggcccttgcctggctcccctacgacctttgggctcgaggctagctccttccccatgcccgctgtaccagctccttgagactggga

SEQ ID NO: 162060 - DNA, 944 bp, Homo Sapiens
  misc_feature (183)..(200): n is a, c, g, or t
ttggattttttattccagttattgtacagctgtttaagatgggcagctagttcgtagctttcccaaataaactctaaacattaatcaatcatctgtgtgaaaatgggttggtgcttctaacctgatggcacttagctatcagaagaccacaaaaattgactcaaatctccagtattcttgtcnnnnnnnnnnnnnnnnnngctcatattttgtatatatctgcttcagtggagaattatataggttgtgcaaattaacagtcctaactggtatagagcacctagtccagtgacctgctgggtaaactgtggatgatggttgcaaaagactaatttaaaaaataactaccaagaggccctgtctgtacctaacgccctatttttgcaatggctatatggcaagaaagctggtaaactatttgtctttcaggaccttttgaagtagtttgtataacttcttaaaagttgtgattccagataaccagctgtaacacagctgagagacttttaatcagacaaagtaattcctctcactaaactttacccaaaaactaaatctctaatatggcaaaaatggctagacacccattttcacattcccatctgtcaccaattggttaatctttcctgatggtacaggaaagctcagctactgatttttgtgatttagaactgtatgtcagacatccatgtttgtaaaactacacatccctaatgtgtgccatagagtttaacacaagtcctgtgaatttcttcactgttgaaaattattttaaacaaaatagaagctgtagtagccctttctgtgtgcaccttaccaactttctgtaaactcaaaacttaacatatttactaagccacaagaaatttgaatttctattcagggtggccaaattatttgtgtaatagaaaactgaaatctatattaaaatatggaacttctaa

SEQ ID NO: 162061 - DNA, 890 bp, Homo Sapiens
  misc_feature (571)..(580): n is a, c, g, or t
tgaggtcggcccagtgggttgtggctgaggtcgagctgcgcaggctgggcagatgctcgaaggcgccccgcgcgcacctcgtccaggcggctgccgctgaggttgagcgcggccagctccgccagcggcggccggcgggcgaaggcgccggcagggagcacggccagctggttgccggtaaggaagaggttgcgcacgtaggcgggcaggtccgtgggcacctcggtcagattgcggttaacgcacttgactgtgcgcgctgcctcggagcactcgcacagcgcggggcactggtccggcagcgggggctgggcggacacggcggaagccaggaacggcgccgaggaggagaaggaggatgccgaggaggtgggagaagacgaggagacccagcccaggagtaccagcgctagtcgcgccagccgcagacgcccgtccccggcggcggggccccgggagcaccccccaggcatcgcggctcgcgtttccccggagctgggctgggacggcgcccgctccgaaggctcgggaggctgggcccggagggcgcgagccggcggaagcgtctggnnnnnnnnnnctttcctctcgtggaaccgagggagtggcgccgcagccggaacttggctaaccccctcgccaccgggcgcttccctcaggggccgattcccccgccccttccctccagaaagtacgcacggcgggtcgggacgctccgctccgcgctcctgctcccgctcctcttcctgccgccgccctggtgccacctcttcgcctcttgttggcacccctcgctggatcctctgagggacctccgcgtccgccgcctccagaaccaactctgagttccaccagagtagcgacgacttcccggctccgcgttgcgccaa

SEQ ID NO: 162062 - DNA, 894 bp, Homo Sapiens
  misc_feature (476)..(526): n is a, c, g, or t
ttgggttgtcaacagcccataaagagaaagacggagaggcagagacccaggggagccgaggagcggagacacggacccagcagggtcacgcgggaggagactcgggacacccactcgctggctgccaccgggagcagaggggggctcggccgccccctcccacatcagtctccagacccttggggcttcagaggccgctcctaggctcctcggaggaggcgcgggttccttcttttccggagagcaaactttcctcggagatgcctggcaggatgagccgcggcccccggagaggacgggacagcctctgatcgccgcctgcgtgccccgccactgcccatggccaggaggccccagggaacggacagcccgacctcttaggcgccgggaccctcaggctcagatcagtggccgaggccccagagtttgcaaactcagctctggagttcagcagcaacagcagcaggaaaaacctnnnnnnnnnnnnnnnnnnnnnnnnnnnnnnnnnnnnnnnnnnnnnnnnnnnagcaggcacccccggttcccgccaggccctcctgccatgtcggacccagacgtccccaggggctcggatgtccctgccatgtggcccccttgttccaggggtgcctgagccccttctaggagcccctacccacccctaaccttggcccagccctgagccccaagggaccatgagcgggggcaagaagaagagtagtttctaaatcaccagcgtcaccacggactatgagggccctgtgagcccaggggcttcggatccccctaccccacagcccccaacgggccccggcccgcctgcccaatggggagcccagccccgatcccgggggcaaagcaccccccgaaatggctccccacacctggggcccc

SEQ ID NO: 162063 - DNA, 985 bp, Homo Sapiens
  misc_feature (328)..(347): n is a, c, g, or t
tttttttctctctgtttggaaggctctctctccgtcggctctgacgggtcgtaatagtcgctaccgtaagtgaaccccacggcattgtagctccccatcttttgctagtgcttcactcaatcgcttgtattcttcctctctcttcatcacacagggcctctattcgcgctcctcttcagacagctgataatctctgttccacgtggaatactcagcatcgtactcagaaaggtcatgcaggtgaccacgtccatcatatctgtaatgtgaacaagctggtcaataaaaggaaattaacgtctagactggtgtgcgtgtgtgatgtttnnnnnnnnnnnnnnnnnnnncacacacatacttaccgattaaaataaacaaaaatattaaaacaagtataaaaactcttcccagatttatatttaatttggatagtcatatctcacctacttttaaactcaagttatcttaacaaactctaaattcctttccacagtaagataacatttataactaaaggcaaacaatccattaatagcaaaaatggtacccacttcactggcagttcttaccattatggtttggtcaaccattcaatgccacttgcaaaaaattattatttttttctgaaaagttaaatatcatagcttacattcacacaaaccaaatacataaatacctatccgtaagaaccaaacggtcgaaatttcctcgcttctttctgctagtcccgaactctcaggagagatcttcaccaaagaaacttgcgtccattggaggtaaaatcttggctaggctcgccccctagccacttggctgaggaaataagtgctgggttacgtgatagagagacacacatacattggaacagtgacatatacatgcagtttaaggaggttcactgggaacagagcaaaactattagaagatatggtatcaatatttccttctgaactttataccgtcaaggaaatccaacttttttgta

SEQ ID NO: 162064 - DNA, 2011 bp, Homo Sapiens
  misc_feature (99)..(137): n is a, c, g, or t
  misc_feature (518)..(544): n is a, c, g, or t
agtagcagcacataggctcgaacgacagttgaacatgcaaagcgtttcaggtagtccagaaaattaaattctttctccgacacctggaccacttgcaannnnnnnnnnnnnnnnnnnnnnnnnnnnnnnnnnnnnnngccccacgttcctctgggccttgctgccggggaagtggagcagagaggatttgtttcagcaactggatctcttcctctggagaaatgtcttgagagccaaacacatctccttcaggccacacctcccgagcagacctcaggagagtcagggcctgtggggcctggccagccaggagacagtcttggatccgtaccatagcttctgcccgctgctcctccactggcacctctgaggccgcatcaaagggaaccacggagtccatgctgagctcagaattctgggcacagcactgtagctgctcagccagggctggccacacagcctccacttcttctgggctagatgggacattaccagaaacaatggcctggtctaggacnnnnnnnnnnnnnnnnnnnnnnnnnnnttgtttgttctgcaccaccaggttcccacggctccgacagaatcgctccaacattttgaggaagaggtgggtggtctccaccaggtcacgaaggaaagagcggggctggcatctctcatcaaactttcgaaaaagtgccaggaatagttctcggtactccatcacatagaaaatattgttcttgatgatgcggctgctctccctcacagcctcatctggagataagtccatctcattcactgttgccagcagctcctgataggccttcagagccaagtgcatccggcgtgcccaggaggcagcttccttgcggtcagtcagcatgatctcatagtagttggtgaggttctgctcaatgaagtggaaggtacggacactgagggtctcagaaaccaggctggccgggaaggaggcagctcggttgaaggccatgaagaaagccaaggcccacatataataggtctcatcatgctgctgagctttctcccgaagcaggtgatcctttactgatcccatgagccggttgtaacagttctccaggaactcagagcagaagtctctgaggaagagcctcacattgagggcagaacggcgctgaatggacagctctcgggcggcctggcgacgtttaggcacctttttcggctgctttcccaaatctgaactgtagtttcgtaggttgtgaaggcctttgtgaaagatgaggtccctctccccaatggatttcgagccctggacaatataggagcccccaaatcgagaatgcctgttgcctcgctggagggctcgagtcttcttttctgccatctctcgctggcgcaatacctccagttctgcaaaatctgcactccgctcctgagctaagcgtccctgccctactcccgccagctgctcggggttctggtcacgaaacataagggagacaatctctagcacatgtaggctccattgctcctcagcagacgagctggccagaaagaggagcaggtcatccaggccgctgaggtgaatcgcccagaggagctggtcatgggcactggcgtcatcatcaatcttcttctcctgatcaaggtcagctgggacatggagaatatttctgaccagcagtaggatccgttcaatcagcaagttgtcttcctcctgccgttcctcccagcccagctgcagcagctcatacaaggtttcactgaggactccaaaagccttctcactggcaaaggcctctttgtaggcctgcaaataagttagcacctgcaaaaaatggtgccgaaagctgggctccttaggcagattgccaaacagagcaaggctggttgtgtcaagttcaccatcagtctgataacagcatcaaagagaggcttgtcctggtggtgctgggtgaggatgggcagaaggtcgctctgtaggatctgggctgcccccagctgctgccgcacatctcgtgtctcatccttacatgcctcgaat

SEQ ID NO: 162065 - DNA, 839 bp, Homo Sapiens
  misc_feature (82)..(97): n is a, c, g, or t
  misc_feature (314)..(370): n is a, c, g, or t
gggggcacttcctttgtttcaggggacaagtgggtaatgtttgaagactctttcctctccccagctccccgtcctcctttcnnnnnnnnnnnnnnnntcctggtatttacaagcgagtcctctttgctggcagagtgtgcccagagtgaagtttggtctttagagtccagagccatgtcagcacagagccctctccaatctgtgccccgccctagcgtggaaaacccatttgaatcaccaaaaaaagacaccccaaagctgttttatgcccttctctgcttaaagattccttgagattggatgcgcttggttgnnnnnnnnnnnnnnnnnnnnnnnnnnnnnnnnnnnnnnnnnnnnnnnnnnnnnnnnngaaagacgtccagcagtttggcctttgtggtttttttgttccttggtctaaacgcggccaggttgttaagaaaagtcgaagcgcgtggagcagcggtggatggtggtctgtgtggcgggcaggagggaagcggtgaggcagagcgctgggctagggccggcccggcgtcctctcaccaggtccgaccgtatagcaaggtggagcaggacatggtgccgtagtccgagcccgaggagttcaggtgggacaggctggatacctggccctgcagcgccgcggggctggcggcgtggtgcgccaggtccggagactggcctgcgctgcctggctggtggcccgggtgtgcgccaaggccggcgccaccgctgcccacggagatggccgctgccgccgcctgcgcggcctgcgcctggtgctgcgcagggctgctgcgcgtgccaacttttttgtacaaagttttttattagtt

SEQ ID NO: 162066 - DNA, 910 bp, Homo Sapiens
  misc_feature (329)..(344): n is a, c, g, or t
  misc_feature (598)..(843): n is a, c, g, or t
aaacaactttgtacaaaaaagttgggggagctttctgtgtaggtagatcccctggtgtctccaacctgactaggtggacagagctcaaagaggccctcttaccgctagcgaggtgataggacatctggcttgccacaaaggtctgttcgaccagacatatcctagctaagggatgtccaaacatcagaatgtgaggccaaccttctatcagagttaaacttttgacaagggaacaaatctcaaactgatccatcagtcatgtagctagctgtagagcttgcaacttaatagcagcagctgcccaatgccatgtgaagtaacaaactggnnnnnnnnnnnnnnnnccccttcagttttaatgttatgtgtaatgtatttaaacccttatttaaataaaacttgttttcagaaatacctgacttgcagattatttatatatagtcgatcttgtgcatataaaggaaccatagaaatgggcagtggaggattcgtccacacccacagcttctcaacgggcctgaatttggccaagaaaaacctttatgagcttgtccctctctggtcaactggttttttgttcgtttgttttttgagacannnnnnnnnnnnnnnnnnnnnnnnnnnnnnnnnnnnnnnnnnnnnnnnnnnnnnnnnnnnnnnnnnnnnnnnnnnnnnnnnnnnnnnnnnnnnnnnnnnnnnnnnnnnnnnnnnnnnnnnnnnnnnnnnnnnnnnnnnnnnnnnnnnnnnnnnnnnnnnnnnnnnnnnnnnnnnnnnnnnnnnnnnnnnnnnnnnnnnnnnnnnnnnnnnnnnnnnnnnnnnnnnnnnnnnnnnnnnnnnnnnnnnatgaagcaaccatgcccagcaggtcaactgtttttgcaagcatttagcccagagtcatgctgtgctg

SEQ ID NO: 162067 - DNA, 1079 bp, Homo Sapiens
  misc_feature (940)..(960): n is a, c, g, or t
cgctccccgcgcccgtgggcccgccgttgggggccacgagcagatcccccgttccggggcgccccagagcgcccgccccgggtcggctcgggcggggagacccgccctctggccacgtggaccgagttgaagagccaccaggcgcacgtagcatccgctcactgcgccagacgggagtgaagtcagtcttccccctgacggatggatgccaccccctctatgagcaggcgttggtgaccacctgtttggggtccacgacaccactaggggctcctaaggcgcacatcttgagcacagacatgtcgaaccaaacacgttctcccaccagtggatcttgtagtctttgtactgccggtcctcgatggccgtcacatacagcgtgcccggtctgggaagatgaggccatcgggcgccagccacttgtccctggcatagatcacggtgttgagcatggactcgtagaagaggcagtagcccatccactcgctgatgatgatgtccaccttctccacaggcagctccacctcttccactttacccttaaatatggtgatgatgttgtccaagtggttggccttaatgatcttctctgagtagtcagaaatactggagcattcgatcccaaacaccttgcttggcccctgccttggcagcgaacatggaaaggatcccagtaccactccccacatccagtaccactttgtccttgaacacgtgcttgttgtggtacatggagttccggtaagtgagagtccgcacctcatccttcagcatttcctcgtggatcccaaagtgggcataggagtcgaagtaataatctctgcgaggtcatctcctctgggttcagcatgcttggacatcttgccccgtcactgggcacgctgggttgagtggacacatgatggacgcattgcacgggcttagcagggacgacggtctnnnnnnnnnnnnnnnnnnnnntgttcacctcggtgctctcggccgcgttctccgccattttcctcctcaggagcaggcagcggtaggagtgtttcatgcccataagagccggcaagggtttggtgataccgagatagtag

SEQ ID NO: 162068 - DNA, 842 bp, Homo Sapiens
  misc_feature (389)..(414): n is a, c, g, or t
ctgtctaatttttatcagtctggtataaagtattgatctaagagaactctccctgtgccccttggtctttattctcaattaagaaaaacagtcacatgtcacgacaaaccaatcaatctttatgagatattcctgtatccataccccagcttgtttgcaatttataaacctccccttcaaaactaaggagttgcagaaaaaaatggatttcacagagccttgtgtccctaaagttctgtcccagtcagcagtctttatagtccaaacagattataaaaaatgttttccatttgaactttacagtttgcaaaagtgcttttatacattttctaatttcagaaacaggataatataatttgttaagtgggtttcagtttgctaatagggannnnnnnnnnnnnnnnnnnnnnnnnncagcatctcttgaagaatcttgctacagccaaatggcatctcactttttaaagacgtttgcaattattagttgattcacagtacagaacaaggtataaaggaaaaaaccctgctaggtagtgttataattgctagattaaaaatagactagaacaggttcattttaagatttacttggaagagcaaagaaggaaaaattatatttttaaagaaagagaatattcaggctttatttctggtatgaagtttatattttttaaaaaaatcctatattatcacaccagagattttagattcttttctggttagaaacattgctggtagttggattatatttttattgtattcatttatcttagggggaacattgtaaagaaacaaaaaggtccagatgaatgtatgctagaaataaaagttgaaagattctt

SEQ ID NO: 162069 - DNA, 899 bp, Homo Sapiens
tttttcacaactcgaacaatcccttacgatttggcccattcaacctagtacttctgaataagttcagaccaaccactctcaagaaagtgctgagtttggtttgctactgctttggctaacaaggttttacctgtgccagtggaccatagagaatgacccccttaggaggctttatacccatctcttcataaatattcaggatgggtgagaggaagctccacagattcctaatttcctgaatttggttgtccaaccccccaatatctgcataggtctcctggggggccttttctaccttcatcactgtgaccaggggatccgtgtcatccatcagcacccctatcacggcatgcaccttgtggttgagcaggaccgagcagccaggttccagcagatccttgtctacaaatgaaagaatgctgacgtagtgttctgagcccacagatgtagacacgatggcatgattgtcatcaatgatctcttccaaggttcctactgacatcggggtccccctcagatcatccacttttgatctttcctcctcttgcttttcttctaatggtttcatttgttcctgatttctaatgaattcttcctccatgagaagatagtctttaattctctctaacttcagtaattttaaccggcactgagtgtgaggtgtcaccagtggcagtttgctggcagcatctggtccctttgttttcttcttctttttccccactctagttggtacaggaggttcatatttctttttcttgtccttgtcatccttcttgccacctccaggaccatgaccaccactctgactttgacccatcttgccttggccacttgagctgccgctgccggaagtcctcggccgattcacacccgggcctcgacctagctaatttttc

SEQ ID NO: 162070 - DNA, 695 bp, Homo Sapiens
tggggcttttttgtagctggctctcagggcggccacgacccgctctcgctcatagcccatggacatgatctccgtcagcatcgtctcatactcagagcccgtcactagcgtggaggccgcgtcttcctctcgcccgctgctacctgaagagggaacagagcctgacacagactctggggacgtcgtggggtcggattcctctgatgggctcttgtcctctctggcggcaggtgggggatgggacatgcctgaggtgggggcaggcgggaaggatgtagaggactctggggcagctgtgggtgaggccctctgggggtgcctgaggtaccctggccggctttggtcttggtcaccatgacagacacacaaagttcttctcatcgatgcgatagtccctgatagggacatcgtcactcaagatcttgccggcatagatgagtttctgtccagccacggggaaggcatcacgacccttctcagcttctatcttctcctttagcaccttcaccgtctcgtcaggctccatgcggatcttgaaggtctgcctgtctgcagcgttttgagcgtgatggtgacaggccatggcggggcccgagcgacgcgcggccccgggatcctcacacaacatgcaactcacgccgccgccctcccctcgtgccgattcaacacccaggcctcgtacctagcctaagttg

SEQ ID NO: 162071 - DNA, 999 bp, Homo Sapiens
  misc_feature (12)..(12): n is a, c, g, or t
  misc_feature (26)..(26): n is a, c, g, or t
  misc_feature (48)..(48): n is a, c, g, or t
  misc_feature (80)..(80): n is a, c, g, or t
  misc_feature (94)..(94): n is a, c, g, or t
  misc_feature (96)..(96): n is a, c, g, or t
  misc_feature (113)..(113): n is a, c, g, or t
  misc_feature (139)..(139): n is a, c, g, or t
  misc_feature (163)..(163): n is a, c, g, or t
tgtgactcggtncccgggcatgcttntcacagtagatttgatcctccncaaagaaatggcctttctgtttcaggttggtnccacagtcagtgcncncataccactcagggtgncggtgacggtcccgcagcttcacaancccaccaacaatcccagtgccacntttgtcacacataggcaacttctgagcatttccaatcgacgcagccactttagtgacaggagctttaacacttctgaatcctgagggcttgttgggatccccctttttcttccaagactccaggattttcctgcaaagccaagaaaggacgtggactgtttcgggggctcattcaaactcctttttctcctgaagcatcttgtaaacttcagattctttttcgatgccaaggctgcttggaggctgagcatgttctaaggggtctgctgttcgcctccatcaccgctggcagcagtctcttgactgcagggcattgttgaagttggagatattttcagaagagtagaggcacagctgggttgttgtactggtttgttatgaccctggcagtagtgctggaggcaggcgaggcggtaaagggcatggcacttcggttgtgggcgcttcctatgtgcaggacctcctggggttcagagcgctaaattcatcttgtatggagtgacgcttcccttcctaccgtcaccagtagtagaccaggctttatgttcagatctggctacagtgagagtcaatgttgtctgtgcagcctttgattctgttctgagcttccaagtgtgtcatattgctagtattttccccatcaatggctgtgattacatctccaatacataaattagctagagccgccttgcttccaggagtgacccgggaaatggcgagaggctgctcgaagtccttgccgcccacgaggcggaagccccacggccccgggccctggaggtctatctgctgggtggtcatggcgcggctgtggcgggcgacgacccgcggggccc

SEQ ID NO: 162072 - DNA, 1084 bp, Homo Sapiens
  misc_feature (248)..(260): n is a, c, g, or t
  misc_feature (398)..(426): n is a, c, g, or t
  misc_feature (537)..(550): n is a, c, g, or t
  misc_feature (601)..(857): n is a, c, g, or t
ctttgtttttaaaccagttaccactaatgtattaagccctgcagcagttaccactgacttctcgcacgcataaaatgaaccgggagaagccagtgttgatactgttgtgaagaggttcaagagctggcttttcagacaactaagaccatttttagcagaataactccttcagaaaggcctggctgaagatctttttatttctattgtctcacctatataaatttcagggttcttataagtcatctttnnnnnnnnnnnnntaatgtatatcagtttctcttatttaatgtggctatgaaagatgtttccttattatttcttcatctctaagaaggacaccagggaatgggggttgggggtggaactaaagggaggaaaaaaaccagaacagggtaggnnnnnnnnnnnnnnnnnnnnnnnnnnnnnggccaaggggtcggtcacacagaagggaaggcaaggaggaaaactaaactacaatccttggttcagattgagttatgcaggaatatatcttcctgatcagtccccgtgccnnnnnnnnnnnnnngcctacagccgcggccgctccaaaatcaaaatgcctcgtgccaaattcttnnnnnnnnnnnnnnnnnnnnnnnnnnnnnnnnnnnnnnnnnnnnnnnnnnnnnnnnnnnnnnnnnnnnnnnnnnnnnnnnnnnnnnnnnnnnnnnnnnnnnnnnnnnnnnnnnnnnnnnnnnnnnnnnnnnnnnnnnnnnnnnnnnnnnnnnnnnnnnnnnnnnnnnnnnnnnnnnnnnnnnnnnnnnnnnnnnnnnnnnnnnnnnnnnnnnnnnnnnnnnnnnnnnnnnnnnnnnnnnnnnnnnnnnnnnnnnnnnggttatgggggctcttcggtttccccgctcataaacctttctttcggtcgttcggtggcggagagcgtatcaaccactcagaggggtaaacggttccaaacactcggggaaacgcaggataaaattgttttacaggcaataaatgcaggaacttaaaaggcggggtggggggttttcaaaggttccccccttacataatacaaaatgcgttaattaagggggtaacc

SEQ ID NO: 162073 - DNA, 807 bp, Homo Sapiens
  misc_feature (88)..(117): n is a, c, g, or t
  misc_feature (255)..(267): n is a, c, g, or t
  misc_feature (595)..(595): n is a, c, g, or t
  misc_feature (629)..(644): n is a, c, g, or t
gtccgttcctgctaactcaatctggaccaaggattgtagtttagttttcctccttgccttcccttctgtgtgaccgaccccttggccnnnnnnnnnnnnnnnnnnnnnnnnnnnnnncctaccctgttctggtttttttcctccctttagttccacccccaacccccattccctggtgtccttcttagagatgaagaaataataaggaaacatctttcatagccacattaaataagagaaactgatatacattannnnnnnnnnnnnaaagatgacttataagaaccctgaaatttatataggtgagacaatagaaataaaaagatcttcagccaggcctttctgaaggagttattctgctaaaaatggtcttagttgtctgaaaagccagctcttgaacctcttcacaacagtatcaacactggcttctcccggttcattttatgcgtgcgagaagtcagtggtaactgctgcagggcttaatacattagtggtaactggtttaaaaaacaaagactgtaagcctgtgtgtgccactgtttgcttcaacagtatatcctaataagcctcacctatttaatccaatgagttttanatctaaatctcattcccttcttctttccctaccnnnnnnnnnnnnnnnncttaaaaaaatattttgtgttattaacagaaattcatatttggtgtggcttaacggtatttcagaaggtcatcagattgtgagactgcttccttgaaacatttttgtgctattgttttaaaaaataattaaaaacagttggcgttaataaaatgtcaatgtgg

SEQ ID NO: 162074 - DNA, 510 bp, Homo Sapiens
  misc_feature (165)..(184): n is a, c, g, or t
atattatctacaaagtaaaagtttttcccttaacttaaaagttgaaccactgtagacagtgatcacctcatcaaacttgatttataaataataatccgtcagtttgacggtaagaatttactgaaactttgtcaagtttagtaaaagggcgttccaagtcttgannnnnnnnnnnnnnnnnnnnagcagtaatagcagcaagaatcactcttgttacttcttttgctagctgatgtgttcatgactttcaagggttattaaaaaataaataacttccagtttcggcaagcagagctggggtacctgcgggactctgaaacagcatatggaattatggaatagcccccaagttcctaaatgcctctactcggtccaagtatcttccactgcaagtgaactgttagcattcctattggatgttacaagaaatcaacatatatattttaaaaacaaaataaatgaaattctagttttctgtgcttccagttggtagaagcagtagaagggagg

SEQ ID NO: 162075 - DNA, 1079 bp, Homo Sapiens
acccaccattgcatcttaaggacggcatgacgtgataatgatggacttgtgtgaggttttgatttttcaattaaactttttgttatcacaggtaattaattgtcagcggtcttgagtctggttatggaaccctgtagtaacaagagctggaaattggctaattgacaatgcaactgccttaaacatctcaagtagagaacatttacattagtgagatgtacttgaatttcagaacttaacaaattttaattactttttattgaaaactgcactgaacgctaaatgtccacctttacaataaacaaatacagtaacggtaactcacactaaaacaaaacatacttctgatagccattatttttctgtttgggacaattttaaagtttttcttttgtcacaaaaacaggaatgtacctatacaaaggctcaaaataggccatctttttaaacaaaaaggcaatgattcacaaaagactatgaatagaacatgtaactagttgatacaaatctaataggatttgttaaaatcagtcacatctaatacatctgaagtgttcttgtataaaatatcacgtgaagaaaagaagactttatcaatgtctaaaaaagtgggtttgttcatagacaatctgacaagttaccataaaaagtgtttcctgagacataaggaaatgcaacattattcttcttgtcagattgtctatgaacaaacccacttttttagacattgataaagtcttcttcacgtgatattttatacaagaacacttcagatgtattagatgtgactgattttaacaaatcctattagatttgtatcaactagttacatgttctattcatagtcttttgtgaatcattgcctttttgtttaaaaagatggcctattttgagcctttgtataggtacattcctgtttttgtgacaaaagaaaaactttaaaattgtcccaaacagaaaaataatggctatcagaagtatgttttgttttagtgtgagttaccgttactgtatttgtttattgtaaaggtggacatttagcgttcagtgcagttttcaataaaaagtaattaaaattt

SEQ ID NO: 162076 - DNA, 220 bp, Homo Sapiens
gaaagcaaatttcttttaatgagaactcagaattaaacttcagagggacccaacgtcatacttccattcagggacttgatacaaaaaatttagtttgaactgctattagcaggtggcaggagccaccttcaaatgaatcttcaaattggaaaatactgcttcaccacctgttggggataagttgcaaatggaataatttagtatggtttgtagctatttt

SEQ ID NO: 162077 - DNA, 489 bp, Homo Sapiens
caaacaaaagctgccacatgtttattaagacattactggctcttaagcacagctggatctataaatcattttccatatattatcacatattcaggaaagtttctgagatgatatatcaagacaggcttctcttgtgactcaactggacttcaaatagtctctttagaagtctgagtaatggtgcaactttcaaaacccgagaattgcctccgttctgttaagacaacaggccaatctgactgcttctttcattttttctgaagcaattgccaagatttctgtagtaggattgaaggtcagagaagtaacacctaaaacaatttcacagcaccaaatctccacctccatcatcacctcaacccaaaaaggcataattaaactttacttcctctctttcttcttcccactcatcctaaccctactcctaatcacataacctattcccccgagcaatctcaattacaatatatacaccaacaaacaatgttc

SEQ ID NO: 162078 - DNA, 1439 bp, Homo Sapiens
  misc_feature (1224)..(1224): n is a, c, g, or t
  misc_feature (1244)..(1284): n is a, c, g, or t
gcggccgcggctgtaggcttttttcttttaaccttccctccagattattgtggatgatgatgacagtaagatatggtcgctctatgacgcgggcccccgaagtatcaggtgtcctctcatattcctgccccctgtcagtggaactgcagatgtctttttccggcagattttggctctgactggatggggttaccgggttatcgctttgcagtatccagtttattgggaccatctcgagttctgtgatggattcagaaaacttttagaccatttacaattggataaagttcatctttttggcgcttctttgggaggctttttggcccagaaatttgctgaatacactcacaaatctcctagagtccattccctaatcctctgcaattccttcagtgacacctctatcttcaaccaaacttggactgcaaacagcttttggctgatgcctgcatttatgctcaaaaaaatagttcttggaaatttttcatctggcccggtggaccctatgatggctgatgccattgatttcatggtagacaggctagaaagtttgggtcagagtgaactggcttcaagacttaccttgaattgtcaacattcttatgtggaacctcataaaattcgggacatacctgtaactattatggatgtgtttgatcagggtgcgctttcaactgaagctaaagaagcaaatgtaccaagctgtatcctaatgcccgaagagctcatctgaaaacaggaggcaatttcccatacctgtgccagaagtgcagagggtcaatctttatgtacagatacatttgcttgaattccatggaaccaaatacgcggccattgacccatcagtggtcagtgccgaggagcttgaggtgcagaaaggcagccttggcatcagccaggaggagcagtagtgtgtctctcgctgtcaatgatgagttgacccggtgtgttcttgtatagtcagtggcatcagcacccgtcagccggccttttccttcaggttcgtcaggctcaccggttctcactgtgtctgggaagtaggactgatggtcatcttcatgacaggcggcatctccactaagcctgtgtaactgttccctctttggttttcttagcttttgaatttggagaagtacttttgaagactcccattttaagaaccgtgcagattttgctaccaaaagtcttcaccactgtgttcttaagtgaatgttaatttctgangtttgggactttgtggtggnnnnnnnnnnnnnnnnnnnnnnnnnnnnnnnnnnnnnnnnnatggtgtttgctgtaaatgctgcacatccagattgcatatcaggacattggttattttatgctttcttggatataaccatgatcagagtgccatggccactaccccactgttttgctctcctgccaaatcaactggcttttaatttacccttaaa

SEQ ID NO: 162079 - DNA, 338 bp, Homo Sapiens
tttcattttttccatttttatttgatgtttccaaatataaaaaagtcaggattcttacatcaattatctcaaatgagaccatgcaaagcaattcagtgtatacaacaatcatttttccccttcagttctgctgctttatacaacagtgtgattgacagaaaattggatggcatgtgcctggtcagaaaatgtcatctgtttacaaaataacatcatgcagcacagtttctactttgtctgcaagtcaattcacaaaaactacttattttctgttttttatttgggaggcacatggaactgaaaaatttagctgcccaattttattcaactaccccacc

SEQ ID NO: 162080 - DNA, 600 bp, Homo Sapiens
  misc_feature (124)..(134): n is a, c, g, or t
  misc_feature (415)..(424): n is a, c, g, or t
  misc_feature (495)..(524): n is a, c, g, or t
  misc_feature (559)..(559): n is a, c, g, or t
aaattttcttccagaaatattttaataaaaattggccatttccaagtaacacccactgcatgcccatcaataaaagagaaccataacaaaatagaaaatttaccatatggctatgattttaagnnnnnnnnnnntgcggacacgagcacatgagcaaagtccaatattaaagtaacattccttcttacgggctatgattaggaatctgattagataccagaataaaaatacaaatgctgaactatttaggtcaaagaacctctatagaagcatctgtcttcaaaggcattccagtttgagactcaattttagaataaggcataacaaatatgttaacaaaagacatacacaaagtgatgaaagagggattctataattccccacatactctgaacctaataaaacaaatctagannnnnnnnnnaaacaattgccaagactgaaatcaaagataaatagaaggcacaacagttttgctctggttgttatctgggnnnnnnnnnnnnnnnnnnnnnnnnnnnnnnacaaatacaaattaaacatgaaaaaactacttcanaaaaactaacagttcaagaaaagcctatcagttgcattcta

SEQ ID NO: 162081 - DNA, 449 bp, Homo Sapiens
  misc_feature (254)..(264): n is a, c, g, or t
gcagacagcacgtactattttattgggcctcaaaagctttaaatacagaatgggctggccagagcgaagatgtgaacacactggcatttgagaatggacgtatcaaaaaaatcacataatcaacagttggacagagagctgggacgagggcagtctgggatagaggcaggtgccagctggcggccagcctgggtgttaggattactccctccactaggacatagtctttgatgtttcttcctgatttgaggacnnnnnnnnnnnaaaaaaagcccacaaacctccaaataaaaccaactggcagagactgtggatagcagtgcccatcatcccagaggacaagggtctgcatcatcagctcgaaagtctccatagcgccacaggttcagcctggcgctcttggctgactcttgggcattcaggtattctgggatcactttctggaactg

SEQ ID NO: 162082 - DNA, 353 bp, Homo Sapiens
aacaattcccagtcacctttatttaaagtatattaaataaattatctcaatatatacaaatagaacaatattacctacataaatagaaaatccccatatagaaaacctttttaaaaaattatatatacaatgtcaaccatagaagctttaagtaccttaaatcataaactctgtagtttgtatagtagtcttataaaaatatagttagctctcaaatgtttaatgccacttaagtcagttaaagtgcagattgtaaagcatattaggaaggtgcccagaataccaatgtctcctgcacttaacacattaatacaaagtttgccaattgttttgaatttccaaatgtattcctg

SEQ ID NO: 162083 - DNA, 1044 bp, Homo Sapiens
  misc_feature (492)..(878): n is a, c, g, or t
  misc_feature (900)..(900): n is a, c, g, or t
  misc_feature (960)..(960): n is a, c, g, or t
  misc_feature (1011)..(1011): n is a, c, g, or t
actaaacacacgcaggtagtaaaccgttttattggaaactggttaaaaattaaggcactccaagctttatggtttccttgaggttacagttttgtggctgctcttagtgtatttcagaaaaaaagcagatggacgaagaccgaccttacagacgtgggtttctacactgagcgcaagggctgactacgctgtatttcacaaccgagccctagcgccagctcagcagcacctaagatcaaggatgcgttccattttcacacttcacagtcatgaaaactgagaagactgtcttcagcgtgaactaaagttcccaggcagatcactgatccagaacacttcaagaactcgtcaaacagctcgataagcctttttgactgtgtacatctgtaccgggaataacattcctaggctgaaatttccacaaagaatagaacctgtacccagttcttcaggctgatttccctgacctcttggcctcgtgccgaattcttnnnnnnnnnnnnnnnnnnnnnnnnnnnnnnnnnnnnnnnnnnnnnnnnnnnnnnnnnnnnnnnnnnnnnnnnnnnnnnnnnnnnnnnnnnnnnnnnnnnnnnnnnnnnnnnnnnnnnnnnnnnnnnnnnnnnnnnnnnnnnnnnnnnnnnnnnnnnnnnnnnnnnnnnnnnnnnnnnnnnnnnnnnnnnnnnnnnnnnnnnnnnnnnnnnnnnnnnnnnnnnnnnnnnnnnnnnnnnnnnnnnnnnnnnnnnnnnnnnnnnnnnnnnnnnnnnnnnnnnnnnnnnnnnnnnnnnnnnnnnnnnnnnnnnnnnnnnnnnnnnnnnnnnnnnnnnnnnnnnnnnnnnnnnnnnnnnnnnnnnnnnnnnnnnnnnnnnnnnnnnnnnnnngaaatgtgagcaaaggcagcanaaggcagaacgtaaaaggcgcgtgctgcgttttccatagctcgcccctgacagcacaaanatcacgtcagtcagagtgggaaccgcagacataagaacagcgtttccctgnagtcctctggctcctgtcgactgcgctacgaac

SEQ ID NO: 162084 - DNA, 315 bp, Homo Sapiens
ctggttttcctttttatttaatcaaagactggtgaataaacataaatacagcacaattacttcagatcattcttcatattgtatacacacaaacccatgaacataatctgaaagaaacctgtagacagcaatgaaatgcatacagctttttcttccctcgctcaaaaaaaagtttaaacacacaaacttacaatctcatcagcacacactctcttgtgacaaatgattcagacataaatagtgggtgcaaagaaactatatgctaacatatgaataacctttgttaatgaaaaaaaagcctacagccgcggccgc

SEQ ID NO: 162085 - DNA, 613 bp, Homo Sapiens
gtgattttgggttatttattttgtgcatctgtggcaataaatgagatctcagtggtggtatggatttgactgatctctgtaactgtgtatggcaaaaggaccggaaaatgaaaaccagatcccagtaaggggtagagaggggccaagagaactgaacatctgggctgccggagaaatcaaagtctaggaagtaagaggtaagagtgtactacaggggacataccccaatctctttgctccctccctcttccttcctctcccagagacccaggtccctgggactatattggatctgtctctgaagctgaaaaacaaaaggcagaggagacagtcggctctaagtgaccaatctcaagccagctttgtcagaaatcctaaataacaggagaagggtgggaagaaaggatatgattatttcttattccattttccataagaggtgagaatgacaaggacctcttttctaactcctcttgagggtgtgagaagggttagcaggaggagaagggctgggagctctgaggtctcctgtaagacctcatatctcacaggcaaggactaagaattaggattaaatattttagtgggatagctctaaaccaggattagcaag

SEQ ID NO: 162086 - DNA, 398 bp, Homo Sapiens
  misc_feature (23)..(23): n is a, c, g, or t
  misc_feature (36)..(36): n is a, c, g, or t
  misc_feature (59)..(59): n is a, c, g, or t
  misc_feature (107)..(107): n is a, c, g, or t
ttttcgccatgtttgacgaaaantggttctcgaaantcctggccttcaagtgaatctgnccgcctcagcttctcaaagtactgggaattaataataggcatgaagcnactgaaccctggcccagaaagcgtttttctcaaaggccctcagtgagataaattagatttggcatctcctgtcctgggccagggatctctctacaagagcccctgcccctcttttggaggcacagttttagaataaggagggagatctttcccaggccgcaccatttctgtcactcacatggacccaagataaaagaatggccaaaccctcacaacccctgatgttttaagagttccaagttgaaggggaaacaaagaagtttttgatggtgccagagaggggctgctctc

SEQ ID NO: 162087 - DNA, 426 bp, Homo Sapiens
cagaagcgtttttctcaaaggccctcagtgagataaattagatttggcatctcctgtcctgggccagggatctctctacaagagcccctgcccctctgttggaggcacagttttagaataaggaggaggagggagaagagaaaatgtaaaggagggagatctttcccaggccgcaccatttctgtcactcacatggacccaagataaaagaatggccaaaccctcacaacccctgatgtttgaagagttccaagttgaagggaaacaaagaagtgtttgatggtgccagagaggggctgctctccagaaagctaaaatttaatttcttttttcctctgagttctgtacttcaaccagcctacaagctggcacttgctaacaaatcagaaatatgacaattaatgattaaagactgtgattgccccc

SEQ ID NO: 162088 - DNA, 364 bp, Homo Sapiens
gtagaaaatgtgaattttttggtcctctaatttgttgttgccctgtgtactcccttggttgtaaagtcatctgaatccttggttctctttatactcaccaggtacaaattactggtatgttttataagccgcagctactgtacacagcctatctgatataatcttgttctgctgatttgtttcttgtaaatattaaaacgactccccaattattttgcagaattgcacttaatattgaaatgtactgtataggaaccaacatgaacaattttaattgaaaacaccagtcataaactattaccaccccacccctttttgtaaatcttgttcattgtaaatcaaatacagcgtctttttcactttg

SEQ ID NO: 162089 - DNA, 768 bp, Homo Sapiens
  misc_feature (155)..(171): n is a, c, g, or t
  misc_feature (366)..(383): n is a, c, g, or t
aagattaacagagattaaaatttattgataagccaaagactgaccctgatcctagtaacaccaaactcaaagtagctcctggtcagaaagtgcagtaaagggtgcatgaaagcatccgctctatggtctcctcagtggtctattttaggtgtggnnnnnnnnnnnnnnnnncctcctaactatgatcagagcaaatttgaagaacatgttgaaagtcactggaaggtgtgcccgatgtgcagcgagcagttccctcctgactatgaccagcaggtgtttgaaaggcatgtgcagacccattttgatcagaatgttctaaattttgactagttactttttattatgagttaatatagtttagcagtnnnnnnnnnnnnnnnnnnccacacctaaaatagaccactgaggagaccatagagcggatgctttcatgcaccctttactgcactttctgaccaggagctactttgagtttggtgttactaggatcagggtcagtctttggcttatcaataaattttaatctctgttaatcttacctgctttaaaaaaaagttcttgtgtgttcgtatctttatttattccctagtttgcagaactgtctgaataaaggatacaaggattatttcaatgttactgcactgaaaaacgtgtatgtattagtgtgctagattatttagcagaatattcacaagtttctgttgaccttgttgattgagcatgactactaaatattatgtaataaaaagcatttgtcataacagtaaa

SEQ ID NO: 162090 - DNA, 545 bp, Homo Sapiens
agtttccagaatttggctttattttgcagtacagaaatcatttggagccattttgagacagaagtagaggctctgtcaagtcaatactgcattgcagcttggtccactgaagaagccacgcctgagatacaaaagatgcactacacttgacccgctttatgttcgcttcctctccccttctctctcatcaactttattaggttaaaacaccacatacaggctttctccaaatgactccctatgtctggggtttggttagaattttatgcccacataaaccaaacttgtggctatgctatttgggccctgccataacatttgacataatacaaaatataaagtcatagggaaaacttccggatgctgtcccaaaccgtggaatattcaatttagaatctcctgaacctcaagaggacagatgacacacaacctgtatggatccagctcttgagcagcagcagcacatagctacactgattaaaagattaaaaaaactgtctcaagttgtctgtgtcggtatcccaatgtttgtttaacttcactag

SEQ ID NO: 162091 - DNA, 668 bp, Homo Sapiens
  misc_feature (308)..(321): n is a, c, g, or t
  misc_feature (498)..(547): n is a, c, g, or t
attcggcacgaggcagtatgccattccacagccagatttgaccaagctgcaccagttggcaatgcaacagtctcattttcccatgacgcatggcaacaccggattcagtggtatggatacctcagtgtttatttctgtaaggtgtagtgcaagagagaggccagtcccaaggtctcagcttgacatctgtttaaaacaaacttcgttatccagcatcctgctggtttaaacttgcctgtctactatggctaagcccaaggaggtaatgtgtttgttaacgtggttttcatttggggtcagttattctnnnnnnnnnnnnnngccctggaaggtttgggggtgaggtttggggatgcttgtcaggcaaagggtaggctgatatttctttgagcccatcctgactgctgcccccttgatctgatcagcaccccctttctctccaccagcaattcacaggcttgggtagagaccatccatttgtgccaaattgtgtagtgnnnnnnnnnnnnnnnnnnnnnnnnnnnnnnnnnnnnnnnnnnnnnnnnnntgtataaggaataacttgtccgatagggttaggatgagaccaccaaactcattttcacttgtatcttaacaggcattgaatccagctctccacgaggtgaaaggctattggggtaatgatt

SEQ ID NO: 162092 - DNA, 847 bp, Homo Sapiens
  misc_feature (89)..(118): n is a, c, g, or t
gaaaaattcctgccattacagaactaaactgaaatgtattaatattccactcttacatttccatgacaaacagaaaaattcatgagccnnnnnnnnnnnnnnnnnnnnnnnnnnnnnnccagggagaagcttataaaactaaatgtggatctcagcatcaacagctgaacagagaaaggaattaaaacgctttaattaaaaaatcacgagtggatgataaagtgtgtagaaactgaaaatttacaaactatttaaaacctggaatcgctgactgttcagaaactacacagatggatcatgggtggtggtgaacagcagaaagggattatggatgaatctgcattgttctagctgctccccatgccacccgtctccgaggaaagcctgacattgattagatattgagccaggctaatgctggcagcagatccagtgatggtaacctgcctatcagtagatccttccactgggttcgcaattttgatctgcgccccagacatctgacggatctcattgattttggcgccttgacgcccgattatgcagccaatcaaatcgtttggaatggtgagttcatgagaagtagtctgagcagatgcatccaaacctgcccaatagcctttcacctctggagagctggattcaatgccactgaatccggtgttgccatgcgtcatgggaaaatgagactgttgcattgccaactggtgcagcttggtcaactgaccacctgcaaagatgaccggagagctggacggcttgggccggtacgggatggtcacgcccttcgggggggactccaacatgaccacgcagatctgtttgacacactcaatgatggattgtg

SEQ ID NO: 162093 - DNA, 707 bp, Homo Sapiens
  misc_feature (108)..(136): n is a, c, g, or t
gtccatcttttaattttttgaaaaattcctgacattacagaactaaactgaaatgtattaatattccactcttacatttccatgacaaacagaaaaattcatgagccnnnnnnnnnnnnnnnnnnnnnnnnnnnnnccagggagaagcttataaaactaaatatggatctcagcatcaacagctgaacagagaaaggaattaaaacgctttaattaaaaaatcacgagtggatgataaagtgtgtagaaactgaaaatttacaaactatttaaaacctggaatcgctgactgttcagaaactacacagatggatcatgggtggtggtgaacagcagaaagggattatggatgaatctgcattgttctagctgctccccatgccacccgtctccgaggaaagcctgacattgattagatattgagccaggctaatgctggcagcagatccagtgatggtaacctgcctatcagtagatccttccactgggttcgcaattttgatctgcgccccagacatctgacggatctcattgattttggcgccttgacgcccgattatgcagccaatcaaatcgtttggaatggtgagttcatgagaagtagtctgagcagatgcatccaaacctgcactgaatccggtgttgccatgcgtcatgggaaaatgagactgttgcattgccaactggtgcagcttggtcaaatctcc

SEQ ID NO: 162094 - DNA, 765 bp, Homo Sapiens
  misc_feature (97)..(146): n is a, c, g, or t
accaatccgttttttaattcttaaattcttgacattacagaactaaactgaaatttattaacattccactcttacatttcttatcgacaaacagaannnnnnnnnnnnnnnnnnnnnnnnnnnnnnnnnnnnnnnnnnnnnnnnnngcttataaaactaaatatggatcccagcattaacagctgaacagagaatgtgatttttaaattcttagcggatgataaagttgtgtagaaactgaacacttacaaattatttaaaacctggaatcactgaccagaaattacacagttggatcatgggagaacagcagaaaggggttattgagggaacctacactgttctagctgcaccccatgcccttctcagaggaaagcctggcattgattagatactgggccagactaatactggcagcagagccagtgatagtaacctgcctaccagaggagccttccactgggttggcaattttgatctgggccccggacatctggcggatctcattaatgttggcgccttggcgcccgattatgcagccaattaagttatttggaatggtgagttcatgggtggtttgagtagatgcatccaaacttgcccaatagcctttcaacctctggagagctggagtcaattccggcgaatccggtcccgccgtgcatcatggcaaagtgagactgtggtcttgccacctggttccagcttggccagatcgagcggagaaatggggtgttgtccttgaatcgagtaggctctagaggg

SEQ ID NO: 162095 - DNA, 434 bp, Homo Sapiens
agtatttcctgttttggtttatttgcatcttagaagagcataattaggcttcatcaaacaatgtcattatgctcttctaagatgcaaatgacattgtttgatgaagcctaattatgctggactgttttgacctggtttaacccttctgataggtagttgtggatgctggggatgagaactgaataatctttgcctggagtgacactacactctagaatttccactttggagaatactcagttccaacttgtgattcctgatagaacagactttacttttctagcccagcattgatctagaagcagaggaatcccagcgccttttaaaagttgttatgtggttttcttttaaaaagctcctgtttttggaaagtagaatttatgggtacaacgtatgttcattatttgtacataaaataaaaccatttaaaaagt

SEQ ID NO: 162096 - DNA, 567 bp, Homo Sapiens
aacgtaaacacaaagtctcatttatttttgtctgaagcacacaggagctcactcagcacaataacagtaagcgaatcatacaaatattgagaaaaaatgttcctatgaatacatacatgtatattcttaagagtagcgatcaggagtttaacaacaaatgtaaagtggttttctctaaagaatgctttctgacaggcttttgggttggaaatggacaggtaaatcactgtcacataacaggtaagctaagaataacttctgttacccaagtcatttgaaccctgtggactgtgaaagccctcttggaatttacatttaattccatcattggtctggttgacttccacatttcactaaatttggacaagatccacaaagtaactcctcaactctcagtctttcacactcaggtctgtgggaaggaaaggcagtgagaccaggtgtgaacacatgcacggagaccaatgttaggattttctaacagtatccttctgtttctgcacttccaaagtcatacctaaactggctagtatatctgaaattgctaacatctccttgaagctgtcc

SEQ ID NO: 162097 - DNA, 429 bp, Homo Sapiens
ggcacgagggatatcatgaaaaatatttttacaaatccaaaaaataacacacatcttttccatctagaaaaagcacatcttcgtatcaaaaaggacaataaaggcagtgtttgtgtttctaattcaagaaaagactggctcataagaatccaaaatatacactcaggcagtgcatgcttcttatgcgtaattcagttcacccatttaaatatatattctcttaagcttgagtattttgtgatgttcgttttttataatttaaattttggtaaatatgtacaaaggcacttcgggtctatgtgactatatttttttgtatataaatgtatttatggaatattgtgcaaatgttatttgagttttttactgttttgttaatgaagaaattcctttttaaaatatttttccaaaataaattttatgaatgac

SEQ ID NO: 162098 - DNA, 592 bp, Homo Sapiens
  misc_feature (533)..(547): n is a, c, g, or t
  misc_feature (549)..(549): n is a, c, g, or t
aacggtttaacattttactaaatcaactcacacaaattccaaattgcaaatataattaaggacaacagattctgctttgccttattaaatctttcattttcaaatccatcaataagacaaaaagtaaccaaaaattaggtctgttgcaaattcatgattcttctgaggggggaaaccaaaagaacattagagtaaaaagaacgccactggaggatgtacaataaagcaccacaacacacgcttacaaacggggcttcctggcttcggtgacaggtaaaagacgctgttctccccactgctgtgcgtcaatcagggtttcattaaaataaaactataaaatctcctaggttacactaagtcagacacggtctggaacacagtgcttaacaacagtaatgccaactatcagtgctaacataaaaacattttagaaggtcaaaaacaattaaactggaaaccaaagccttattttccctagatgagcaaaactgaaaatgaaaggggtcccacctcccagtaggagtgaaggggannnnnnnnnnnnnnnanactgaaggtggggtacatggtgcagctggttctgtcattgctc

SEQ ID NO: 162099 - DNA, 126 bp, Homo Sapiens
acaaagtaaactatgatttttattgtgaaattttcatagatggaaaattgaatattctgtccatttcattttacaattatcttaccacttatttttgtaccatgtatttcaattgcctgtttagtg

SEQ ID NO: 162100 - DNA, 291 bp, Homo Sapiens
tgggatcaatttttatttgggcttctcacagtggttagagccactctgtcttcagaacaatcacagcacaggaaatgcgtcactgaggctggctttccacgtgaatgagacggggtcgggtggagggtttggtgctacagccagtcagaagatttgcaaatgcgaacacattcctgtgtgaggcacgttaccctttgtcagttgttgtgaatatgtgtattttaagcaataagattcagctggtcagacttttctgggcagtctcagtgacgcatttcctgtgctgtgatt

SEQ ID NO: 162101 - DNA, 576 bp, Homo Sapiens
  misc_feature (351)..(364): n is a, c, g, or t
  misc_feature (496)..(511): n is a, c, g, or t
tttggttcttgaatatgtattttttactgaaaaaatcattcataaattaacatacaaaaatgtacaaacacatgagtaaataatgtaatgacaaaggactatttttgtgaaaagtgttttttaaaacatctttagatttcagtgcaaaaatgtacccctggcacctcttaaaacgtaagagcaagctcaaaaacacgtagttatggaaataagctagctacgctcaatgccatcgtcaatggtgagtggatacaatcaatccatgtggctcctgctcagctattaatgtctgtggtagaggatctctgacaagaggacctattatgtcaaaatgagtattcttgcaaatannnnnnnnnnnnnnaaaacagcatgaacaaacggggacacctttccctgcacacagcaatcaaagacaagattaaggggccacccatcagtagccttgaagattttcagctaccaatatatgcacaaggtcacatttggttcctgnnnnnnnnnnnnnnnnaacatgacaatttcacactattaacagcacaacgggcctggctgtacgtttttaactatgacatt

SEQ ID NO: 162102 - DNA, 447 bp, Homo Sapiens
atagcattttgctttttcttggaatgtaattttcctatggcatgttaactggtgcacatcgtgtaacctgtctggtgagcaacctacaattgggatgagttctaggtacatgtgtttgctgactttggggtaaacaactttgttataatacagtctctgccacagatgcatgtgacctcttcaggggcccagagtggctgaggaaggaaagcttcaagctggccatgggggtcccaaacagtcattccaggcttagatgatgactagcctaggtcatcagagcccagactccacagagactaaaatcagagctctgtcttgttatgataaatttcatttgcttggaaaaagaaatgctgaaagccagtgtttagaatctttgtgcagatgaccaaagcaattgacttggccaagaaaaggtaaggtaaataaacatttttcaaaatg

SEQ ID NO: 162103 - DNA, 444 bp, Homo Sapiens
gaaaataaatctttattttgaactttataaaaagcaatgcagtaccccatagactggtgttaaatgttgtctacagtgcaaaatccatgttctaacatatgtaataattgccaggagttcaatacttcttcaagatcttggataattagtggtgtggaaagtaaagaagtcacaggttgggacatttagacaagagtgaatcacacacgaggaatgtgttcattcttttattgtccgttgttttaacctgactgaatacaagatcaacaagagcactgtactcctggcaattattacatatgttagaacatggattttgcactgtagacaacatttaacaccagtctatggggtactgcattgctttttataaagttcaaaataaagatttattttcaaacaagtgactttggtttatttcatacattacactttttcttgcag

SEQ ID NO: 162104 - DNA, 687 bp, Homo Sapiens
  misc_feature (338)..(375): n is a, c, g, or t
taagatactagaaaacagaactgcctttgcactaaattagtgacttggacttttgcccagtgaagacaggctgtgacactctggatgtcttggtgtgtgtagacacacattgcagactcttaacgcaggaaggacttcaaacttctgctgagaccttggggtcaaggaacatttcattggttttttttgtccacccccatctcccttgctcatttggatgcgtcaccttaattctcctgctgccaccgtctttgattcaccgggatgtacagtttacagttgaagagcaaacagaaaggttttctcttggtgggatatgcagaacttgggatgtgtgnnnnnnnnnnnnnnnnnnnnnnnnnnnnnnnnnnnnnnctgacttaaaaaatcaaatcccccgacatacgttttttttaatctgtgccaaaaatgtgttttcagaggaaatcttattttcatattcagactttgtattgcccactcatttgtataagtgcgcttcggtacagcacgggtcctgctcccgcgatgtggaagtgtcacacggcacctgtacaaaaagactggctaacccctcttcctattaccttgatctcttcccccaacttcctaacacttattaatttatgaaactgtttttctcagcgcagttttgttttgtgtgtccattggattacaaactttatt

SEQ ID NO: 162105 - DNA, 536 bp, Homo Sapiens
atcataaataagtattataactttattaaaatgaaaagacaatattcaaaataatgcaacaaaatgaataaaatcctttgtccaatactgtacacataatgcagaaatcagtgcatttttcttaagcatgttttaaccttcatttagttcatactaaaatataataagctttaaatagctcaaataatattcagcagtttaaactgtaaacagcttgtttaactgttaagagaacattgcagtaatgtacctctgttagtgagcaccttctcttctgtgcttatctcttcaagataaatacatggaaggatgtgaaaatcggaacaccaactatgtgtctcactgcatctaagtgaagcagccacagctgtgagagttttcaaagcagaaagatgctgatgtgacctctggaattcagacatactgagctatgggtcagaagtgttttacttaaaaagcaaacaatccccaggaaatactgaataggaaccagcaacacaaggccagcttgtgttgtatgtttattaatacagtct

SEQ ID NO: 162106 - DNA, 378 bp, Homo Sapiens
  misc_feature (217)..(251): n is a, c, g, or t
tagaagttactatttctaaaatacacatggacaaagaataagctttattcaaccagactcacaaaagtaaggattctgcttctctaggttcataaaatagaattccaaggctctgaggaaaataaacttgtgtcagtcccagggaacttttctccccagaagttgattggtcactctctttttatatagctgggctcgcagccggtatgacttatannnnnnnnnnnnnnnnnnnnnnnnnnnnnnnnnnngtacttctggaagctgctcataaatccgtttggacctctgaatcatttccttcttgctgataggcttgttcttctggatagccaggaagactctcttgggcagcgggcacatgcgattctggtggcc

SEQ ID NO: 162107 - DNA, 448 bp, Homo Sapiens
aagtacctcatgaagagctgcaaaaatctcaaaggtggattacaggaggtggcagaacagttagagctggaacggataggaccacaacatcaggcaggatctgattcattgctcacaggaatggcctttttcaaaatgagagaaatgttctttgaagatcatattgatgatgccaaatattgtggtcatttgtatggccttggttctggttcatcctatgtacagaatggcacagggaatgcatatgaagaggaagccaacaagcagtcatgacatgaaatagtccttttatttttatttcgagctacacacatgcttgtatataggttttatctctggttgaatccctcgaacaatagacagtacctttcccccccctttcatggcccattttattgtctgcctttcagtactaagtatgaccgttcctatctcagatcttaataaa

SEQ ID NO: 162108 - DNA, 631 bp, Homo Sapiens
tttcattcatgtatttattccacagtcaaaataaatcaaaatttaaagctataacatttttaaaagataaaggagaatttgtggcacagctgcattaacaaaacagacaccagtctaaagtgcaacactaaacaggtattctctgttcccacggtggaataattacacataagatttcactaaagataggagatgaggcaaataaccctttgaaattacctgcccaacaaatagaggcaggctacattaatttaacattttactgcaaaatggaaaaaatccccgaggtgactaactcaaactcctcatttcatgcacatgaccttggcttctgtgttctttccatagccacatccaaatccagaaaggctcctgcaccccatgctcaaaaatgcaacctcaagtccctgaggtcctcagcacagactgacattaacaagcctgtgttcagccttcatccagaacctccagggaaatcaggagcacaaacacagagcaaagcaccgtttctttaaacaatggctttaactgtcgaatgagctctgacaagccatatgcatttcataaacaaaccaaaacatcatcttcatatcttcctatttttcttgcaaaaatgttaagccatccaagt

SEQ ID NO: 162109 - DNA, 225 bp, Homo Sapiens
  misc_feature (106)..(151): n is a, c, g, or t
ttgaataatattttctttatttacaagttagaatcaacaaagacagtccaggggaccaaatggggagatgactgaaacccccagggccccaaatggagcggaaggnnnnnnnnnnnnnnnnnnnnnnnnnnnnnnnnnnnnnnnnnnnnnnagctcccccttcttccctccccatggaggctgaggggaccacggccccaccctccccccagccttacctagctt

SEQ ID NO: 162110 - DNA, 299 bp, Homo Sapiens
aagaagaagtagctcaactttatttcagtaaaatcaccaacaaaacaataaaaagccaaaactaaaaagacagttttaattgtgagctgaagttttatatttctttacgaattccatttaaaaaaagagaaatctctaaaatcatcaatacgcaggtctttaatccacttttaagtctttccccaccagcattgcagtcacgggatgcatgcttgctttgtgctcttggtaggttcggcccttattcaaggatcttgctgcctttgacaaatcccatgatcaagctgtccgcctcgtgc

SEQ ID NO: 162111 - DNA, 1005 bp, Homo Sapiens
  misc_feature (56)..(245): n is a, c, g, or t
  misc_feature (262)..(271): n is a, c, g, or t
  misc_feature (291)..(348): n is a, c, g, or t
accacacccttcgcaccgcccctgccctccgcgccgccctcgcctccgctcaggtnnnnnnnnnnnnnnnnnnnnnnnnnnnnnnnnnnnnnnnnnnnnnnnnnnnnnnnnnnnnnnnnnnnnnnnnnnnnnnnnnnnnnnnnnnnnnnnnnnnnnnnnnnnnnnnnnnnnnnnnnnnnnnnnnnnnnnnnnnnnnnnnnnnnnnnnnnnnnnnnnnnnnnnnnnnnnnnnnnnnnnnnnnnnnngtctaccggccaccgtnnnnnnnnnntccacgcgcgcccagctcannnnnnnnnnnnnnnnnnnnnnnnnnnnnnnnnnnnnnnnnnnnnnnnnnnnnnnnnntcctcccggcgcagcacgtctctcccatctcggctcccccttcacaacgcccccccacgttcctacgggccgagacccctctgccagcaacggttaattccacagaacgagtgtcttgacaaggaaggattgctcgccagtggatggcctggccccgcgtaaagagatatgggtgttccttcccagaagtctgttcaggagtgagccactggagagcagaagattttggagaggtctcaaaagaaatttctataacaatttgttgatttttgctcaaagcgataggaagagagatttccattggcgatcccttgtaactttgtctttctccaagagcatatttgacttcttgtccattgatcactactttttctattgtaaggtcctttgtatccaaaaccaggctgcgcagattgtcctcctgagactggaccgtgagagcagcagtcccggtcagcgtccggcgagtaaagtcgacgctgcagcgcaggtgcaggtgcttggtccggcagacggaagccggagaggccaacgaacaggtatccactatctcgggcatggctctgggggatcacacagcacagcgacctacagcccaacgcgtccgcggacgcgtgggtcgacgatatcccgggaattcccggacccggtaccagc

SEQ ID NO: 162112 - DNA, 1155 bp, Homo Sapiens
  misc_feature (750)..(826): n is a, c, g, or t
  misc_feature (1139)..(1139): n is a, c, g, or t
ctgggggctggggctgggctggtaggaaccttgtcgggagggggcagcatagggagagaactggtctgtgttgtacatggccggcgtccctggcgtctgcgggttgtattgtgggttgacctgtggggacgaggggtctgggtagccaggtgtttggggattgggggttcccccataggcctgcggggacggggtgggctcatcatcgaaagcatactcatattcttcctcagcccgtgacggcgtgttggggttgttggggtcccaggccccactctgggcaggagtgcggctgccatcatgcaggggcgtgtctgtgaactggtaggcaatgaacttgcgcatcaaggaaatggccgtggcccgttcctccccaatcttacatttgacagtccacagattgggatccttgactcctgggagcagctgctgctgggtgatgtcgtctgagagctcatcagatcctccatacaccgtctctcccacagatgacttggcgtatttcttcatgtaatactcgcccagttcttcttctcgctggtccctccagaggttttgcaggcggcgagccccagaacgatcttcatccaggacaacattatcgatattggaggcttcaatctcttctttctctagaatgtcctctgctccatcctcccactggtcctcgtcctcatactcatcgtcaacatcagcctcgtccagaatgaagcctccatggcggggtttcttggggggtcggtcatcatnnnnnnnnnnnnnnnnnnnnnnnnnnnnnnnnnnnnnnnnnnnnnnnnnnnnnnnnnnnnnnnnnnnnnnnnnnnnnctgcccgctgcactccgccgctcttcgtctacctcggcctcctcgccgtcactgctgcgctcgctgtcctcctcctcggaaaagttgctgtcctcgctgtccgacatcttccgctgctgctgggaaagacagcagtcttggcgcgtcccacaatcctgcgctccaccccgagcctcagtttccccgctggttccctgggagaagaaaaccctttagggcgcttccggcaggctcgttttggcaatcgcgaagcggagtgaggaccccctcctacgccacatgctagacctccccagtttccgaatctgttctntacacctccccggcgc

SEQ ID NO: 162113 - DNA, 972 bp, Homo Sapiens
caggagtcgctgccagttcttccaatcggacctgtcccgaatctggcgttccctcggagcccctgcccctttgaggctttcttgctggctggcgctgttggtccaggactggttccctcagctccagtcaggtttgcctcaggtcctgagatgtggctcggcttctgctgccgtcgtaactttaatgggtttttttaagggttggccacctcactctcagtctgctgcttcaggcccagctgctgctccttgtgttggcttggcacggctcacctgctcctcaatgcctgacagcacgacctcacagcccacacaccattcctgcagggttcgggcaatggcactgaggtcctggcgctggatgtcccgcccgatgctgtagtcaacctcgagccgctggttgcgctggtccagggagccacgaagcacgtcagcatacacagcctcaatcacaaggtcttccagctgccgcacattacgcagggcaagagcctccagcaacactgcatatgggatacactttactttagcagccagggtgacaactgagaggtgtcgaagcttattcttctgagcctctgttagtggaggaagattccgggcttcagctctctaacattgggcatgtccagcagttctccaaacacgtagacaccaggggcctccagcacctgatggatgagtgtggccagcgctgcccccttggccgacttggctaggagcagaaattgctcctggttctgccctgtcaccttcacttccgcactcatcactgcactgagtgtgggggacttgggctcaggatgtccagagacgtggctccgccccctcccttaaagacaccgcccagcgaccgtgggctcccgccgactgcttcgtcgtaccctgggtcaggctctgcgggccgctacctggaagcttcgacctccagcgcaccgggcggcctcgtgccgaattcgccacccaggcctc

SEQ ID NO: 162114 - DNA, 1192 bp, Homo Sapiens
  misc_feature (573)..(592): n is a, c, g, or t
ctacatgactttttttagcaacagtaatttccaggcctttacataatattacatggttatggttcaattattagacagccaggaagtaatcccgagccaaaacaaaggaaggttgtaaagcctcattgtagacaaggcctgagcatccacagagaagatacaatgtttatgtgaatcctggtgtgcccaagtgtgatctactctcttcactgactactctgagtgctgatgagaatatatatattatcctctgactggcttgaatagctaagacaatacagaaaggtaacagagtggtttcacaccctcatgtgcttctgaaataaaaccatgggctcattagtgggtagctcactatctgtggcaaagactagacattttatgcaaaacacaaccactgcaaacccagcccaaagatgcaaaactttcagctaggatacttacccctcagctaaaaaacctgaacagctatttagagataaacccaggttttcagggaaaactggatgaggaaaggttacaaaataagcctgcaactcagctggaaagaggtcacttcaattttcaactcannnnnnnnnnnnnnnnnnnnacctttggcaaggggtatgatcatttcttggcctgcaagcacaatcatgccaaccattaatgtggacaatgtggaaaaaaccctaaaaatccctgcaaagcccctgtcaagacatccaaatgccgcttgctaacagtttttgaggtacctatttgggagagccaagtggaactcttgaagcaaaataagtgtttcccagccttcacatcctaacactgtcaatgaactctcttaagttgagtgaagtggaagcgtgctgagttactgaagtgccaggtctttaatccaatcagctcacaacctctttcctgacttttgcgatatagattgtcaataaaggttagccgtcccttgaatgctcatggcaaagaaggtaccagctggccctggctagcacacagcatgattaaccatttctgagcaccaatcctaatgtcctttaagaatcaccccctaatataagccctggcaggaaatcagctgcttcttgatcccaactttttatgaaagttagaatggtaatagaatttgaattttcagtaggaatcagttctcttcctttccatgctttttcttccttgacttcctttggcctcgtgc

SEQ ID NO: 162115 - DNA, 468 bp, Homo Sapiens
  misc_feature (63)..(75): n is a, c, g, or t
  misc_feature (97)..(114): n is a, c, g, or t
  misc_feature (245)..(299): n is a, c, g, or t
  misc_feature (304)..(305): n is a, c, g, or t
  misc_feature (386)..(386): n is a, c, g, or t
tttttttggcagagaaaattctttaacagagcaatatgtagtatcagtgctaaaagttggggnnnnnnnnnnnnncctctaagaaactacaaggaannnnnnnnnnnnnnnnnnaaactggggaactggttttcctgagaaccatgctctttgatttgggacaggaatagaaaaacaaaagaacatggccaaatgctgctcctttttcccagagatagaaagcatcttttaaatcatcctccacnnnnnnnnnnnnnnnnnnnnnnnnnnnnnnnnnnnnnnnnnnnnnnnnnnnnnnnctcannaaacaacaaaaaagctacagcgcgggcgctccacatcagaatgtcctcgttgcgaattctggctcgagggcaaatccctanatgagtcgtataattcgtatcagtcacactgttctgttgaaatgtatcgccacatcaacacaacgaccgagataatgtagcg

SEQ ID NO: 162116 - DNA, 316 bp, Homo Sapiens
gaactttaaagatcagatttatttgggagaaaacaaaaaacccacaacccaaaggatgggattttacatcaagacatctcccaggtaataagtctacagattacaaatcattttcatagaagatatttttgtacaaattttacatgtattcaggagcgggacattaatcaatccctgtttctattttaataggggggacaaggtaggggagagggaaaaacagttttggatataactatttggaaggagagtagacatgaagagggcaaaccctagcttttcattatctacaatcaatagtttgtttttctttttt

SEQ ID NO: 162117 - DNA, 396 bp, Homo Sapiens; identical to SEQ ID NO: 121710

SEQ ID NO: 162118 - DNA, 469 bp, Homo Sapiens
  misc_feature (33)..(33): n is a, c, g, or t
  misc_feature (42)..(42): n is a, c, g, or t
  misc_feature (61)..(78): n is a, c, g, or t
ggatagtagatctcgagcgtttatctcgggctntaatttgcnaaagctgtgcacatatgtnnnnnnnnnnnnnnnnnngattattttaggggagatgtaggtgtagaattattgcttatgtccatttcttaagcagttatgctcttaatgcttaaaagaaggctagcattgtttgcacaaaaagttggtgattcccaccccaaatagtaataaaattacttctgttgagtaaactttttatgtcatcgtaaaagctgaaaaaatccctttgtttctatttataaaaaaagtgcttttctatatgtacccttgataacagattttgaagaaatcctgtaagatgataaagcatttgaatggtacagtagatgtaaaaaaaattcagtttaaaagaacatttgtttttacattaaatgtttatttgaaatcaaatgattttgtacataaagttcaataatataaaagctgt

SEQ ID NO: 162119 - DNA, 277 bp, Homo Sapiens
  misc_feature (99)..(133): n is a, c, g, or t
tggagggtgggcagcactcgctttattgtccagcattccacatggatagacgcaggacagcaggccatggtggtgggctaagaggcagcctgccgggcnnnnnnnnnnnnnnnnnnnnnnnnnnnnnnnnnnncgagctccggccgaaagtggcggatcagaccctgcacaggccaggcggccccgtcactcagagcacaaatcgtatggccttctatctgcttgctgatctcccatgtggaatgctggacaataaagcgagtgctgcccaccctcc

SEQ ID NO: 162120 - DNA, 577 bp, Homo Sapiens
  misc_feature (227)..(249): n is a, c, g, or t
aatcatgcaaggttgtttttattaagctttatattcagtttacagctaaatattacagggattatttcttttgacaagcagacatgacatcctaggaaacttttcaaaacagtcacagtgaaaatctctcagaagaactcataaagaaaatacaagagtggagagaagctcttcaatagctaagcatctccttacagtcactaatatagtagattttaaagacaaannnnnnnnnnnnnnnnnnnnnnnaaacataagctaaatcatattagtattaatactacccatagaaaacttgacatgtagcttcttctgaaagaattatttgccttctgaaatgtgacccccaagtcctatcctaaataaaaaaagacaaattcggatgtatgatctctctagctttgtcatagttatgtgattttcctttgtagctacttttgcaggataataattttatagaaaaggaacagttgcatttagcttctttcccttagtgactcttgaagtacttaacatacacgttaactgcagagtaaattgctctgttcccagtagttataaacctcgtgccgaattc

SEQ ID NO: 162121 - DNA, 1269 bp, Homo Sapiens
agctagccctgaagggcgccccgggtttctgctgcagccgcattctggcaccaggtcttcatttctccttcctggcagagggagcacgtggagtagacgagccgctgcagggaagggaaagtgagtgcgtggcacagggctcgctgctggaaccctgccaggggcatgcagacgcaccgggctagggtgtgcctgccccgggcttcctccagctgtctgctcggcatacccgagccactgcaggaaggatccagcaggatgtagtggacctcatggtagcgtggatccgagggggagaccgccaggaagtcctcctcagccagttcacagcaagagacgccagcccgggccagcagcgtggccatggatgccagccgcttggcatccaggtcaaaggcaaagatccttggttcttcagaagagcagccaagtgactggtcttattgcctggggcggcacaggcatcgatgacatgggagcctggcggggggtccagcagcatggctgggagacagctggccctgtcctgcagaatgaggtgtccggcccggtacagtgggtgttcatgcagatctgtctgggcgggaaacaccagcagctccggcatcaaggggtccaggagaaaatgcttccccttgagggctcgtaagtcatcgaggctggaagcccgaccctgataggagaaaccttgtctcttgaaataatcaactacatcatcggagcaggtcttgagagtgttcacacgcacaaatcgaggcagctgggaggctggaccaggcctggatcccacttccaacaggtcctcattccggctcacaccccgatgaaccttgagccgagccaactcagccttgagcctcgcctggtgccggcccaacagagccttccattggcccccaccccctcgaaagccctttcccaacaactcatacactagcactcatttcaggtgagcgacttgctccagtcccgccgtgcacggcagcggggctgaaaccagatgacaaagcgctgaccgtcggggttcacttccccgccccgcccctacccttggccaggtgcggctgcagcttcttcgcactgaggaggccggcgctggagatcacggcatccagcacggcggagtagtcgctgcgtttcgcacaccagcgcgtacagctgcttcacgttctggaagttgctggagtacaccagccccttgatagagcctggcggctctccacgccggccagcacgcctgccaccgcagcgtacagccccatgttcccg

SEQ ID NO: 162122 - DNA, 189 bp, Homo Sapiens
gtcagacaaacacattgatttctggaccacagtagaggatggaaacctttcacaaacttatttatttgaaaatacaaatataaaattatactttccacatctgtgatgtgagagactgccatccacatagtaattttttacaacagggctttaagaaagccacacacaaagacctgaaagatgcttgag

SEQ ID NO: 162123 - DNA, 229 bp, Homo Sapiens
tttcttgaatgtgcttcgcaagccaggctatcttccaaggaaggcagacagtgggagagcagagggactgactgcaggcaagcacattgaagaaagacactggcgggtttccccaccctcaccccaaagcagaaaactagcagacgtcagctcagccccgtcctgggcacagacactacacaaggagacgctggaagttaagcaatactttaatactgtaatatgtttg

SEQ ID NO: 162124 - DNA, 995 bp, Homo Sapiens
  misc_feature (11)..(11): n is a, c, g, or t
cgggagagacngggggggctaattaatataaccgtggtcaagaaagcaggctggtaccggtccggaattcccgggatatcgtcgacccacgcgtccgtggccctgctgcactccggccgcgtcctccccgggatcgccgtcgccttccacccgggcctcgccgccgcggcctctgccagagccagctcctggtggacccatgtggaaaatgggacctccagatcccattctgggagtcactgaagcctttaagagggacaccaatagcaaaaagatgaatctgggagttggtgcctaccgggatgataacggaaagccttacgtgctgcctagcgtccgcaaggcagaggcccagattgccgcaaaaaatttggacaaggaatacctgcccattgggggactggctgaattttgcaaggcatctgcagaactagccctgggtgagaacagcgaagtcttgaagagtggccggtttgtcactgtgcagaccatttctggaactggagccttaaggatcggagccagttttctgcaaagattttttaagttcagccgagatgtctttctgcccaaaccaacctggggaaaccagacacccatcttcagggatgctggcatgcagctacaaggttatcggtattatgaccccaagacttgcggttttgacttcacaggcgctgtggaggatatttcaaaaaataccagagcagagtgttcttcttctgcatgcctgcgcccacaatcccacggggagtggaccctcgtccggaacagtggaaaggaaatagcaacagtggtgaagaaaaggaatctctttgcgttctttgacatgggctaccaaagctttgccaggggtgatggtgataaagatgcctggggctgggccccactttcttcgaaaaggggcattaatgtttggcctctgccaatcatatggccagaaacagggggctttatatgggtgaacctgggaaggaacccttccctattgggcc

SEQ ID NO: 162125 - DNA, 351 bp, Homo Sapiens
  misc_feature (165)..(182): n is a, c, g, or t
acaagtctttaattaaaaaactcaacaaaaatatataattgagcattttacataatgcatacattcttaatatctgcaggtaagataaacaacagaaggcaaaagcagatatgctgtattgcttctttggcaactcaccaatatcatcccctgcagaaacagagnnnnnnnnnnnnnnnnnnaaatccatggtcttaaaataattgtcccttagtataaacaaaatatttagcaataatacagtagacggattcttcaaattcacaacaatttataatactttataccacaagggtaaactagtaagctgctttctaaaattaaggcagcagcagtgtttagagggggagt

SEQ ID NO: 162126 - DNA, 432 bp, Homo Sapiens
  misc_feature (132)..(187): n is a, c, g, or t
caaataagtagagactattgtaaaaaacgagaaaggaaaatgaaatgtgcgtgttgatagcaataatttgttttttttaaagattctaaaaggtctgagacctgtagcattaattatttgagtgccctccannnnnnnnnnnnnnnnnnnnnnnnnnnnnnnnnnnnnnnnnnnnnnnnnnnnnnnnattcattgttttgcttttggagtaggtgttgttcaagtatctgtggtttggttctggcattttgttcccaccatccccttcccccattaacttcccccctgcttgccatcctgcagtagtataaatcatgaataaaaaataattttgctgttgtagtatacattggagaaactggcaggttttatttccattattttatttccactatatctatgataagatgcaattataaggagagaagtgac

SEQ ID NO: 162127 - DNA, 405 bp, Homo Sapiens
cagcagttacagacatttattttatagtaagaaaagtacaaccttatttattaaacttgaggtgggcaggggagagggaggaaagcacattcgggaacgagttctcaaactaatgctcagaaccggtgtccagtgacgtagaaaccactttcccaaatggcggagcctttccttccctggggatagtggcagagggagtgaccgccaccgcagcatgcctgctgactccctctcagtcccactttccatttctattcttttttatcagatggcattcttggaatcaggaattatcactatcacctataagttatttatcaagttgatagttaaatcattaaagaaaaggagtatcaggggtagctgctcacattgtggggcaggaagataggatttgagggctgc

SEQ ID NO: 162128 - DNA, 540 bp, Homo Sapiens
  misc_feature (121)..(130): n is a, c, g, or t
tttcattatcctctcacaggaccaacttttattttatttattcatttaaggacaaatttttaaaagtaaagtgaatgaaaccatttgtgattaagatacatagacagaacttcaatgtagnnnnnnnnnngaccttgctgggaaacagatgatgagaaacactgtaaaacatttcacagacgcacaaaaagctcacattgtaaacaggattaagctgctcttgatttagcccgtaacatcaaggtttcattttgctcagcctgagatctcgctcaatttcaaactgcctgtgatccactcggtcgaggaaggctttccgttcaatgtacccctctttccctcgattatggatggccagttcttcaccaatcccctcttcctccttgaagctctcccagtccagtttggacttctcaagggtgctcattttctgcttcttggcaccaattttccccaaaaggctgctcatgccacttgatcttttaatgagaggccaccttgtcttctcttcctggctggaatgctctgggcctttctttt

SEQ ID NO: 162129 - DNA, 696 bp, Homo Sapiens
tgccgtgcgtgtctatttattgttgctgccaccctggaggagccccagtttcttctgtagctttcttttctgggggatcttcctggctctgcccctccattcccagcctctcactccccatcttgcacttttgctagggttggaggcgctttcctggtagcccctcagagactcagtcagcgggaataagtcctaggggtggggggtgtggcaagccggcctggatcctgtcctgggtcctccttcctccacagtcccgtctctattgctgggtgtagtgtccatggtctggcctcatctccagctctgtctcagcgccgtgcccctcgcttcttcctctctgaattctgcagcttggtcaccagtttcctctcgtgcccgccagggctggggcggttggtgttggcagcagcttctctcttggtgcgacctttccggcctccacctcctgtaaccaaggcaggagtcagaggtgaagtgggcataggcatgatgagaggcccgaggtaggaatgggccaggctatagaggtcagattcatccaggctggagtcctcgtcctccgggcctgggggctgctggggggcgctggttgctggtgggaaggtggccatcgtgcctggcttgtcttccctgcctctcttcttctcctaacgctttgtctgtctctgctttcctggccccgggcctctccac

SEQ ID NO: 162130 - DNA, 1052 bp, Homo Sapiens
  misc_feature (764)..(764): n is a, c, g, or t
  misc_feature (775)..(960): n is a, c, g, or t
  misc_feature (981)..(981): n is a, c, g, or t
aaatcagtagtctaacaaggattagaaaagacaaaactctgttcagtgtttctgacaaagtagaaagggtgaaaacataaataaggctttaatttggcaaaatataatacaatgccttttttatcctcaaatgaacagtttcccaattacttcactctaacacctggtagtgctctttctcctttgtgagctgttggtttaccgcctgaagcaactgctgtaactgtgttacagtctgatttagacttacagacattgtctccttctcagaagactccgtttctggggaaacatcactattttcaataacagtagtgtctccagcagcttttactatttttgactggataagctccagtgactgttgagccttatgcaaatcaccagctaccttctgtctttcattttgttcagttctaagttttgtgagtgtttcatttaactgtgccttcaacaaatttagctcttcattctgtcttactgcttcagaatatgaatcatcaagttttttctgcaattcagtcaacagatctttcagctctctgacttctgtaacataggtagatcgttccatctctgccttttctagttccatttccaaatgttctcgttctcttctcagattttcaatatccttattttcgcttcttaatcgctctagctcttgttctgaagatgtcaatgatgactgcatctgtttaatagtcttgtgtgattcatcgaccttaactttccatttattttcctcgttccgaattcttggnctcgagggcannnnnnnnnnnnnnnnnnnnnnnnnnnnnnnnnnnnnnnnnnnnnnnnnnnnnnnnnnnnnnnnnnnnnnnnnnnnnnnnnnnnnnnnnnnnnnnnnnnnnnnnnnnnnnnnnnnnnnnnnnnnnnnnnnnnnnnnnnnnnnnnnnnnnnnnnnnnnnnnnnnnnnnnnnnnnnnnnnnnnnnnnntgcagctgcataatgatcggncacgcgcggggaaagcggttgcgtatgggcggtcttcgcttctcgctcatgactcgtgcgctcgtcgttcc

SEQ ID NO: 162131 - DNA, 241 bp, Homo Sapiens
cacttagtgctgatgtttattgttaaggctccaatcttttgggttctacaaaatatacacctgaaacactccaacttgctccttgatgattactcatgactggaaggagggaagtggcccagatcaaaataagcaccataagcttgaccaggaagttcctaaaggctctattcacttcctcccatagaacacctaagacaatgactgtgtttctcagtgtccttgatgcaaggaaactcac

SEQ ID NO: 162132 - DNA, 384 bp, Homo Sapiens
  misc_feature (77)..(87): n is a, c, g, or t
tttaaattatttttctcattaagattttaatgtagctgtaaatgaaattctcgttttaaaaaaattaaagtttccannnnnnnnnnnagaataaagatttagtgcacaaatacagcccaaagccaacagaaaaattgctttgccctgtcatttccctaagaaagcactgaagttaactcaaaataggctgaaagaaaaaaagcaatcctctgagttctaggtttcacaaaaggaccacgtgttaaactatgtacatcgatttgatgtgcaagtatgcaataaatatgtacacatacattcctatctgctttacatcattctagagtattcatagtatatcaagatgggatttagaaatgtgaaaaggccataacagtgaaaagg

SEQ ID NO: 162133 - DNA, 653 bp, Homo Sapiens
ctgtaattacaggcatactcagacttaaaggtttatcttccttgtgtatattctgcacattgcctttgtttctgagagacatcttccttcctgctggtttcaatctttctttcttctcttttttcctagttgctttgaattgcccttgaccaaatgtgaccagaagaaaaaaatgagctgggaaataaacaaaagaaaactaagatccccaagcccaacagagctcaaaggaaggcagaagaggtggtaggaagtagagggaaggcagccgataggcccagaagctaaggccaaatcctgttcctatgggggtggggggagggagaaagcctggggaagtggtttcccaggcccaagataatgaaacatcttcactcctgctccaagggggaaagctgcacagagaaagaacttcatttctagaagactttggaaagccatcctagttcttccacttgtaaaaaggatgcactgggtgctatggggggccagtggcttctgggaaaggaagggggaaatgtgtgtgtttcagggccatgggaactaaggctgcccctggaaaaggaagggaattgaggcctaagtggaagaacctaagctgggtccttcagaatctcagcttcatagatttctcagctgttctgggatagaag

SEQ ID NO: 162134 - DNA, 439 bp, Homo Sapiens
caaatcaattagacaacttttactaaatgagaaaactacatttaaaatgtgctttaaaacaaaacggaattagaaaaaaagacatatgcattttaaagaacttttgcactgtgctgaaaatgaaatatctcttgcagtaagtaatacaatgtgccaattcataaaatgtaagttaacaggtttctcaatttaacattttcaaagacgatattaaggtcaaaaatgtcacatctatggtagcacatatagaagggcattatagatatgatgtccatccctatgaagcttacaaatttgacaatgctcaataaaagcttttagaatcacatccaatagtgtcacagtcaaagaatcacaaatctgtgtcctgtaagttctctccttctaaaatcttcatgttaacttttctactcattgccatttgttaatactaaccctt

SEQ ID NO: 162135 - DNA, 437 bp, Homo Sapiens
cttcagacatattctgcctcattttatcatctaagcaggcaatcctatcaggtctgaggaaaaaaattgcaagccacacttctagagattttgttcaagatcatttcaggtgagcagttagagtaggtgaatttgtttcaaattgtactagtgacagtttctcatcatctgtaactgttgagatgtatgtgcatgtgaccacaaatgcttgcttggacttgcccatctagcactttggaaatcagtatttaaatgccaaataatcttccaggtagtgctgcttctgaagttatctcttaatcctcttaagtaatttggtgtctgtccagaaaaagtcgatttatgtgtattaattggccatcatgatgttatcatatcttattcccttttatgctatgatttattctatcttttgtatttcagaagaccctcgtgcc

SEQ ID NO: 162136 - DNA, 213 bp, Homo Sapiens
ttttttttgagttttaaaattctttatttaaaaatctctaactgtaatgtttcataaaaaatatacacgtttctatttacatattccattaattctattagtttgaattagattttaagtccaattttgaaaagcttgcagaatttcttctgaaattacttaaaattactgtatgcataaacttacaaaaacatatgctataccaaggcagag

SEQ ID NO: 162137 - DNA, 374 bp, Homo Sapiens
aaaattgtagctctgaggcattttattataaaaacttagtactcatatacataaactaatacgaacttaaaattcatcatacatttacttcattttttagcttgaccttctagtaaatctttagcttcattgattttggctgctatataaggagatcctcctttgtcaggatgatttaaaagcataattcgtcgatgagcatctcttattttccctttattggcagtagggagattttggtaggctttgaaaaacttgttttacttgaggctccatatgcttcatggcttgcaaaacgtaacggcctgcaaatcctgcagcagcaatggtcagtccaactgctaccactgtactggccatggctccggctgggc

SEQ ID NO: 162138 - DNA, 441 bp, Homo Sapiens
agggccatttgagtattttgttttcaattagggagatagttggtattaggattaggattgttgtgaagtatagtacggatgctacttgtccaatgatggtaaaagggtagcttactggttgtcctccgattcaggttagaatgaggaggtctgcggctaggagtcaataaagtgattggcttagtgggcgaaatattatagctttgttgtttggatatatggaggatggggattattgctaggatgaggatggatagtaatagggcaaggacgcctcctagtttgttagggacggatcggagaattttttaggcccatttgagtattttgttttcaattagggagatagttggtattaggacaaggatttggaagctgatgaagaggacactaggaaaaaagatgcttctgatgatctaaatgacttgaacttctttaatc

SEQ ID NO: 162139 - DNA, 1342 bp, Homo Sapiens
  misc_feature (251)..(251): n is a, c, g, or t
  misc_feature (481)..(481): n is a, c, g, or t
  misc_feature (1050)..(1080): n is a, c, g, or t
  misc_feature (1249)..(1272): n is a, c, g, or t
  misc_feature (1329)..(1329): n is a, c, g, or t
ggaggggagtgaaaaaacagtgggggtgtcacgtgtcgcgagtaaatagtgagagcgcgcggggcgaacaatcgaggagagggacgggggagtatgtcagatgggacatacgacgaggcagattatagtgcagatatagggtcgacgcgtggatatcatgtggatttcgcgcgaggtagagcagcgtggagaaatataggagcgcaatcagaaggtagttcagaggtgaggcgggcacactatctgattantagcgctggtcggggggcccatatataatatcattatgcatgtgagggagtgcgggtgagacagacgaactaagtgcgtggtggagattgtataccgcagtgagtaagatcataggacgcagcgggggtgtgcgcattacaaggagcgattcagtgtcggtcggtcagacgcgctcacggcatttatacccgaagaatgtgtgtgagtcacacagggaatgtgcgcgggnggcgggaggtaaatgacagtgtggtgagaatccacacgaggaagaccgggcgcgcaacaggagagaacagtgtgatgaggagagcaccgcgagggacggtgcatataagcgcggtgcgtcggagagcagtcgtgaatgaagtggaggtaccggggtggtgggatatataatcgccaactgggtggggggcctgacaagaggggtggccggtggagggatggcgcttcgcgggagcggcattgcgatgtgtcacagccggagggggcgtttgtggctgtgattgaggaatcccaaaggcggtaggtcaagaacccaaggatgtccgtaggaaaggcaggctaaggacccatgttcggattgacctggggggtaccggggcgcccaaggcggatggtatagaaagggttctagaggttccgagggcgacgggcatgtgttgttgggtattttgtcttatttttttggccaagcataatgtcaaggtcatcctctggttcagttggttcttgaacatcactttcaatcttaagatcctttacacgttcttcagcttcatcaatatcaaatannnnnnnnnnnnnnnnnnnnnnnnnnnnnnnattaaagaagttcaagtcatctagatcatcagaagcatcttttttcctagtgtcctcttcatcagcttccaaatccttgtcctcagttggctctggctccacttcttttgtttctgaaggctgggtttcctctgtttgggtatccccttcctcatctaacataaaaggnnnnnnnnnnnnnnnnnnnnnnnngctcatagtaggatcaaaaatcatctcgtccccaaacatggctgcggacgaaatganttttgatcaaact

SEQ ID NO: 162140 - DNA, 283 bp, Homo Sapiens
acaggcttttaaaataacctttattttttaaaagttagtatgtgcattataggaaattgaaaaacacaagcaaagaacaaagtcattcacaatcacaagcagtttatagtttgacatattcttctagatcctgtgtgtaggcacaacatccaattttatgggactgagactgtacagtatgtatcatgatttttcacacatcatgaatatttaccaattcaaaatcccaaagctatatgagtattctgataaccaagaatacactacaccaactcaaactgct

SEQ ID NO: 162141 - DNA, 972 bp, Homo Sapiens
  misc_feature (161)..(220): n is a, c, g, or t
ctttgaatgtttcttcttcggacacttttgccacatctactgacaccacggtttgatcctcttccacccagtcatgagccctcttcatggccttattgagtttgtcaggtgtggccgccacatgcaattcaaagagaagctctgtaagcatgcgagcaaannnnnnnnnnnnnnnnnnnnnnnnnnnnnnnnnnnnnnnnnnnnnnnnnnnnnnnnnnnnggctgcaaagatgtctttaatggaaattaggtcattttttaagagttccagcttctctccatcaagtgatgctaaaaatgactgaaccttgctttcgctttcattggacagaatttccagggcttccaggtgtgacaagccttgatattcatcaaacagcatcccgtagtgcgcggttctctccatcgtgagctgctgtgccagtctctgcttctccttctccttagcttcccttaacatctgagacaaggaaacagttctctccatgagcgtcttggtccgcttaaagcccgggtcactttctgcaaggacattcatggttttcttgccgatgaattccaacgcatcaaggcctccagttaagacacttttacctgtgttttgaaccacacttggtgatggcagacagcatacctccgagaggctgatgaaggggaagtgggtgggctttctgcaggtcctgatctgtggctgcatctgtttttcaggactccgtttcagtattgggtgggtcttcagctcgtgcgatttctggctcgagggcaattcctataggagtcgtataaatcgtatcagtcaagtgttctgtgtgaatgtatcgtcacatcacacacatagagcggagcaaatgtaagctgggtgctatgatgagtatcacatatcgtggccatgcgcttcatcggaactgctgcactgatatatcgcacccgggaaggggtgctatgggctcgctctcgcagatcgtggcggga

SEQ ID NO: 162142 - DNA, 695 bp, Homo Sapiens
  misc_feature (36)..(37): n is a, c, g, or t
  misc_feature (56)..(56): n is a, c, g, or t
  misc_feature (63)..(63): n is a, c, g, or t
  misc_feature (76)..(76): n is a, c, g, or t
  misc_feature (148)..(148): n is a, c, g, or t
  misc_feature (161)..(161): n is a, c, g, or t
  misc_feature (183)..(183): n is a, c, g, or t
  misc_feature (484)..(498): n is a, c, g, or t
  misc_feature (578)..(612): n is a, c, g, or t
ccatatatatgatactacctatccaatttgattaannatttgtaataaccataatnatcaacntagtgctccaacnttatgctgttcacatgaagacaccacgaaaagaagacataatatagagactgccttgcaataagaagtacanattccttctatanagatggagaaataaaaggacanatctagttgtctaaaagacaattcactgtacacattttatttacagttttgtacactgtcttaatatgaatgggactgcttttctacttgagccatttttaaccaaagcaaaataacctaagtaatacaaagtgttaaaatacagcataaagatacaaaaacagacatactaattctagttaggaatgtaattatgatgttacattttttataatccacaattatgtttaggaaatcacacaaacatagatcactgatttgaatgaaatgcataaatttgtagcaaagctttgtagttacnnnnnnnnnnnnnnnttaccaaagaatgcacaaaattaatgtttattccacctttgtgtcatattcctggatccttcaccaatgttacatgaggnnnnnnnnnnnnnnnnnnnnnnnnnnnnnnnnnnntcagaatcactaatattatcaagtagggaaacaaataaattaaaatctagcagccatcagcaagagtacagcaaagacaatgc

SEQ ID NO: 162143 - DNA, 708 bp, Homo Sapiens
  misc_feature (415)..(465): n is a, c, g, or t
attttaaagacaaaaagcagatgtaaccattataatgtgcataaatagtcataaaattgtctttaacagtctaccatacaagtgtactctgcaaataaaatgaattttactttaaaaactaaaggctgtttattatttggcctttggttccaatgcttgaaaaccccaaaataacaaaactcatctcccttcctcccacctcccaaaaagaaccctgcagctccccaaagttggtagactttggcaaccactgagcacatgacactatgtatcagcttcttctgatactaggagcttccacttctcatgagtaaataaaagtggtctccaagaaaccttccttcacaagacatgtcttagcatttcatcagttttagtatattttatattgacacaaaaagtgcttatcagttcnnnnnnnnnnnnnnnnnnnnnnnnnnnnnnnnnnnnnnnnnnnnnnnnnnnataccatattcctcttcggcatgtgcctttccaggaattcttgtttctgaggtcactcattttactcccggggactaagcgaccccacctttagtgaggccacaagctgtttggcatctattggtcactataccacaattatcattctacagtcagtttactgtcattacctagacaacctggtaactggaagccacaatacatttgtttttttgaaaaactgaattaacaaaggaaaaaaat

SEQ ID NO: 162144 - DNA, 742 bp, Homo Sapiens
aacggctaggtacgaggctgggtgtttaatcggcacgaggtcccgctggttttagctcccggcgtctgcaaaatgaagatgaggaggtgaagagcactacgaagacgcagcgcatcgcctcccacagccacgtgaaagggctggggctggacgagagcggcttggccaagcaggcggcctcagggcttgtgggccaggagaacgcgcgagaggcatgtggcgtcatagtagaattaatcaaaagcaagaaaatggctggaagagctgtcttgttggcaggacctcctggaactggcaagacagctctggctctggctattgctcaggagctgggtagtaaggtccccttctgcccaatggtggggagtgaagtttactcaactgagatcaacgaagacagaggtgctgatggagaacttccgcagggccattgggctgcgaataaaggagaccaaggaagtttatgaaggtgaagtcacagagctaactccgtgtgagcacagagaatcccatgggaggatatggcaaaaccattagccatgtggatcataggactcaaaaacagccaaaggaaccaaacagttgaaactgggacccagcattttcgaaagttggcacgaaagagcgagtagaagctggacattgtgattacattggaagcaacagggggccgtgaagagggcggcaggtgtatacctatgccaagaatcgacttgaactgacgagtggtcctgtccaaggg

SEQ ID NO: 162145 - DNA, 1127 bp, Homo Sapiens
  misc_feature (1021)..(1021): n is a, c, g, or t
gctgcctttgagagctgttcactacctatggagaacggccttccctaccagagcccagcgtgcctggcagcatgaggctgagccctcaggacccgcggcccctgtcccctggggccttgcagcttgctggagagaagagcagtgagaagggcctgagagaacgcgcctaatattaggcgcgttctgcgtggagaatactttttgcgatgcctactggagactttgattcgaagcccagttgggccgaccaggtggaggaggagggggaggacgacaaatgtgtcaccagcgagctcctcaaggggatccctctggccacaggtgacaccagcccagagccagagctactgccgggagctccactgccgcctcccaaggaggtcatcaacggaaacataaagacagtgacagagtacaagatagatgaggatggcaagaagttcaagattgtccgcaccttcaggattgagacccggaaggcttcaaaggctgtcgcaaggaggaagaactggaagaagttcgggaactcagagtttgagccccccggacccaatgtggccaccaccactgtcagtgacgatgtctctatgacgttcatcaccagcaaagaggacctgaactgccaggaggaggaggaccctatgaacaaactcaagggccagaagatcgtgtcctgccgcatctgcaagggcgtccactggaccacccgctgcccctacaaggatacgctggggcccatgcagaaggagctggccgagcagctgggcctgtctactggcgagaaggagaagctgccgggagagcttgagccggtgcaggccacgcagaacaagacagggaagtatgtgccgccgagcctgcgcgacggggccagccgcccgcgggagtccatgcaaccccaccgcagagccgacgacaacgccaccatccgtgtcaccaactttgtcagaaggaaacgccgtgaaaaccgaccctgcagggagctccttccggggccttttcggggttcccttctccccgncatcttaacctggggctaaagggaaccaggacccacctgggcccaaattccaaaggggcttttgtgccctttccatataggctttccccacccggccgggcgaagc

SEQ ID NO: 162146 - DNA, 608 bp, Homo Sapiens
  misc_feature (348)..(355): n is a, c, g, or t
  misc_feature (359)..(366): n is a, c, g, or t
  misc_feature (368)..(370): n is a, c, g, or t
  misc_feature (372)..(372): n is a, c, g, or t
  misc_feature (380)..(380): n is a, c, g, or t
  misc_feature (382)..(382): n is a, c, g, or t
  misc_feature (386)..(389): n is a, c, g, or t
  misc_feature (396)..(398): n is a, c, g, or t
  misc_feature (420)..(420): n is a, c, g, or t
  misc_feature (425)..(427): n is a, c, g, or t
  misc_feature (432)..(433): n is a, c, g, or t
  misc_feature (442)..(445): n is a, c, g, or t
  misc_feature (463)..(493): n is a, c, g, or t
aagtaacaaacacctaatgtttattaataaattagtacacttgaaggcatttttctgatatcggtccttcaccactacccacaaaccccacccacacaaagggattccttcaccaattactttaattaaaaatggctgcaactgtaagaacccttgtctgatatatttgcaactatgctcccatttacaaatgtaccttctaatgctcagttgccaggttccaatgcaaaggtggcgtggactccctttgtgtgggtggggtttgtgggtagtggtgaaaggacgatatcagaaaaatgccctcaaggggactaaatttattaataacctttaggtggtttgttacannnnnnnnaaannnnnnnnannnanaaaaaaantnatannnnaaattannncctcccaaaaatttattttaanaaatnnnttttnnaatttgttnnnnccccctcggccccccctnnnnnnnnnnnnnnnnnnnnnnnnnnnnnnnggaaccccggggcccccaaaggggaaaggggaaacatggggcccaaagggggttctccccgggagaaaaccccgggggagtggagatgagggctcggggaaattccccccccttt

SEQ ID NO: 162147 - DNA, 515 bp, Homo Sapiens
  misc_feature (223)..(249): n is a, c, g, or t
  misc_feature (292)..(334): n is a, c, g, or t
tccatacattatcatcaaacagcagggagctagtggagaggtctattgtcccagtggggaaaaatgccctcttgtgggctccaatgtcccctgggcctttatgcaaggggaaattgcaaccatccttgctggagatgtgaaagtgaaaaaagagagagactcgtgacttttccggtttcagaaaaacccaatgattacccttaattaaaactgcttgaattgnnnnnnnnnnnnnnnnnnnnnnnnnnnccaagacaagggaaatgtagacttcataaacatggctgtatannnnnnnnnnnnnnnnnnnnnnnnnnnnnnnnnnnnnnnnnnngacgacaaaaggtatgtacttataaagacatttttttcttttgttaacgttattagcatatctttgtgctttattatcctggtgacagttaccgttctatgtaggctgtgacttgcgctgcttttttagagcacttggcaaatcagaaatgcttctagctgtatttgtatgcacttatttt

SEQ ID NO: 162148 - DNA, 292 bp, Homo Sapiens
agttttttaaaaaatgtttattttttcaaagaaaacggcaatagccaattggaaacctacttattcttcaactccaattttgttttctttaaatttagaagtgacttactgatttactattttaaacaaaccccccctttcccctttaaatgtttaccatctactcgtgctgaatccttccaaggagattgctccagcgtttatctccaggtcctcgctttgctccttttaccaaaaaacgcaaaacacaattccatcgtgcatcttaagggctccaatcgtcaaaaatagg

SEQ ID NO: 162149 - DNA, 483 bp, Homo Sapiens
gctctttcagccatttctttttatttacagtttgtgttcaatgcaaatcaattccataagaagttactatgaatcaaagcgtaaatacacaaacacaatatacaatccaaaatagatgtacagcattctggaataaagcaagagtgttcattcacacacacagtagcttcaaaactgttcgatctgtttgttcccatgtagttttctaaagatggaaaaaaaggactttggtcatcaagactactgtggccatattagattactggaacatctaagcatcagtgtgtgaccatgcgaacaaaagacttcggggagtgtctatttttaaaaaggtttatgtgtgtcgaggcagttgtaaaagatttactgcagaatcaagcccacttttaggcttaggaccaggttctaactatctaaaaatattgactgataacaaaaagtgttctaaatgtggctattctgatccatagttgttttttaaag

SEQ ID NO: 162150 - DNA, 650 bp, Homo Sapiens
  misc_feature (215)..(270): n is a, c, g, or t
accatatcatcctcttcatttttagggtcatatactttctccaactctttagtaaatagggcttctaattcttgttcatccaggaatccatcactattgacatcatgtaatttgaaaaatgtcttggggtcaaagtcattaggatccaatccatcagtctcttcccatacctcttttagttgatctttgcttcctgggtgattaactttagggtnnnnnnnnnnnnnnnnnnnnnnnnnnnnnnnnnnnnnnnnnnnnnnnnnnnnnnnntcttcattcaatgtttttaaatattctctcctttcatgttccttcatcatttcatattttttaaattcttcatgacgagtcttgtcatagtgttccagatcacttgttgccgctttgattagcatatctaaatctgtggattcaaacttgtcaggattcaggtggtttaggtgatcaaattgttttagaagagcttggtggtccatgcctatatcttgaagggaatccaacttagctttaattaacattcttaaccttcctacttcttgccttttcagttcatcaagttttgtcctcacatggtgacaagactcgtcatgaagaatttaaaaaatatgaaatgatgaaggaacatgaaaggagagaatattcctcgtgcc

SEQ ID NO: 162151 - DNA, 1415 bp, Homo Sapiens
  misc_feature (182)..(182): n is a, c, g, or t
gggagtttactttttttcccgggtatctttccttatcccccggaaaagtttttcccccatgtaaagccccagtagcaggcagctagggttccagtcttcccccttgggtaggaaaaggagtgaggggaatgtcactcctgagtttccatgcttcttcttcctcttcttgaggggggtcttcngtatcctcctcttcttcctctccttccttcttctctggtggcttctcataagccttttctgaaggtgttactatcactccatcccaggtagatatttcagaagcaagatagctggcatcaccctcctggccaaggatcttcctaaagccaccatgtgagaggattcggacgagagtctgagctgtatagcagaccatgtcctgctgttttagggtcatgactgtgtgtactctaaagttgccactctcacaggggtcagtgatacccactgaacctggcaggaacagtcctgcagccagaatctgcaagcagcgcctgtatgcaacgtttagggccaaaggctgtctggtggggttgttcatcacagcataatggcctagtaggtcaaggatccagggtgtgaggggctcaaaagccaggaaaacgaatcctcaagtccttcagtagtctgatgagaactttaactgtggactgagaagcattttcctcgaaccacgcgggcatcgtcggatgcgcttgctaaggcactctgcaatacttttgatatcccaaatggagttctggatccagttttcgaagattgggttggcactgttggtaatgagaatcttcactgtagcatcagaagaactgatttcaaagccagtttcgttggtcagcatggttaaaacttcagaaggatcctgtgctcttaggcttttccacgactttgttccccagggcacgcaaacagcttccaacgttggcagaatcttgagtatcaccacccaggtgcagccacattgtgtccctgtatgtcactttgtcccctcttttataaagagttcccccctgttcggaacttcttcaatttgcacttcaaatgtccctggagccactaatcagattatcaatcacattgtttatttattgtcaccagagaaaggatagatcgcctgttcagcagaattgggagccaggtcctgattcctcttcagcaaggcctcactgaaggaagtttcatcaggtgctggcttgacccggggaaagcgccatttcacacaaatagaagtcaaatgggatatgtggtacaaagggcctgaaccctcctcctgggcctcctctggaaccaaagcgcccaccacgaccacggcctctgtcacccctcatggcgccttaaaacacgaacaatggagccgcaccaccgccccctcgtgccgaattcaacacccaggcctcgtacctagcctaatt

SEQ ID NO: 162152 - DNA, 1133 bp, Homo Sapiens
  misc_feature (1109)..(1109): n is a, c, g, or t
tgaggcctgaacaggcctgggatggctcttgggcttgagggcctgttctggcaggatggcaagcagacactggacagggtcacttgggcggccgatatgccagcttccgactcttcaggactgaccacttgtgccgctttatggtgtagaccaggggcaccagcagagccatcatcatcaacatcttgagccccatgcgttttcgatggtcgtgctctggctcagatgcccagcgcaggaaggtgcacacatccttggctatctgggacatggtagctggggtgccatcgtcaaactctaagacatctgtgtaaatgggaggggccatggcaatggcctggccaggaaagtaggggttgaagtagagaccttcccgcagtgacacccggtgggtggctcgcagtagcccgtgagcagggagaagacgtagtcctcaccaccatgcctagctcgcacgatgtagctgaggtcagggggcaatgctccgttgttggcagctcgagcagcctcactgttggggtatggttttgggaaatagtcgaacagcttccctggccgcatgaacatctccccatcttcattggggccgtcttgaacctccacctccgcagccagctccttagcttcatcctccgtgtagcacacgcccaccaggtggcggtaggccacgaagtccatgctgtggcaggaggcgcacacctgcttatatacctggaaacccctccggatgctggtgtggtccaaggaagagaggaggccacggtgagaccacggatagctgggggggtgcagctccaggtcactggcactcacagccgaatgcagagccacggccagccccgcaccccctgccgccagcatgcccagcgctgacagcatcactttccggcctcgggaaaggccagacttcgacgacaaggccactgcctgaggtgtccgtagcgggagctgcccgggccgcgcgctgcacagcagaccccgggcacgcgcgcccgggagccccgcgccccgcgggcccaacactaccccgcgaagcgaagccgcagctgccgccatcttggcctcctccgcgcgccgcccctcgtgccgattaacacccagcctcgatncgctagcgcgtaatgtgcggtttt

SEQ ID NO: 162153 - DNA, 574 bp, Homo Sapiens
cctcccagcacctttctccccaacagggtgagtggttgttgctcttcaacagtatcctcccctttccggatctgctgagccggacagcagtgctggactgcacagccccggggctccacattgctgtacgcacagagatggtgaggcatagacaaccaggacactctacactctattctttattctggcctggggcacaagagcaaagagatgggccagtgactcagtctctgtctctagatatgcaagttcctggtacagctcagcatggatttcagctcctactacaaccgggtacacatcctgggggtgagcacacagcaaaacggggtgggacgtgcagagaggtatagggtaaaggcaaaggaagcagaggatgagaccagcaggccctttctctttcaggagcctcgaccacacctctttggtcagatgttcgtccgcctgcagcttctgagagctgtgcgtgaggtgctccatactggcctggctatgctgggtctccctccactgagccacatttaaggccacagaggctccaatacctgggaatgttcacaaagtcatcaactgg

SEQ ID NO: 162154 - DNA, 465 bp, Homo Sapiens
tttctagtggaatttgtttttatgtattttagctgatgtaattttcacactgagagagttactgagaccccagaagggttggtgtctgaggacttagctttcaaaattttgtgtgtggtgcgggggggcagacttgtcttatggtccttggtacctttttgctcccttccttttgtctagacacagtctcccgttgagagtcctaccgaaccaccagcagttcgagcctctgaagagcgtctaagcaatggggatatatatttactggagaatgggctcaacctcttcctctgggtgggagcaagcgtccaacagggtgttgtccagagccttttcagcgtctcctccctcagtcagatcaccagtggtttggtgagggcagggagtcaaggagaaatatgggtggtgagtatactttgtgaaacaattgggagccaatatagttagtgtgctagtaccctcaaa

SEQ ID NO: 162155 - DNA, 331 bp, Homo Sapiens
aactgagttgaattgagattgatgtgttttcactggatttttatctctctcaacttcctgcacttaacaatatgaaatagaaacttttgtctttactgagatgaggatatgtttgagatgcacagttggataatgtgggaaaatgacatctaagctttacctggtcaccatgtgatgtgatcagatgcttgaaatttaacacttttcacttggttcttatactgaatgccgactctgctctgtgttagagatatgaaatggtgtttgatactgtttgagacattatggagagatttaattatttgtaataaaagatttgctgcagtctgaa

SEQ ID NO: 162156 - DNA, 858 bp, Homo Sapiens
  misc_feature (149)..(149): n is a, c, g, or t
ttaaattgccaggagtctgcggtcaaatgtttcctcaatttgaaatccggaataaggtcaggtacttgtcaaaccacttttcctcaaatgagacacacttcgtgttccaaaagatgttgataaccttttctttcatctgtccccccatntaagtttctccagcctgaaataaagcctgagcatcttgttcaacttgagcttcatcaattccagcatcagggtctctgttagcctgaaggagaaccaccaacatccgctggtagtaccctgaagtgtcccccacccacgtcatcttccaggcttgagccatattcttcttcataaacttgtttgatggctctcagttcttcaggtgtccttgaagcaataatttctgtcagtactttttcatttgttccagctcccttcaaggcatgtttcagttcataagcatcataaagccgagagggtttcatcagagccacaattaatttttcaaattttccagttagttctgatttcaggtcatccagaagatccctgccaaacagagtcttaaaagctgcagagatttcctggcgctgagcattacttcgggatgtcaacagagtcaggatgctctcctcatctgtgcccaagcctttcatagccttccgaagagtttctgcatcagcccgctcatcaaatccagggaagtcagtcacagtgcctctgagaacctgtgccatggcgactactcaggtcaggggaaggtgaagcaggaccagactgtgggacccaagtgccccgaacccccgggagagcggcggagagccgggcgacggtacgcggggcgacgccgagatgcagacgctgaaggatccggcagctgcacctccc

SEQ ID NO: 162157 - DNA, 113 bp, Homo Sapiens
ctcttgtcggatttcttcttctccttcttgctctttgggttgctttgatctccaccttcaaccgtccccatccccttctgtcgtcttctcgcagccgtatagtagtagtaggc

SEQ ID NO: 162158 - DNA, 813 bp, Homo Sapiens
ggggtggaagccctgttcccttccaccttcccattggaaattgtttgggggcaataaaccttcccttattcttagttcagtgagtagaggggagtgccctccctccccaggaagtccccattttggttgcaatggcccaggtcctgaccatcccactcggtacttccttgctccatcttccccacccatgtaaacagagttttgggctgagtttgatagtaaatgccacacatatctgcaaggctgaggaagcttccccgcctttctcctcaaccaccatagagacgggacatggcacagaccacgatgagggcacctgtttttgccctgcctccccaggaggcttggggctgccccacccaatggcacatacacagatttttggcagtgttgtgggactggggaggagagaaaccccagctccaccagaacaaggaaggcactggggagtacaggggaggagaaggaggtgggaaacaggatcctccctccccgccgccacacacacacaagcacaggttttcgttgctaaggcactgagaacaaatccagagaactcagtgaagggtgggggctctgtatccttcccagagttgtgacctaggggagtaggtctgattcccgccctgttggaagaggcagccttggttaagaatggcagaaaacctggagatggaagaagcccaattgtgcttaagaagttggggacagaggacgagattgggaactggtcaagcccagaggcgggcactggtcagcccaggctgaagggacactagggagagacagtcatgctgactcacagaccatctg

SEQ ID NO: 162159 - DNA, 1260 bp, Homo Sapiens
  misc_feature (128)..(128): n is a, c, g, or t
  misc_feature (357)..(357): n is a, c, g, or t
cctcacctcttcagccgaactgcagattcgctggacacagcggaggtccttgcgcgcagccgctgtccgcggtcgtggggtatgtgcgcgcgcgccgcgtcatcgttaggtataggtcgctgtgaaantgcgcgcccttcggcgagtcctttgctacgcggtgcggtgtgaaaaagtacggagaggtgggggggagagaatggttggcgatcgggatgcttcgtgaccaaccgccacggagggaggaggggggagggaaacggagggtatcgtagggctggtcggcttctgagctagttaaaatttggcgatagggggacctcacgcgggagaggggcagtttttcctccttggttnggattcgcagcgcggtcacttgccccgcaacggccgggaccaggccgtcccgggtggcccgcggtcggcctccgccagccccctgacgccgtgcagcgtcacccgaagcgtgcaccgctgcgcccccgccggtgagcgcggggagcgccgcaagcccaacgccgggggcagccccgctccggtgcgccgccggccggaggcctcgccggtgcagaaaaaggagaagaaggacaaggagcgggaaaacgagaaggagaagagtgccctagcccgggagcgcagcctcaagaagcgccagtcgctgcccgcctccccacgtgcccgcctctccgccagcaccgcctctgagctcagccccaaatccaaggccaggccatcctctccctccacatcctggcacaggcctgcctccccctgccccagcccagggccaggccacactctgcctccaaagccaccgtccccccgaggcaccactgcatcccccaaggggcgggttcggaggaaggaggaggcaaaggagagccccagcgccgcagggcccgaggacaagagccagagcaagcgcagggccagtaacgaggagtcagcagccccagcctcaccggcaccttcgccggcgccctcgcccaccccagccccgccccagaaggagcaggggctgggggtgaggtcaagacagcagcgtctgtaggggtctccgcggggggctgctccttctggggcggggctggggtgggcgagggcgccggcgaaggtgccggtgaggctggggctgctgactccttctcgttactggccctgcgcttgctctggctcttgtcctcgggccctgcggcgctggggctctcttttgcctcctcccctcgtgccgaattcggcgcgccgtcgacttcatactct

SEQ ID NO: 162160 - DNA, 1085 bp, Homo Sapiens
  misc_feature (238)..(238): n is a, c, g, or t
tattgtgcagggcaattttggagggggttccaaaaccccaacagggaggttaccatgcctaaattcctggaagtggatccatttagggtaaggaataaaatgtcagggaatctcttaatgggtatcaagattggtcaaggatttaaagataaaatgggaaagccaaaattaccaagaaataaattctattttgaattttatcacaaaaggttacagtcctagtaaaagacaacagganctgtataggaatatctgcatttacatcaaaaaaagggaaggttttatcaactagaatagagagctgtccaactggtgaatacagaaatttctcagaatctcttggaaaacagatccattcagactcccaatctcctcactgaagtaaaacaccaaaggtgtttaaatgaaggggaatggatgttagttgtaaaaataaaatcagattatttccattatggtcaattcatatactgcatgaactgtctaccatgaaaactttatgtcccaaatttctcaagatgttaaactatgctctttccacaaacatacaatggggttaaagcatgttgctgggtcgtcctttttactagctagcttttgtccatttacccatttccatttcatttgactaacttccctgataaagtggtatctgtgtttctacagagaaaaataattctgtcttcatcaaaatcacaatagacatgccttcctagaacatttagagggatggccaggtgtaatcactggtttaataaaaacaggagaatatccaaaatgaaaatatttgagtttcaaaatgaattttcatcactgtattctgaagaatgtagttctttcctcttgttagccctccacctcgcaccactcagtccaccattcactggaaagaacaacctcactgctcttgaatcttttttatactttaagctatgaggcaggttcagaatcaccagaatgaatcccagttgccactatttaaacccacgcgtccgcccacgcgtcccgaggcgtggtcgacgatatcccgggaattccggaccggtaccaccgctttttgtacaactggtttatattcacatagc

SEQ ID NO: 162161 - DNA, 374 bp, Homo Sapiens
ttttttttatatgtattgatattttatcattattactttactatatattactgaatacaccagactgcattttctcaaatggcaaatgaggcacatttctctttactactaagcaccgttggtatcctcatggacggtatcacagatgtcgtaagaatctgaatcctccaaaagacagatgatgcggaggttcctgggggaatcaaagagaaatgtgcctcatttgccatttgagaaaatgcagtctggtgtattcagtaatatatagtaaagtaataatgataaaatagaaatgtgcctcatttgccatttgagaaaatgcagtctggtgtattcagtaatatatagtaaagtaataatgataaaatatcttt

SEQ ID NO: 162162 - DNA, 159 bp, Homo Sapiens
actaaaatacaaaaaagggagacaggtatatttacaaaaatccatggctggtacagtacataatttttaagacacactaaatgctacaatctttcaggtcctgagattattacaaacatcaactcaaagcttgtgttcaggtccagtttttaaaggagg

SEQ ID NO: 162163 - DNA, 355 bp, Homo Sapiens
gacgctctctctgtggggtgaattctttgccaaagtgatgggccagcacacagaccagcacgttgcccaggagcctgaagttctcaggatccacgtgcagcttgtcacagtgcagctcactcagtgtggcaaaggtgcccttgaggttgtccaggtgagccaggccatcactaaaggcaccgagcactttcttgccatgagccttcaccttagggttgcccataacagcatcaggagtggacagatccccaaaggactcaaagaacctctgggtccaagggtagaccaccagcagcctgcccagggcctcaccaccaacttcatccacgttcaccttgccccacagagagagcgt

SEQ ID NO: 162164 - DNA, 775 bp, Homo Sapiens
  misc_feature (170)..(172): n is a, c, g, or t
  misc_feature (174)..(175): n is a, c, g, or t
  misc_feature (177)..(186): n is a, c, g, or t
  misc_feature (188)..(188): n is a, c, g, or t
  misc_feature (190)..(190): n is a, c, g, or t
  misc_feature (192)..(195): n is a, c, g, or t
attggggtggggaatttcccaaccccttagttccttggcccaggtttttccttgggaaaccaagtttatggccccatgtttccctttaccttactggggccccgcgcgcccaaaacgaaagggtctagaaaagctttttcggagggcccgagggcggcccgacatgtttnnntnntnnnnnnnnnntngntnnnntagtatcacaccagaagtttattatggaacaatcacatatgttgactctcctttgaccctcaccgcagtgcactttcattacttatcaatctgggggcgggaaaaaggggtgcagccagacaagagaatatacaggaaagaagcattgtatataagcctatgtatttcagtaatgctgctacagggggatacaaaatcagtctcatttggcccctcggcgcttcctgaagtagcgattataggcagcattgtatccataaaccatggcgtagcgttcgcaaagtctgtagtcatcacaggcttccctattgagctcgtggacaggcttagagcgttctcggatcctctcttggactttagctctccatctctgctgaggggatatgaaggtatttgcatttctcctgttaatgaagggattaagttcataagattccatgctttcatgtgattcataacacaaagttactaccgctaaggcggccaggatggcaagaaggatcaggctcttcatggtttcgtcctgcaggtcagtctcagggtcttgtgtagcagcagtagggagagaggctcctatccc

SEQ ID NO: 162165 - DNA, 686 bp, Homo Sapiens
  misc_feature (447)..(488): n is a, c, g, or t
  misc_feature (492)..(521): n is a, c, g, or t
  misc_feature (631)..(631): n is a, c, g, or t
ttttttcacgttgcacggtgtttctttaatggaaagacagccaccgacctcagaagcagcccctccttgcgctggaccagaaggataaggggagacctagccaccagtgggccagtgggggtgaggggcttctaggaaaaccggtgtctgggactctggcggttgatggtgtcatctgcgcgggatgctgggcctccacctcccaacctcctccgggacagtacaggtttgggggcaaggcctgagcagggcaggctggggagaccgctgtccctggggttttgtgggcaggggctgggtgcaggccggacagacagaaagcagtcccagctcaaggcagaaggccagagggtgtggagtgaaagggacaggcgaagccaggttcggagagatggagggaacaggccaccaagctcagaagcgagaaaggtctgaggaagcacaagnnnnnnnnnnnnnnnnnnnnnnnnnnnnnnnnnnnnnnnnnngaannnnnnnnnnnnnnnnnnnnnnnnnnnnnngaaggacggggaaagagagaacagaagggaggactggtcgaagggccagtggagcaggggtctgggagggacaggccatgaacttgcaagggggctgaggggagccgcanagtcggggagggttgaaaggctggaaatgcatgaggacgaggaacacgacatgtg

SEQ ID NO: 162166 - DNA, 1379 bp, Homo Sapiens
  misc_feature (90)..(121): n is a, c, g, or t
attctaaaggggaaggcccctttttattaaacttgtacattttactttccttctttcaaaatgctaataaaaaacttttgtttatacttnnnnnnnnnnnnnnnnnnnnnnnnnnnnnnnncgattccaacatcacttttgtgatgaaaaaagaggcaatggaattcaacataagcaaagaaaactctacctggaggaaaaaaatcgatcagcgaggaaacaactcggggctgctgccagactgcaggccatgcgaggaggagccttctataggatttccaaagcaaacccatccctgccagaccaggaagcagccgtcctacctcccagagaaacagacctcagccctaatgatcactcaaatccgagtcaatccctctatttaaaaaaagctcacacatagtctcccctcccttccccagtcctcttggcgacagggcggtcacaggacatatgtgttcttcaccagctgctccttgtcatctccggagctccagacggtgcgcagggcacgctccttgttcctccgtgccaaccggatcagtagaccatggaggctcccaggaagaggatcaacaaccatcacgaacagccccgccagaaccaccacctttgagccaaggggcaggggaggattctcctgctggcggaagcagcggagcatgcaggcctcctcagagcggtagctgttcttattgccccggcagcctccatagatgaagttattgcaggagttcctctccacgtcaaagtaccagcgtgggaaggatgcacggcaaggcccagtgactgcgttggcggtgcagtattcttcatagttgaacatatcgctggagtggtcttcagaatcctgccttctgggagcacttgggacagaggaatccgctgcattcctgctggtggccaggtcacccgtggcattctcgtggatgctgcgttctcggtcggccgccaggaccccagagaggagcagcgatcccagcagggcgagaaacgcccggctccgcctcagcccgcacagctgcgccatggccagctcagccgagacgcgcaggcgacgccaccagccgttggggtctcgcgatcaggtgcgggaagcccctcaacgcgcacgcgcaatggagcgcctcgcgttcaggtgccgacgctccgggagggtccgccaggtgccaaagcccccggaagtcgcctttccggaccttcagtgtggggacgcccggccttctcggcgcgcgatgcctgggtctgctcctcactcgcgccctcgccgcctgcgacactcaacggccctcagcgcgttcagagccgcgctacacctcccaacgcgcggcctcgtgccgaattccacacccagctctcgctaccttagaccgtatagt

SEQ ID NO: 162167 - DNA, 1228 bp, Homo Sapiens
gctggtgagcgcccgctggaggctggagcttccgggccctggaaaggggtccccgcgcgccccgggtcggaggcagacccctgggtttgggggacatgggcatttggggcgcctgaacccaagacctctggatggtagggatgcccgggcgtcctggataccctgcgggactcggggctcctgcggggaagatggcacgttttactgcccaaggagtggtcaggggggtggagaagcgctgcggataccctcaggaggtctgcgacagagggggctagctgcgcagcccaggagtggtagtggcccccctggatgacaggcctggccgtatcctcccccagagctgccccgttcagaccatggatcctgaggtgaccttgctgctgcagtgccctggcgggggcctgccccaggagcagatacaggccgagctgagccccgcccatgaccgtcgcccactgccaggtggggacgaggccatcactgccatctgggagacccggctaaaggcccaaccctggctcttcgacgcccccaagttccgcctgcactcagccaccctggccgcctattggctctcggggtgccacagctgctcctgcgcctggtgccttacttcctaccgagacttcctgggcaccaactggtccagctcagctgccctggctgcgacagcagggtgccacccgactggggtgacacgcaggcctatctggcggacccactgggggtgggcgctgcactagccacagccgatgacttccttgtcttcctgcgccgctcccggcaggtggctgaggcccctgggctggtggacgtacctggtgggcaccctgagcctcaggtgaacctgccgcatgctcaccctgagccagccctgctgttgggcatcgcccgaaatgagaccagtgctggccgagccagtgccgagttctatgtccagtgcagcctgacttctgagcaggtgaggaagcactacctgagtgggggacccgaggcccacgagtctacaggaatcttctttgtggagacacagaacgtgcggagattgcccgagacggagatgtgggctgaactctgcccctcggcaaaggcgcatcatctctacaacgggtcagggcaagtcccactggcagcggcctaggtcccagcctaatccgcggtcttgaaataataacgattttcttggaaaaaacaaaacccgggtcattctggcggacaaggttcg

SEQ ID NO: 162168 - DNA, 854 bp, Homo Sapiens
aagaaaaaggtatgacttcttgttttctgttcttggcataaattttaattctttccagtggaaccaaaacctcctgaacccctttcggtgtcatccaaggcttgaacttcttctatttctggataaaaaatccgttcgcaaatgagctgtgcaattcgatcaccttttttgacttcaaataaagaatccgtttgttactgacgttagtgacacattcgatcaccttttttgtcttcaaacttttctttgccaaaattaagcagtgcaacaccaacatttcctctataatcttcatctatgacaccagctcctacatcaataaagtgttttgcagccaagcctgaccgtggagccactcttccataacacccagaagggagcgctatctgaatgtccgttttcacaacagctttctccataggtggtattgtgtaatcataggcactgtacaggtcgtagcccgcggcgcgcgcggagccccgggtgggggccgtggcgtgctcggagagccgggcaaagcggagctgcatgccgcccacctccgcaggccgggcccgcttactgggtgaaatggcgggtgtcttggctccgcggcagccttggctcaggcggccagcgctggacagcggccggggaatcccgtgctgcgcggcgcggccgaggggcgggcctggcccggagagtaccgcggcttcggccctctgccgtgcgcctcgcgcgttttgcatcgctgagcgaagcagagacgtaaggaaatggtagcagagcgcggggcgagggcagaggggagtcatttcccccagagtttgggctggttgggtcctcggcacctccggacgtgcgccaggcttcca

SEQ ID NO: 162169 - DNA, 890 bp, Homo Sapiens
gactttaaaagatgtccttttattgaaattacagccaggggaagtttttgaaaatgacaagttgatttgttttctttatgctttcaggataaaattgggaaaatgccttttagtatcaaagtcttcagtctacatgacatccctgatcatcatgttttctcatgtctttcgtttagcatatgctacttcgtaaatcctctcctcatcccagttttcttttcctgggaaacttcatttatctttcgagattcagttttgctcctatggtggaaataaaggtagtattgaaggcatcatccgaaaaacgaaaaaggacgcaggtcttccccactccggaatccccgatcaggagcagcttgaaaagcaggtcgtacgttttcttcgccattgggaggagcggctcgggctctcgccgccggcggccccaagggatcggtccctctcactacggccaactcctcactcgggcgttctcaggccggaggaccggggaagcgtgggaaaaaggctcgagacggcgcgggcgacctacgaacagctttgaggaagccccgacagtggcggcgtccagtgcctccgagggcggcgaccgcggctccgcagcctctcccagccgctccgcccggttccggggagtcggtcgggacaaaatggcctcccctcccccctcagggcttctcggccgggacgctcccacgggcgagcaagcctgctctgccgtcgaggaggcgcagcgggcgtgaggacagtctctctcccgagcggaaactccctgctagcacgcggcgagggcagcgaagaaggacccctaagtcgacgagctcagttacatagccccaggaaaccgagccaccccggccagagccaccttttccccgtgccctctcacg

SEQ ID NO: 162170 - DNA, 618 bp, Homo Sapiens
gtcacgcccacaggactgctgcgtgctgggaccaggacctccatctggaatccactctcgataccctgcaccagcttggaggcagatcccaaggtggcagggtgtccctgtgccgtctgcttcctctcgggcaggaggattccagcttcccgggtgaggggagagcactgtccaggcagggctgggccaggaggcctgggctgctgaggcgggaaagcggtggctgtggagggcacgtgctgcccccacctccgtctcggggcctggcttccccactggatggcagaggccgctccaggtgcttccacttggtggcgcccatgagtctgctactggagaagctgtggtctcagggaggagacagacaccacaggccagactgggtggaggaatcttcccctcacaatgtcccctggctaaaagcatccatctagctgcaagtactatcttgattcaacccaggggccgacaatggactgcagcccagggtaagtccagcagttttgcagtcttccgatgccctgtgccatggaactgtccggccagagctcctgggctcccgtggaggttaccctgtaggcaccggggaaatgggctatggcctgtgcttcagtcagg

SEQ ID NO: 162171 - DNA, 195 bp, Homo Sapiens
acatttgcaaaacaacatttattcttttaaaaaatctatatacattgccatacaaagataccacattgaagcagttctcaggaaccttccagtgagactttctctggcacgaaatcttgctcgggcaattataagagaaggctcactggaaggttcctgagaactgcttcaacctcgtgctggtgccgaattctt

SEQ ID NO: 162172 - DNA, 395 bp, Homo Sapiens
agcgcgcgcccgccccgctctgggaggaccgcgagatgcccgtgctgaagcagctgggccccgcgcagcccaagaagcggcctgatcgcggcgccctgtccatctccgcgccgctcggcgacttccggcacacgctgtccttccacctggatctggggccctccatgctggacgcggtgctgggcgtcatggacgcggcgcgcccggaggcggctgccgccaatcccgacgcggaaccccgccccgggacgcagcccccccaggcccgctgccgccccaacgcggacctcgagctgaacgacgtcatcggcctctaggttccctcattccccgcgcccttcccgcccggcaccccacttctgtatacataaacggccaaggtgtgtgcccggaaa

SEQ ID NO: 162173 - DNA, 372 bp, Homo Sapiens
  misc_feature (40)..(41): n is a, c, g, or t
  misc_feature (54)..(54): n is a, c, g, or t
tcggtacctgcagctctctctgatggacaggcatttcagnnctttgagatcaantgtgagcgttgccattatcacctttgcctcagagcccaaagtcctcatgtctgtcctgaacgacaactcccgggatatgactgaggtgatcagcagcctggaaaatgccaactataaagatcatgaaaatggaactgggactaacacctatgcggccttaaacagtgtctatctcatgatgaacaaccaaatgcgactcctcggcatggaaacgatggcctggcaggaaatccgacatgccatcatccttctgacagatggaaagtccgatatgggtggctctcccaagacagctgttgaccacatcagagagctgaa

SEQ ID NO: 162174 - DNA, 903 bp, Homo Sapiens
  misc_feature (77)..(77): n is a, c, g, or t
gcagaaaataattttgtaaactgtcacttcgcgggcagggaggatcgatgccacgtgggccccagctcacccgggtnggaggctgggagctgaaaccgaacccaggcaggaagccatgacttggtctgctgtatctgtgtcggctgtctcgcgggacatgaagtcaatgaaggcctggaatgtcactacccccaggcggttggggtccacaatgctcatgatgcgggcaaattctgcttctccctgggggtcgttgccaatatcataacccaagctgatgaggcaggctttgaactcctcgggacccagtgtgtcggagtgatcccgttcaaagtggttgaaggaggcccggaactcattcatctgctcctggctgatgcccttggcatcccgggtcaggatctggttctctacctcattgatggtcctggcgatggtggtgagcagctgctcccagcccacacggatgtgctccatggtgtagttggtgtgcttgttgtcgaagatgagcgcctcctggatgagctggtggtcgccctccagctgatcaatctttggcttgtagttgacgatgctcttctcatactgccgcaggtggctgagctggtcctccagggtcccatgcatcttcaatggagattctcccgatctcctccatcttggtttggatccaggggctcgatgacattgggctggggtccaaattggttgcgtagcctctcattgtgctgctgtcgggcatgctcctccgtcagagcttggtccctccgaggcaccagctgccgcacctggatctcctcaatggtgtgcacaatgaaggtgtcctgcaggtcctccatggccccctccatccagttgttgaagggtgcagcccgcttggcatactccaagtacagctgtcat

SEQ ID NO: 162175 - DNA, 429 bp, Homo Sapiens
  misc_feature (188)..(196): n is a, c, g, or t
  misc_feature (347)..(382): n is a, c, g, or t
ttttccttaaaaaacagccatttcaaaagattttctttaatatcataaaatattttcatggacaagtgagctagcaaacacacatgcaccaatgtgccttttgacaagagtaccccctaccccgactcccacaccaaaatggacatgagattggagaaatgaatacagcagatggaacagatagaagnnnnnnnnntcagtaaaaaggatggaatataactttgtgcttggttattttcctatgtcgcaacaaaacaagacatttcggtgcaaatagttaatctttcctctttttttccatttgtctggtggagaaaaaatactttttctataataaaatatgtagnnnnnnnnnnnnnnnnnnnnnnnnnnnnnnnnnnnngcagaaaataattttgtaaactgtcacttcgcgggcagggaggatcc

SEQ ID NO: 162176 - DNA, 450 bp, Homo Sapiens
agttttataggcatttaatagtttaccagttggtacaataagattttttaatatgcagaaaacatgaataaattttgttttacacagtctgagagcaacaaatcttactgtaaaacacgagagcaatattatatacattcctttactgattttttaaaattgtgtcaatatcttcagtgaactcaacaatctggggaactgttttcctcaattaccacttcagcaacgttcatacgaaatcaaggcttgccttcatgtcagtgtcaggatcaactttaactcgaagagtttgtgtttgtctctaacatcttcagagtgagctttagggatgcctgaaggatggacagtacaagcaagcagctacttccatgatacagtgggaagataaaaaggcccattcagtccagccgtgacctgtaaatccagcttgccctccccccaccccactgg

SEQ ID NO: 162177 - DNA, 146 bp, Homo Sapiens
tttgtcacaattcatttttattaatagaaaataaacacttattccagtttcaaagttgttatacttgaagttgctaatttaaaaaaacgaattttaaataatcacttaataatcctgctttgactaagacaatgaaatgtggcttt

SEQ ID NO: 162178 - DNA, 582 bp, Homo Sapiens
  misc_feature (115)..(128): n is a, c, g, or t
cttctgactaggtatttattaagttctaaaaccttgaataactgctattttaaaaattcacactaaaagaaaactagaaatgttaacatcttttacagagggcagtaagtggccnnnnnnnnnnnnnnaaattataattgcctaggagaaaggtgagctaatctctttggaagtgtcatcagctggtgaacttcatcttggtctccactttatgtctttcactccatgaaaatgtcttttcaaagcagtgttatccgcccatggtgagtttaaataggcatcatcatcattttcttccaatctttgctgaatcttggcgataattttggttttttcattcttccccacgtagtctgaaagcttcttcgttcttctcagctccttggctgcccaccacagctgcgcctctgcctctttaatgacgttgagccctgcctgtgttcccgacaagtcttccttattttcaaactccatgcggatgggatcatacggtggcaaccccatggggtaaacaatcatcaccgcgcctcgaagctggtccaaggcatctttcaccatctccatggtaacacagacaccggc

SEQ ID NO: 162179 - DNA, 538 bp, Homo Sapiens
caggtctctcccgctatactttattaggaatataaaacctaatctatgtacaggacacgtcggtgtcagggtgaggggtggccaacacgtcggtgtcagggtgaggggtggccacaaggcgggccatggctgggaccggccgctctcctcggtgtggtacctggagcggagggtcaggcacaggtaggaacggggctcacaggccgagcagagccccctctggcccctactcaattccttcctgcttgtcttttatggccacccgaaagcgctactccagcagggacagctcactgatgaggtcggtgatggcgttggtaaaggcttcctgggggctgtagtccggcgtggtctgcactcggatgatgatcttgtgctccaaggggtgggggactttgtagccagcaaatagcacttgcgggtcttttgaggattgtggattaatgatgtctcccagtgtgtggccctctttgttgatggtgaataaacaggcattgggtaccttggtgtccttgtaatgggaatttctcttgccccc

SEQ ID NO: 162180 - DNA, 740 bp, Homo Sapiens
  misc_feature (56)..(73): n is a, c, g, or t
ctgcatcagtaattttaatagagactcttagtggttatcaacaactggtcagttgnnnnnnnnnnnnnnnnnnccacactgctctctggattcgaacctagtgaattctgggctcagtcctcctcctccatctctttcttgatccagtccacgtagtttagcactttggtgtagaagccatagcccctgctgcacccgatgccccaggacacgatgcccgtggccacccagcgatcagtgttcgggtcccttactgcaaaaacgcccccactatccccctggcaggcgtcctgctttagagatgggtgtccagcacagaacatgttttgagagaacacatccatcctattctttccccggagccagttctcacaggcctgtggattagctacgggcagacggacaaacctgaggtcatgagcaatcttctcctccatgaccccgaagccactgacatagcccatcaagcccaggtcgtagaaggtatcgttgtcagggaggcagatggggaggaggttgggacccagggtgacactattttccagctccagcagggcgatgtccccctcaaaattgtaggactcatcctgacggtagtccgggtggacgctgaccctgcggatggggtgatttcctagcttcatgagctcttccacatttgtgtggcccaggaacacatccaaagaggcgttgctttgcgcttcgtgttccttgggatacagggtgtgggcagctcctcg

SEQ ID NO: 162181 - DNA, 433 bp, Homo Sapiens
cagctgaaggaggccaagcacatcgctgaggattcagaccgcaaatatgaagaggtggccaggaagctggtgatcctggaaggagagctggagcgctcggaggagagggctgaggtggccgagagccgagccagacagctggaggaggaacttcgaaccatggaccaggccctcaagtccctgatggcctcagaggaggagtattccaccaaagaagataaatatgaagaggagatccaactgttggaggagaagctgaaggaggctgagacccgagcagagtttgccgagaggtctgtggcaaagttggagaaaaccatcgatgacctagaagagaccttggccagtgccaaggaggagaacgtcgagattcaccagaccttggaccagaccctgctggaactcaacaacctgtgagggccagccccacccc

SEQ ID NO: 162182 - DNA, 528 bp, Homo Sapiens
  misc_feature (157)..(157): n is a, c, g, or t
ctcgcgaacgggttaccccatcaaggccgcttatagaccccacatcagaaaggttttcattcccggtcacccccctttagcttcaaacaaatataagattgcatttgccaactgatatttttcctgtttttaaagttacaaatgggtaacttcctanaagcaatgtaggatgcaaggacctgcatatcaagctgttagacactgagttgtcaaataaataatactaacattaaataagagtggttgtattattcagtactagtcagtgcaaaacacatgagctgagtggtttgaagaacaaggctggaggtttcccgcgacagcaccggacccctggccaaggctcaactcaggggagtccccacagcctgtctaaacatttgtttaaacgctcagcaagccgagcggatggtcaccctgttggagacgctggccgcatctggcctcctccctcgagacggtgtggcctgcttgttcgccctgtctgctcagacacaggctgggttgactggggctttaggcggccgc

SEQ ID NO: 162183 - DNA, 863 bp, Homo Sapiens
ggtaagccaagtcctggcgctagctggcccgtcccatgcgcgtcactttccaggtgagttccagcaccttccttcaccatggctcccggatcccatcatggatgtagtggagtgccgtctcgcacatgaagctttgggtcgtgaccaccttgttttctctggtccacgtgagcttcgaccacgttccttcacgcagtgcttggcacccacgggccttgatggcctctgcggtcccggcataaggccacttgccaccttcctcctgctcgtggcccacagtcacctcgacgcctctgagcaccttgcccgcgaggacaggtgcaatgcagcacaagccgatgggcttcccggcctggtggaactccttcaggacacgctccacttctttattcaccttgcaatctttcccgtccacggcaaacgtgctcaggtttttagccgctccaaagcctcctggaaagatggcagcatcatggttggctgcactgaggttggccaggtctgtgattttgccacgggcgatcctcgcagactcggtcaaaacattcctgctctcgccttcggacggctgccccttggtgtggtcaatcacgtgcatctgagggacgtcaggagcaaagatctggacttcagcccctccacggctcaggtgcaccaggatcgccgaggcctcgtggatctcggtcccactcgtagactccgcatccagacagcaccagcgcgaccctggccgcggggcgcggcacggagaggtgaagggctgcgcgctgggaaggcgtccgaccgccgggggacacgggacgtgaatgcagactgccgcagcgagcctcgaggccaccagggccctcacagccgccattccg

SEQ ID NO: 162184 - DNA, 1228 bp, Homo Sapiens
ttgcaacgacgggcgcggaggaggaggttcccggaagccacgcgcagctggagcaagcggcgaccgacagctggcaggcccaggatgctgcctgcaggggactggacatgagcgccgaagggagcgtgtgcagtgcgtagtgaaaaggcgcaggaacctgacgcgactgccccactggcgatccctgctgctactcctctgtgtgggcctgtgtcccactcgtctccctgtatcgagcatgacggatgctttcaggcaatcgttgcgtgcgcccatgcgatttggcgcgcaggtctgggtgctcgcatgtggacagctacgcgctgtgttgctgagcctgcattgtcgtgcctgtgcgcctggtatggcttgatggccgcctgcttgcgagcgcgcttgggacgagccactggcagtctccagagcaggcccggggacagcaagggaggcgccgcgatgccagactgaaaatatcttccttgttcgttgcccaaacgctcaatcgacggacctgcgtggaactggtttcgcatggactactgctgcatcagcgctcttaatcaaggaacccggatttggggccgatgctggacatgctgacggaccgctgctccaccatgtgcctgttggtcaacctggccctgctgtaccctggagccacgctgttcttccaaatcagcatgagtttggatgtggccagttcactggctgcacctccacagttctgtggtccgaggcagtgagagtcacaagatgatcgacttgtccgggaatccggtgcttcggatctactacacctcgagggcctgctctgttcaccttgtgtgctgggaattgagctcttctactgccttctctagctgttccatttctctgagggacctttagttggctctgtgggactgttccggatgggcctctgggtcactgtgcccatcgccttgctgaagtcggtcatcagcgtcttccacctgatcacggccgcccgcaacatggctgccctggacgcagcagaccgcgccaagaagaagtgacgctggagccccgggtcctggctgtccctcctgccctgggagtcttgctgtgccacaacaggcatccccaacccctgctaaggaaggtcccagtctcacgcctttctctcatgtgttcgttctagcctgtctgggatggggagtcagctctctcgtttggctgaccgtcacgttctctgagagatcctggagcg

SEQ ID NO: 162185 - DNA, 1008 bp, Homo Sapiens
  misc_feature (237)..(237): n is a, c, g, or t
agtcgaaacatcgagtagacttctgtaaatttatattgtcacgtttctctttctttcacccctttcttaacataagacggtttagaataaccacctataggacccgcgattcccgtgccaaaacgggcggaaccatagacccagcccattcataccctttcccccacccgaataagcccgaagttttttgtttgtgtttgttccatgagaccaggacttttaattacttagaacacnaactgaaaatgagagccagtagttaagctacaagaaagcaccagatgccttctgggatgagttgccttccttgccttccacaacagcagccagactggacctctggacaacatgataagtgtgacaatcacacttcctagagtaggaccaagggtaggaggccaaccaggctcaagcttacaagccccaagtaatcgtccatcagggagccatatagcaaaaatgtcattcttgtcacacacgggtccccacaatctttaagcggatctcatcgtcctgctgaatcacaatatcctcatccattgtcttgtaacatggtgggttggagttaggatcaaactccatctctgaagggatggaatgtcgagagatgaagcaagacatgggcccaatttctgtgaagagtccaaccttgttgacctgagtgacaacagcatccacgacctcccctttaaatggccggaaaacaatggccttgtacttaactggataaaggacaaagcctcggcctggctggatcacaccagcaccaatattgtcaatggtggtgacagcaattacaaagccatacttccctgtgcaggtcccctccacctcggtgaagagcttctgcttcaccgtgttgagcaagttggggccgaagtagcgcgggtgcagcaggatttcgtgctctagggagatatggtagaacatcttcccagaccaggtaggcaggcagagtccaccctcgtgccgaattcgacaacccaggcctcgtacctgcctagtttg

SEQ ID NO: 162186 - DNA, 679 bp, Homo Sapiens
  misc_feature (200)..(245): n is a, c, g, or t
ttttttggacttctaaacggcacatgccgaggagtgtctggtggccggcgacgaggtgggatcaccaatcacaggaccgatgccatccagataagaagcctggcagacaggcgggcaaacagtgagcgcccacccagaccggctgctgactgggcttatgccagggtggcgattccgctccacagtctcggacggatctnnnnnnnnnnnnnnnnnnnnnnnnnnnnnnnnnnnnnnnnnnnnnnttgtgaccctcccttttaggtgaagcccctttttcttgctaaaaccggcaattctccggttagaaatgttacttggtgttttttggttttgtgaaacggccgtcccaaagctggctggattcctagaagagtctgtgttgaaggcatctttcaagccctcgctctggttctcagggcagcattttccaggcgggtttgttttgcatttcttggagcctctccgagcagcaaccagacgggagatttttattttaagctgttcatgctgggactgacagcctgcagggtttccttgggcgcggccccaaaattgccttcaaaacaaacccgggacggttgaaagccttcgaaccgtgcaggggatgcctcgggccctggcccttcgcttcctctcttgtgttatggaaataaaaacaaataaaactacacactgc

SEQ ID NO: 162187 - DNA, 1127 bp, Homo Sapiens
tccgcatacggtcctaggtagcgaggcctgggtggcgaattcggcacgagggcccggtccccgccggcaccatgcttcccttgtcactgctgaagacggctcagaatcaccccatgttggtggagctgaaaaatggggagacgtacaatggacacctggtgagctgcgacaactggatgaacattaacctgcgagaagtcatctgcacgtccagggacggggacaagttctggcggatgcccgagtgctacatccgcggcagcaccatcaagtacctgcgcatccccgacgagatcatcgacatggtcaaggaggaggtggtggccaagggccgcggccgcggaggcctgcagcagcagaagcagcagaaaggccgcggcatgggcggcgctggccgaggtgtgtttggtggccggggccgaggtgggatcccgggcacaggcagaggccagccagagaagaagcctggcagacaggcgggcaaacagtgagcgcccacccagaccggctggtgcggcccctcctgccagggtggcgattccgctccacagtctcggacggatctgctcagaaaggaagagggcaggcgccagggggaacccccttcgtgttttgtgaccctcccttttaggtgaagcccctttttcttggtaaaaccggcaattctccgggttagaaaggtacttggtgggtgattgcggttgtccaacgccacgatgcccaagttgatttccaaatccccacaaagagacctgtggcgtcaggcgctccttcccgggcccctgcccccgccacgcgcccgacgccctcccgcgttcttcccggccatggtgtgtggcgctgccgcccccccggcgcgcggcctattcgtgttgtaacggacccctcacgggacgccgggtttgtctcgtggcaatgggcacgcaccaaacgccgcgcggacttcaccctcctctccacctagaacaggggttgacaagcggccgccgctggggagtaaccaagggtttgcaccaacggcgcgccgaccccggtaccgcacatcctaacacaacaaaacctacccaacacgaaacaggacgcgcccatgcaacatcgccggacctcccaaaccgacataacaacgg

SEQ ID NO: 162188 - DNA, 656 bp, Homo Sapiens
  misc_feature (106)..(159): n is a, c, g, or t
tttccaaaatatatttgcaaatggacaaagtgggtgtggagaaggacccccacacttgcctccccatacaacacccatttctcccctgggtctttatttcatcctnnnnnnnnnnnnnnnnnnnnnnnnnnnnnnnnnnnnnnnnnnnnnnnnnnnnnngcctggatactgacaccattgctgttcctttctcatggggggcagtactaggtttcagggacagtctctgaatgggtcgcttttgttcttagacactcccttagggccgcttccccctctcaggccaagcttccctaaaggctttcagtaccccaggatcttggaaggaaagggccaagctgggctgtggcatccactggaccctagagtctcattgggcagggcctcagaatccacaaagactccccagtgctgttcctcttccaacgaggctggaccccttccagccatctgggaactcaagcaggaaggaaggttccttaggacaggttcctggcatggcaggttcccctggaagtggtcggagggccctttccagagtggaccagcaggtcgggcagcaggcagagggccctctcggggcgaagggggctggggccgaacatctggctggttcacatattcaggctgggggctgcaggtcaggggggcaacgt

SEQ ID NO: 162189 - DNA, 604 bp, Homo Sapiens
  misc_feature (114)..(152): n is a, c, g, or t
  misc_feature (485)..(485): n is a, c, g, or t
agctgttttccaaaatatatttgcaaatggacaaagtgggtgtggagaaggaccccccacacttgcctccccatacaacacccattctccccctgggtctttatttcatctttnnnnnnnnnnnnnnnnnnnnnnnnnnnnnnnnnnnnnnngcactctgtacaaagcctggatactgacaccattgctgttccttcctcatggggggcagtactaggtttcagggacagtctctgaatgggtcgcttttgttcttagacactcccttagggccgcttcccctctcaggccagcttccctaaggctttcagtacccaggatctggaaggaaagggccaagctgggctgtggcatccactggaccctagagtctcattgggcagggcctcagaatccacaaagactccccagtgctgttcctcttccaacgaggctggaccccttccagccatctggaaactcaagcaggaaggaaggttccttangacaggttcctggcatggcaggttcccctggaagtggtcggagggccctcccacctcttgatgccagcagaagtcaggccttccctgctccctgaggacacatcagggcttctgcggac

SEQ ID NO: 162190 - DNA, 871 bp, Homo Sapiens
  misc_feature (579)..(607): n is a, c, g, or t
tatgcccggctcttcattccatgtgcccctacctcccatgatactacagatccagcgagagttaattcattaaaagaagaggcctagactctttattcacaaaattactataatcttcctcgcaccaaacacttttgcagacaatgattatgctctgacaaaagctatcttacaacagtgcccagagagtaaacatcagtctttatcctgagtacacaaaggaatgtatgaaatgtgggttttgttgctgaggataacagggtattgcaatgcagtagtgatcctacacatccttccttgtctgattcactgaaatcactccagtgggggagggatgcaggacatgtgggaaaacgaggagcaggcagggcaggactgtcagcaaatcagattactaatgtgatttgactgcaggggttggcgtgttttaggagggacaggaggttacaaaagacagtttgtgacctgaaggcttcaacaatataattctattcaagcttccaggactgacagaggaaaaactggattcagacagagaaagctgataaaaatcttacctagctattgttccttcctttnnnnnnnnnnnnnnnnnnnnnnnnnnnnngtggcagccgtttctgaccagcactctcatgatgcctattcagaatctgtcctgatgacgtcctacttgagagcacatcccacagtcagatgtccaccagtctcttggcggggcctcctcaccgcacgcaggccagactcacactgcatcttaaactgttcctatctcaaagtcactatctcctcccgacgcgtgggtcgacgatatcccggggaattccggaccgtaccagccgctttttgtacacggttcatatttactagg

SEQ ID NO: 162191 - DNA, 498 bp, Homo Sapiens
cagcctgctgtcctccctgattgcctgcatgtgttgcattggtagcagcatgctgagggccaattttaatgccatttgcctcattattaatgtcaaagactccttcttgaattttttcataaatttcttttgctgtattaataaatgccttttatttccaataagcataatgaccatgttggaattggaatgctggcgggcatcttctaaccaggttgtcaagtggttgaatgtatctctccgtgtaatatcgtaaactagtaaagctcctgctgcacctctgtaatacgaccttgtgatggaacgaaaggattcttgccctgccgtatcccatatctgaagttttatctgtttcccatcaatagttatcattcgagcaccgaactctacaccaatagtaaggtcatgcactggctgaaacctcttgtctgtaaactgtagcaataagcatgatttaccaacacctgtgtcgccgattatgatgtacttgaagagata

SEQ ID NO: 162192 - DNA, 1004 bp, Homo Sapiens
tatgcgtccttaagggggaacgcttattcccgaaaaccggtttttttccaacttatattaacacaacaaaaggtatccaaatcctccagttcagctggagctttctttcaacccgtccgggttaacctccttgcttgcctggacaggaagccctccatctcccggccctttccccactgccgctcacccacagaacttctcgtggttctcgacactcccagggatcccagccccagagcgtctgccctcaccactgccccacatggaactccgtctgcgcctggatcgtctctgtctgcatgtaactcatgccacctcctaggagggccccgcagtgttcttcacagcgcatctgacatgctcttgtctgccatgtttacctggttgtcgtatgtctccttgtgagcctgtctgtctcggtcactgctatgtccccagtgcccagcccagggccaggcacacagcagagtgcaggacctcggtattaagtgactgaactcaggttatagatgccacaggacaagaggaggtcaccagacaccaggacaaaaggaaagagacagttttctaataagcgagaagcagcggttcccagcgcagctgagagacggtccttgcagctgggagtggcagtgggggcgggcggtcccaggagctacctgtggccctgggcactggcattcatatggtcccggatgctgatggcctgtttgagcagaccctccacgctgcggaagtagacgctgctgtccaccaggttcttcacggcgctgcaggcgtactccacagtgtagatggctccctggctctgctcctcccaacgctgcatgtctgccttgtgctgggccagctcggggagggagcgacgcacatgctcctgcagccggtacagggccacggatggctcgttggccaggacgtagacgctctcagtgaacttgtccgtgactttcttcccgtgagctgcctcgtgccgattcaccaccaggcctcgtactagcgta

SEQ ID NO: 162193 - DNA, 816 bp, Homo Sapiens
  misc_feature (227)..(248): n is a, c, g, or t
  misc_feature (513)..(614): n is a, c, g, or t
ggagcagtattcacattttttatttcgaggtgtaaaatatacgtggccaacattgttactttcatccacagatggaatagctgggaagtataaaaacctgtacatgacctttagtgaagattatttgtcatcaaattacccatatccaagtttccatgggcctggaatttcctttccacttgatagaagtatatattaggaagtccagttaatagtatttttatttnnnnnnnnnnnnnnnnnnnnnngaatcagcagagtcaagttgtcttagtcttaaggctttctggatttcttccttggaggaggtcaggatcttcccaaggcctgggtcctcgaatattcttccagtcatcaaacttggagtctttgattttctcatattccgactctaaagatattttattctctttcagttttttttcaagctcaggatccattttactcttcacagcatcatatcggatttgagaaaactcacgaagaccaaaagaacctccaacaatcagcaannnnnnnnnnnnnnnnnnnnnnnnnnnnnnnnnnnnnnnnnnnnnnnnnnnnnnnnnnnnnnnnnnnnnnnnnnnnnnnnnnnnnnnnnnnnnnnnnnnnnntgacagagtgagactcaacatggggactccatagccgagagtcttgttcttgcgaaaagcacgcatcaccgcgggtgcaaacatgagtgaactcttccatcggctcagaactccaagcgggcctagcgcagactcccaaatctcagcagctcacgctctcaccaagacgagtacgtccttaactcacttccttttccttccc

SEQ ID NO: 162194 - DNA, 229 bp, Homo Sapiens
ttttttttaaagtcagatgagtgtttattgtttgccaggctttttgcatacattagtccatttaattctcagaaacgaccttcatatgaaacaggtactgattttattcctattttataatgagagaaccgagttactgagaggttaaacatctcacatttcttatccactatgttatgctgactcttataaaatgattgtggaaggtgtgttaatacatttcaactgg

SEQ ID NO: 162195 - DNA, 565 bp, Homo Sapiens
ttttttgttttggcatatagaaacaatttattgccgggggcaataggggtaagagaagccagaaatttttgcagccagcacccaccccagtcctgctgccgtcttggcactgcagtgggcagtgtctggtcaccacttccccctcttgctccagtccttgggagtgaagtgcagacacttggagtcgatccgcaggagccgcttgagcatggcccgctcatggccatccacgatgtcctctgacagtgtgaggatgtactggcccttgtagtagttgatgagattgaggtactgcagagtggagatgacatcctccttcttgatgctggtgatttcactaatctcattgatggtgatctgtggcctctccccgctctccgacttcagccccatcaggatctccaggatggtctgggaccagtagcttcgataggataggaggccaaggtttgagaggggcttcttaagggtccttgttttcctttccctttttggagagttcatagctgaactcatcaacaactttccgtaaccccgggcctttgtaggggggcagttttaggag

SEQ ID NO: 162196 - DNA, 278 bp, Homo Sapiens
tagtttagtcacacaattttaattgtgaattatagtgaatggtaaacagtaaaagagtaattacatgaaaagctccatattttgcatgtttcaactgttcttcattgtctttacttgtaaggtgttgaaggtgggatccactcctgaatcttctttcttcgcatcatttgtcctgaaaaaaacccgtagatagcctcggagaccgccgtggccggtgatctgctgcagcccgcgtttcaggacctgcactaactccatcttgcctcgctggccccccc

SEQ ID NO: 162197 - DNA, 1365 bp, Homo Sapiens
  misc_feature (165)..(227): n is a, c, g, or t
ggcgttagttctctctttatatagactctggttctagaaactcgcctgcagccgctggctggaccagcacacgctgacggggccggactatttacaggcccattgcgggctgtaccttggccacctcccggcacggtgctcagctgtgacgccaaaataagttannnnnnnnnnnnnnnnnnnnnnnnnnnnnnnnnnnnnnnnnnnnnnnnnnnnnnnnnnnnnnncctcaatactgtcgagggccggggctgtaaacatggccggggcggccctgcccacccctagtggtcggtaacgaccggaagcagagcagccgggcagggctgggaggctcaggcgtccgacaggcagctctggatccggtccacccactgctgggccgagggcacgtcctgggcacagaagttgtaaacgcgacgcgttgtcttcacgtcaaagaaggccttctcgtccacggtcttaggggcacccatagtgggcgtgccaggtgccacagcctccacctccgccaagtcgatgacacccttgcactctgtgtccacacggtggtcgtagtaccgcagctggtgcttggtcttgtccagcacgaaccagcgggccttccaaggcttcatgaaggccccttcttgtacagagtgccctcgtaggacctgttctcactctctgctgtctggaactggctgtagcggggatgctggtgctgctggcgggcagcctgacgggagccggatgtggttgagccactactctggtcgctgtccaggctgaggctcaggatggagcccacgggcccctcctgcaggtacacacccagcgagcgacggtggtggggtgcggtggacacaaggagggagctagtgggtgccacggcctgtctggccggccctcgaggcgctgtgcagccttcaccctggtcccaggtgtccttccagcgctcagcgggttggcccaactctgtctccagcctctgcagctcctccagcaggcgtgagatggcgtcaggctgggcccgctgggcagctgtcgtaacagtggccacaccacgcggcgcctgctctggggagcgcctccatcagaccgttcttcctctgggggttcagggggcccctgggccatgttcccagtcatagggagggccctcggccagcgtctcctcagtgtagaagtcccacaccttcaggttggacacgttgctgtagggccgcaggacctctgcgtcctcgggcgcatacatgtaacttgtggaacacaggcgtcctcttgctcagccggtccacatactcccacacagacctgcacggcaccttggcccctgcgttcccccttctcctcatacagcagccccagctcaatgcgctcata

SEQ ID NO: 162198 - DNA, 422 bp, Homo Sapiens
  misc_feature (123)..(123): n is a, c, g, or t
ggcaggccaaaacccttgtttatttcagcatcagccagtatcttagccatcaaaaaaataaactctaccaagggtgacggaagtctctacagcaaggctaagggctctccagacggcgaacantcaggggtgcattgtgtgcactgcccaggcaataagttaggaagcagcagggctggtgtcgggtgtgggccgggcttcatttctgggcaggcatgaggtcgtcgatggcctggccctgctccagccgctgctccatctcgatgagcagcttcactccgtccaccaccatctgcaccagctccacctctgagaagcccaggcggtcctcgatgatggggtcgaagagatccttgaacacttcgtaggactcctcgtcgcccgccacgcagcccacggtcatgatgtacgggttgcccggg

SEQ ID NO: 162199 - DNA, 972 bp, Homo Sapiens
  misc_feature (19)..(19): n is a, c, g, or t
  misc_feature (895)..(911): n is a, c, g, or t
aaaacgatatcgggcgccntaagggtacaggcctggtggtgaatcggcacgaggactggtagcggcagcagctcgcgcccgcgccctcctcgtacccgtgcgcccccggagaccgatcccgccccgcggcccaggccgggcctgaacccagcgggtgccgcttctccacccgaggcttccacctccaacgagccatgttccaggctgcaggagccgcccaggccaccccctctcatgacgccaaaggcggcggcagcagcacggtgcagcgctccaagcactgtcacaccaagctcagcctgggcagctacgccgcgctgcacggggagttctactgcaaaccccacttccagcagctgtttaagagcaaaggcaactacgacgaggggtttggccgcaagcagcacaaggagctctgggcccacaaggaggtggaccccggcaccaagacggcctgaggcctctgtaaccttccaccccctctgcggaaggcctggagccggcagggggaaggtgggaaggaggtcgagctgggcttgcgtgggggccaggtgggacggggatgaggcttgctcaggcgtaggggaccagggcagggctctgctccaggactccttccttcttccttctcccgcagccggtgagggtttggaaaccaggattggggtctgcccaccaccctgcttcctgcttcgttcagcctccgtccccacctcaccccaggaccccctgggaggcccccaagcccagctcccctatctaggtgccttttctccagcaaggcagggcctgccccagtggggtttgggaccttctcgaaccaccagggtggagaagcagaagcaaaagccctcgccaggttgcagcctcaggcactggcaggggttggtggggnnnnnnnnnnnnnnnnngctcccatttgggcccatcctgttgtgaccaaccccgttttaaacatgtttcaatagatcc

SEQ ID NO: 162200 - DNA, 815 bp, Homo Sapiens
  misc_feature (217)..(217): n is a, c, g, or t
tcatgttttaggttgcatcccacttattacagggtacaacatttgtttatctaagtcttgaagagtgcccatcaagtgcatgtataccacatcatgtgaaaaagtgcatgccatatggaagtggtggtgacatttgatcagtgtgatctgatgcatgctgatgacttgtttcatttcatctcagagagaagatgggaaactaaagtcttcatagccnaaccatgcccagcgaattcactgtattctctgcatgagcaactctgcccataggattggagtaacaccaaccccatcatttgggcactgtacactaggagagaagcctgaggcaggactgggcttggtcaaggacactgcaagaccagcaattcggctggttctccctttcagcttctccattaaatccctggtaaaatgcttgctctccagcagaaccatgtaaggggggttggggccatcagtcaatacccactgtaggtcctcctctttctctactacgtggataacccctgtgtctccactaattgaagactggcagccaatctgatgagtggcgttgagcaggcgaacacagggagctgttttatttaaggggatatatatcttcctctccactgagtttcccctgcacaaacctgctagtaggacgcagaaagacagaaggcgaaggagaccccgacttcccgggtcagccccagagccaccccctgccgtagccatcttgcctctctgctgagcggaagcccccgttcggctcctgtctgttagccctcgtgccgaattcggcgcgccgtcgacttcatactctctcccct

SEQ ID NO: 162201 - DNA, 868 bp, Homo Sapiens
  misc_feature (119)..(153): n is a, c, g, or t
aggggtctggctttctctttagttctcatcacactagggctctcagtcacagagaaggcacttaaatgggaaggccacctgatgcaggccaaaaccatgttctatcttaagtaggttcnnnnnnnnnnnnnnnnnnnnnnnnnnnnnnnnnnnaataaaatctctccccagaccatcatcacttttaatcctccccttaaccgttagaccctggggagagcccaaggccttgacctccggaatcgccatgttaggaggaggggcttcagaaacagttggaaggcaggatatcctgggagctgcccccagccagcaggggatcaggcagggggctgtaggagatgggttggcacaggggaaggggacagcttggtcgggcttcctggagatccccaaaccccacagaaggtcccacctcctacagatcccccaaaggcaccggtgaaggatgggcaaggaggcactgatgagctggcgtagagaccccccacacacacttagctggtgggcctagcatatgctgggcacagaaggtgctcaagaaatgtttttttgaatgaatgaacggagcaaaggggtgtgagggacagaggacagggcctgggcagcagagaaacatggcagcatggacagagacagaaaaagggagcagcaggcatggccccccaggtcccctgagaataggggaggaggtttgaaggcactgacacggggcctggagctcacggtcctcagttcagcctgctgcccctacaccgcctggtggggctggtgggggagacgcccgcttccccatggcactgagtgtggcggcggcccatgggttttcctaacaaaggcctgggcagtcttcctgggaggaggtgtg

SEQ ID NO: 162202 - DNA, 822 bp, Homo Sapiens
  misc_feature (38)..(38): n is a, c, g, or t
  misc_feature (65)..(65): n is a, c, g, or t
cagagagaagatcaagatgaagaggacagctgaggatntggtcattgtgtacagcgagacggtgnacatacaggaagctccagttggacaagcccacgtcaagcgccgtcgccagagctgtgggagccactcttctgaggtagtcggcccagctcagcaccacacgggccctgtggctggagcactgaaccagcgccctttgtcagccacttgttgtagaaggtgatgccgatggagaagcagtagtagagaagcaccagccccagggtcaacaccgccttccacaaaaaggccacatcgagggcccacctccccattcgtggcggctgcagcaccggagctcctgagtcagcgggggcaggcacccctcttgaatacaatgtgcaggaagagccggtggagttagaccacagctttcaccaagaacgtctccaggctggaggagctctctgcagctccatgattcggaaccatcagcagagccccagggagagtcctcacctaaggggctggtggctggtgctgacccttcccatggttaattggatgcagcgctcacaggtcccaaggtctgctgctggggaaaaagggccgctctggagcctcaggcagagactgtgcttctcgtagccatgggtgcctctgaaggctgcgtgactcagggctctggaggggctgcccacaacggcacaggcagtcccagagacccacgtcgtgtctgctgtcttgtcacctcaagctattctccatgaactgccaccaaagtgacctcggccctgggagctccaggccggaatctccccaccggaagtgcgaggccgg

SEQ ID NO: 162203 - DNA, 457 bp, Homo Sapiens
  misc_feature (146)..(355): n is a, c, g, or t
tacatttttctaaagaaatatttaattggtagtcttctagaaagaaggcttttcatatagtacaaaaacatgcagtcggaagcactgagaaaactgggcaacataagagaagcatgagatgtgacatgaagcagctgatagtctannnnnnnnnnnnnnnnnnnnnnnnnnnnnnnnnnnnnnnnnnnnnnnnnnnnnnnnnnnnnnnnnnnnnnnnnnnnnnnnnnnnnnnnnnnnnnnnnnnnnnnnnnnnnnnnnnnnnnnnnnnnnnnnnnnnnnnnnnnnnnnnnnnnnnnnnnnnnnnnnnnnnnnnnnnnnnnnnnnnnnnnnnnnnnnnnnnnnnnnnnnnnnnnnncaggctctttgtagcaataagataacatgacagataacaggccctgagagaaatctaagtattttatcccaaaacaaatttctcttaagtctgataagaaac

SEQ ID NO: 162204 - DNA, 838 bp, Homo Sapiens
cgaagagatttaaagattttatgttgacagatcacagcttgatagacagcgaagcttcccccatagagaccgtgctccaactcgggcctgggcactgctcgctgctcccaggaaggggtggcgtgacaggcaggaacctgcgaagtccagagtccagggtggagcgcgccagcctcagccagagcagccacgacagccacagtgtgtgcactcgatgatgcggcccacttccagcttgcttttgggcacgcggcagatgcagttcgtcccgaagttggtgtcccgtgtctgaatgcaccgcaggcagcacaagttctcatatccttgctttttccattttgcaatcaggtttttgtctgcatagccttctttaatacaatattcatagagttctctgctgatggctttccgcttgtaaaagaggtcgaagatgtagcgggttttctggtggtggatcctgaagatgggccacagagattccactttcctctttccctcatgcggttctgtttcagcttctctcatcttttgatctaattcatccagtgttggctcaatcaactcccagccatctgggggtgctttccggcttcttttgactttaggcattttccttccacaggataatctgcaaagatcttaggatgtgctttccaagagtatagacagcagaaagatctctcgtctctgcagttgcaggcttggattcttgttcagctctaaaaaattattctgtgactttcaggtcaccttccctctctggtcctgtttcttcggaagctcctggagcttggtagccctcgtgccgaattcaacacccaggcctcgtacctagcca

SEQ ID NO: 162205 - DNA, 793 bp, Homo Sapiens
  misc_feature (221)..(273): n is a, c, g, or t
  misc_feature (349)..(373): n is a, c, g, or t
  misc_feature (751)..(751): n is a, c, g, or t
atagtcaaagtggcagcagctcatttatttagccaaaaatagatactttctcgtacaatttggttcacacatatgtacatttctctgtattatacacacacacaaaggcagacacgtttattctcactgaaactccaccccccaaaatcaaccggacaaacaaacctcacagcgaatgcggggtgccacagaagcgacttggggagggctgaggaggactnnnnnnnnnnnnnnnnnnnnnnnnnnnnnnnnnnnnnnnnnnnnnnnnnnnnntacacggacatgcttacaagttgtaactatacagagcgattttttttatacaattattacaacgattaaaaaaagnnnnnnnnnnnnnnnnnnnnnnnnnaaagaactaggatgaggagagagccgataagaccagggcggcgtccagatggttctggggcctggaagagagagacagtagtagcaaaagaggtgagattcaggagcgcagaggctgcctagggcggggagatcctacttggattggggccgatcgtcaggaaggtgtcgcaatgtaaaattatgtccagttgtagatgtgtgtgttggggtttaactgtagggtgggcacgaggcgtcaggacccgaggtctggggctggaaagaggtgggcgtcagagaaccgccacccgccccaggggcctgtgggcccagccacgcaaggcttcccctagaaggtacaagcgctgtaccctccggccgcgcctggggtgcctgngctggacctggagagctgtcgcagggccgacaggggcgactg

SEQ ID NO: 162206 - DNA, 287 bp, Homo Sapiens
aaagaactaggatgaggagagagccgataagaccagggcggcgtccagatggttctggggcctggacgagagagacagtagtagcaaaagaggtgagattcaggagcgcagaggctgcctagggcggggagatcctacttggattggggccgatcgtcaggaaggtgtcgcaatgtaaaattatgtccagttgtagatgtgtgtgttggggtttaactgtagggtgggcacgaggcgtcaggacgcgcggtctggtcttatcggctctctcctcatcctagttctgt

SEQ ID NO: 162207 - DNA, 739 bp, Homo Sapiens
ccagccttgcgcagtctcggctccccccgagaagatgtcacctttgctaactctcctgcccccatcctgcccctctgctgggagggtgtctgcttctccccgccagccctcgatcccctaaacctccttctttcagaaggctggggaagcgaggcctggggagggaagggactcacctgcccggcagatggggtcctcacctgcccgctgctgccagctacacctccgtttcccaggccctgggatcaaaaccctgcccaccagctcccctcgtctaaccagctgccacgtcctgtaaccaaaagtgaccgggatgaatgcctggctcccccttctttccagccctagctcaggcccatcgtccccagctgatgtcgccctgtctgcacgatgcctgggcgcctacatccacactcctcactggtcctcaggccccaccagccctgtcgggctagtcggggccccgactagccgggcagttccggggtgatctgggagcggagcagctcctcctgcaccagcgtcagagagggtctggacccagggcaggtaatcccaaaagcgacccagtgccagttcccagcgctggccgctctgtccgctcggtctgctggctgcagctcgggctccggctctgtctccaccgcttgctccaccttgggctggcatcctgccaggaatgtgaccagcaacgcagtccacagaaccttcatcttcctgcctgtcgggctagtcgggg

SEQ ID NO: 162208 - DNA, 974 bp, Homo Sapiens
ggtacggtcggaatttagggatatcctgctctgggcagaagggcaggacaggcgccctgagtaacggtggcctagggtcagagccaggttcagctgcgaggctgctggtggctgtggagagcttggggcttccttggtcgcacccaccacctgcctgcccactggtcagccttcagggaccctgagcaccgcctggtctctttcctgtggccagcccagaactgaagcgctgcggcatggcgcgcgcctgcctccaggccgtcaagtacctcatgttcgccttcaacctgctcttctggctgggaggctgtggcgtgctgggtgtcggcatctggctggccgccacacaggggagcttcgccacgctgtcctcttccttcccgtccctgtcggctgccaacctgctcatcatcaccggcgcctttgtcatggccatcggcttcgtgggctgcctgggtgccatcaaggagaacaagtgcctcctgctcactttcttcctgctgctgctgctggtgttcctgctggaggccaccatcgccatcctcttcttcgcctacacggacaagattgacaggtatgcccagcaagacctgaagaaaggcttgcacctgtacggcacgcagggcaacgtgggcctcaccaacgcctggagcatcatccagaccgacttccgctgctgtggccgtctccaactcacactgactggttcgaggtgtacaacgccacgcgggtacctgactcctgctgcttggagttcagtgagagctgtgggctgacgcccccgggcactggtggaaggcggcgtgtacgagacggtcgaagtgtggttcgggagacttggtgggtggggggctcttgggtgtgccgggcgtgtggcaatcctggctgccttggcatactggtttggcatggtcggggactattggggtggcgccccgccgtttgcaaagcccggttggcccccgtcttcccga

SEQ ID NO: 162209 - DNA, 414 bp, Homo Sapiens
  misc_feature (228)..(238): n is a, c, g, or t
atgtaaatatttttcaaggttttattgcaaaccaaaatcagtttatcacacacaaaaaaagttgtgtgatgggatgagggaaggattgtacgtattataaccatgttaattacagtacattaaaatggtggtttacattacaaataagcctgtaagtttaaatatactagtgttataacccaatgtacagacgttctttatacaatacatacaattatcaggaatgcnnnnnnnnnnncataaataatgcccattttacaggtgacattttaaacaatgaaaaacaccattttaatgtactgtaattaacatggttataatacgtacaatccttccctcatcccatcacacaactttttttgtgtgtgataaactgattttggtttgcaataaaaccttgaaaaatatttacat

SEQ ID NO: 162210 - DNA, 848 bp, Homo Sapiens
tgattggaaacccttgctgacctgagttgccggcagctgaatcagcatctccaggagtggggctcgcagccggtcctgggcaggctgtagtggatgtaaccattctctggggtctcttccacttgagctggatgttgaggtttcgagagttgttgatcatggcggtgtcaagcaagtcatagatggcataggtcttccgagtgcctaggatgacgtcctgatatgtagtgctcggggctgggtgcacctctaatgtctcgttgtcctggttgtaggtggtgatgtccacatagactcggctctctgaagccagggggcagggctcccgtgagggttcgggagaacatccggaagagggaccagtctttctttccctgccccgtgatgaaggcatcaaatacaactgacagggtctgcctcagctcccaggagatgctagtacagcgtgcatttctgcaaacagggcggatatgcactgcctgggagtggtagctggtgtggaacaagcgatctgccttcagcagcacagagaggcctgccttggaactacagggcaagagcttcttccagggggtgaggttttcggtgcagaccacctcccgcggcagcacagcatagcgcagaaagtagtggtcagtgtctccttcccgctgaagctccgaatcccagcgcgtgcggaactggaatgtggcggctacgtccccggaaggcagcggggtgatgacaagttcctcccgcaggctgtcgcgtgggggttctgcaaggcaccagccgccgggccccaggagcaacaggacgagcagagcaagcggcatagccgccgccatccatcccgggaattccggacc

SEQ ID NO: 162211 - DNA, 563 bp, Homo Sapiens
  misc_feature (112)..(294): n is a, c, g, or t
  misc_feature (317)..(317): n is a, c, g, or t
  misc_feature (321)..(321): n is a, c, g, or t
gtatttactgcagacctactttattatgcaccgtgatgtttcaagtatcacaaaccattacaaagcaatataatcaccctccttcccccttactgcttcaaactattgtggnnnnnnnnnnnnnnnnnnnnnnnnnnnnnnnnnnnnnnnnnnnnnnnnnnnnnnnnnnnnnnnnnnnnnnnnnnnnnnnnnnnnnnnnnnnnnnnnnnnnnnnnnnnnnnnnnnnnnnnnnnnnnnnnnnnnnnnnnnnnnnnnnnnnnnnnnnnnnnnnnnnnnnnnnnnnnnnnnnnnnnngcgccacaacgctgggggacggngtangactcagtctcaaaggcatgacgaaaatagcaaaaatgctttagtgttatacctgttacgaatttaatggaaattacaagtaggagcccattacaatctctagccttaaaatgctgaaaacatacacagtgtgacaataagtaaacttcgagacccaataagggggaaagtccaacgtggaaagtatttggtaggagtgaagaacagagtgacaactgcttagtcccactggggatttcgct

SEQ ID NO: 162212 - DNA, 626 bp, Homo Sapiens
tttgagaacataattttgaatttattatctctctatacacacacagttcataattggattacatataataataatatcaacaagtctatcagtatcgaagttggatactggtaatttctcatgtgaggctcttgtgtcacagtcagcatagatttctggagcatttgtctgttgatcttttggtggcctcaaacctcattaagtggtgtgggagatgctgtttctgccatgtgagaatgtgatggcagaattaacacaaccccaccaggggtacaacagagcactttacatccaaaggcagagagggacacagcaatgcagaattccagcacacttaagaggagcaccatgccatccagacccaggccttttgtagttctaattcctgctgcaattgacaaggatcctgaaataataaacattactgacccccaaattgtgtacccgatatacacggaaatagggttactttcataagtattagatgccatacacatcattgttattcccatgctaaggctcatcagggcagtcagaatctgcacaaccccaaggactttgggttctcccttcaagaacttctcttgcaatcctttccacagatgtgaatgtatgacagccatgtt

SEQ ID NO: 162213 - DNA, 960 bp, Homo Sapiens
cgcgcaatcatctgcattttatttgcacctcatttgcaagttgttaatttgcaactctgctccttccactccaggttccttctctcccatcacccctcagattccccagtggcccaggaaaaaatatcttggtctttgccaaggtagactcagccttgtcagcaggcctgtcctgtgttctcaggggaggcctttacccaaggccacaacaacagcaggaatcccgagtaagacgccaccttgacggcagggaaaggctggatcttttcacagggcagaactgatttgatgaggtgaacagtaaggtgagcagaggtgggaaaggccagtgggtgaatgcaggaacagcaccaggagctagagcccaactctggcctgtgggctgtctcccggtcctcagaggcgggacggggttcctccacccaccaccactgtttccccagtgatgtagctggcatcttcagagcacaggaaagacacgatgccagcacaatcctctggctcgcctaaccttgtcccacacctcctcagtgacatccattatgcttccaaagaaagggttgacagcagcattggagactaggatatcgatacctccatgaagcttcacagccgcattggcgactagccgctctcggtacctccatgaagcttccccacatggcacacggtgcccgtcacgctcagcccctccccctgcagcgtggccaccgcctggtccacattctgctgcttccggctgctgacgaccacatgggccccgtcctgggccaaacgccgggcgatggcgaagccgatcccgtcggtggaggccgttaccagggccaccttatttgcgagcgggtcccggcgggtcatcccggagctggccatccgcaccgaattccaagcccgggcacagaggcctagcagccccgccttgtgcatggatcagaccagcaagtatgggttccactcttc

SEQ ID NO: 162214 - DNA, 667 bp, Homo Sapiens
atacacatctgcagcagatttttattagatggaagataacaagcattccctcataggtaagtggtaagaaatggcaagtacagccaagccacagaggagtgaggacattactggctatgggaatggggtacttatgaaatctaagggttgggtctcctgatgaactctaactacccagtaagctcttctctttggcactcaatatgaccactgctggcatgaaagggtctacagtagctacttcaacttggccaacagttcttccagttctggtcgagctttgaatcgtcccttgaagtcttcttcagtgtgctccttcactgacagtctgactccttcaggaagactgctttggattatttccaagaaaatttctgcaaacgtagcactcaaaccgctgatctcttctgctttaattaagtgcttgtactttccaatgccgtgggtgggctttgtcttgtagggccgactgatacttagtagaattccacctacagaatagatgggcttctctcctgaagttctaaaccttaagagagaaaaggcttgcttaaaaatggtattgttcctcaggcacagcaccttttccaaggttccgctcatcctttgctgctgcgcggcctctagctgtgcaaaccgaagaccggaccctgcagccgcgttcccc

SEQ ID NO: 162215 - DNA, 1000 bp, Homo Sapiens
  misc_feature (122)..(122): n is a, c, g, or t
  misc_feature (126)..(126): n is a, c, g, or t
  misc_feature (136)..(136): n is a, c, g, or t
  misc_feature (152)..(152): n is a, c, g, or t
  misc_feature (162)..(162): n is a, c, g, or t
  misc_feature (177)..(177): n is a, c, g, or t
  misc_feature (258)..(258): n is a, c, g, or t
  misc_feature (267)..(312): n is a, c, g, or t
  misc_feature (332)..(332): n is a, c, g, or t
  misc_feature (334)..(334): n is a, c, g, or t
  misc_feature (444)..(444): n is a, c, g, or t
  misc_feature (454)..(454): n is a, c, g, or t
  misc_feature (470)..(470): n is a, c, g, or t
  misc_feature (534)..(534): n is a, c, g, or t
  misc_feature (569)..(569): n is a, c, g, or t
  misc_feature (579)..(579): n is a, c, g, or t
  misc_feature (673)..(673): n is a, c, g, or t
  misc_feature (678)..(678): n is a, c, g, or t
  misc_feature (699)..(699): n is a, c, g, or t
  misc_feature (727)..(728): n is a, c, g, or t
  misc_feature (733)..(733): n is a, c, g, or t
  misc_feature (748)..(748): n is a, c, g, or t
  misc_feature (765)..(765): n is a, c, g, or t
  misc_feature (777)..(777): n is a, c, g, or t
  misc_feature (831)..(839): n is a, c, g, or t
  misc_feature (874)..(874): n is a, c, g, or t
  misc_feature (883)..(883): n is a, c, g, or t
  misc_feature (885)..(885): n is a, c, g, or t
  misc_feature (900)..(900): n is a, c, g, or t
  misc_feature (903)..(903): n is a, c, g, or t
  misc_feature (929)..(929): n is a, c, g, or t
ctgcagcagatttttattagatggaagataacaagcattacctcataggtaagtggtaagaaatggcaagtacagccaagccacagaggagtgaggacattactggctatgggaatgggtanttanagttcatcangagacccaacccttanatttcataantacccattcccatanccagtaatgtcatccctcttccgaattctggatgacggtggcaaaactctcgagattaattcatagtaaattcctattcangtcatactnnnnnnnnnnnnnnnnnnnnnnnnnnnnnnnnnnnnnnnnnnnnnnttaaattcttaaacatacantntttatgtctgggttcattaataaattacctaattcacactaattactttactctcactgaacgctttctattctagaaaactttttttccatcttcattattgaatcatntagcattttnagaaatgcagttcacntagtaaccggttttcctctttctccctccattattttcccatactcttgttgtcctctaccgtngtttgtatttatgttattcatctgttttttctctnttattctcanaatcagggtataattatagagaaaaaatttaacaagaagtatattacttttttttcatcctcttaatactcgtgccttcggctttttccagaantggcncttctttcactcttataattnaaatcggtttttcaacttatttttgttnnatctnttctatcatctattnccacctatttccgcatntatggtcccctntgttcccctgctttatctcctcattccctacttcttcctcttctctccctctannnnnnnnnactcctctcctgctactttccctcctcccctattnccttccttntnctctccttttccctnttntcatccctcctatttttctctccttnctgacgttttgctcttctcctgttatcttttctatctccgcactgttccttcttctgggggcggggccggg

SEQ ID NO: 162216 - DNA, 917 bp, Homo Sapiens
  misc_feature (142)..(154): n is a, c, g, or t
cccgcggcgaagaacccgggggtgtacgtcgggggcggtgacgagcagccggcagaggactcgcgcgagagcggcacggagtgattaccgcaacatcccaggcgctccccacgcgtctacacgagcgggggcgcgagccacnnnnnnnnnnnnntgcgccacagtggggcccgagccctggcggcgctgaaatagagggcgccaaggggggcgcgcgcgcgtccaaacgagtgagaggtgcagtgcggcgccccccccggcgctggcgaaccgcatgggccctcggtgcccttcggccgtagaggaaacttggggtggacactggcgggaaaaccaggccccgcgccaggggtacccttccttgtccgaagggagctgcccagttttgatgagagagtcccaggcagctcctgaaagttcagctggtagtttgttctctgaacatttggtctcttgaagggcacagtatatctggggcttcttccctttacccaatctaatcctttcttcttaatccaggctcgaagcccatccacattccaagagcagatcttgagtgtggcaggtttgccactgggtgaggttttctgatctggggggtcctcatacagggctgggccctctcctgctgcctctttgtcatttttctttgcggccgtcttactcttcttggcctctggctctgtcctgagctcatccccgtcttccgccaccgctccctttttcccacgcttcggcattcccgttacgaacgcccttgggcagctgtaccgcgtcacccaccgaagcaatatttttaccgcgttgctcaagcttgccgttcagactgccagcgaagcccctcttatgagcaaaagagcaaccccgtatctgcaccggcccgatggcagcctagctcctcctaacccgagcacccc

SEQ ID NO: 162217 - DNA, 701 bp, Homo Sapiens
  misc_feature (203)..(265): n is a, c, g, or t
  misc_feature (354)..(366): n is a, c, g, or t
ggtgagccgaatgggcatggctgcgctggatcctgcgcctctggacgtgctagccatttccagtgtcccaactactgtcatcgtgaggttttcatcggctgtgccatttcccaacgtcttttgggatttacatctgtctgtgttaaaataatcaaacgaaaaatcagtcctgtgttgtcagcatgattcatgtatttatatannnnnnnnnnnnnnnnnnnnnnnnnnnnnnnnnnnnnnnnnnnnnnnnnnnnnnnnnnnnnnntcatagttttaactagatttccaagatattttgtgcatttgtttcaactgaattttggtggtgtcagtgccattatctagcaccctgannnnnnnnnnnnnactataaccagggtttcattctgtctttttccactgaagtgtgacattttgttagtacatttcagtgtagtcattcatttctagctgtacataggatgaaggagagatcagatacatgaacatgtcttacatgggttgctgtatttagaattataaacatttttcattattggaaagtgtaacggggaccttctgcatacctgtttagaaccaaaaccaccatgacacagtttttatagtgtctgtatatttgtgatgcaatggtcttgtaaaggtttttaatgaaaactaccattagccagtctttcttactgacaataaattattaataaaat

SEQ ID NO: 162218 - DNA, 839 bp, Homo Sapiens
gccccttgtttctttcagccttcatactgacgctgatgatatcttcgtgcagactcattggaggtcaactcttaccagggaggtcatcagtttcatacagccagggtgctagtgtgacagaaggccagacttgtgagtctgagaagccagtgagcagggagatgaggttgtccatagggaagtcatcatggaggaggatgtactggcaccgacagaccaatgtccccacaaactcacagaagctgccctggaacttcttccaggatagacctggagctgtcagaggatagtcccccgagtcctcattaaacgctctgttaggtgctggatgatctctgagttggacatcttcttgaacatctcagggctcacagtgcctttacatccacaagatcagatgaaaaaagttaacaagctccagaaatcctgcatcctggtcttgcttgtagctatccagccactcatctaccaaagactgtaatccaagctactcaggaggctttagatgggagaagttcttatgaaaaagttaacaagctccagaaatcctgcatcctggtcttgcttgtagctatccagtgactcagtgtacctccgtctgtaggtggccaacgccgggcgctgggccgccgctcctgccttgcacgttagagagccggtacatgcaggtgggaagctccacacggagaggcgcgccgcgcccgtgataaggttttacctggtacatcggcatggcggaaccaaagcaagagagggtggcgcgtgccaaacaccaacgctcagaaaccgtccgaggctacgactgggggcggacatctcccttgtgagcctgctgcggt

SEQ ID NO: 162219 - DNA, 234 bp, Homo Sapiens
  misc_feature (140)..(140): n is a, c, g, or t
gtaccggttatattaggtaggaaatcaggaaaaggagcttgtggggcaggaagggaaggaacggcagcttggggcactctgacatctttcacaagtcttgtaaaggcttactaaatacaacgaagcattgtaccaactantaccctaataaagattaaaaatttacattccagttaactaccttaaaagttaagtccactttcatcccacgcccccatccattccgtactcccc

SEQ ID NO: 162220 - DNA, 154 bp, Homo Sapiens
ccttttaaagtcatctctataggaaggtgctgggcagggatcccagagaaagaaagggtccaagactccattaactgccctggatgaagggcactgctacagcagctagtaccagagactctcctatctcacggttgaggcagacccaggatag

SEQ ID NO: 162221 - DNA, 466 bp, Homo Sapiens
ttttttttgacttttaatgctttattgggattgcaagcgttacaaggttaaagacaaaacccacccagtgttatattctgcctcgccggagtgggtgttcccgggggcacttgccgaccagccccttgcgtccccaggtttgcagctctcccctgggccactaaccatcctggcccgggctgcctgtctgacctccgtgcctagtcgtggctctccatcttgtctcctccccgtgtccccaatgtcttcagtggggggccccctcttgggtcccctcctctgccatcacctgaagacccccacgccaaacactgaatgtcacctgtgcctgccgcctcggtccaccttgcggcccgtgtttgactcaactcaactcctttaacgctaatatttccggcaaaatcccatgcttgggttttgtctttaaccttgtaacgcttgcaatcccaataaagcattaaaagtc

SEQ ID NO: 162222 - DNA, 1002 bp, Homo Sapiens
  misc_feature (342)..(342): n is a, c, g, or t
  misc_feature (353)..(353): n is a, c, g, or t
ccgagtgcaaaatcgcccgtgtttttgacattcccgccaacagattcctgggcccgaggtcccctcaagtccatggtcccgttgattccagtatgcaacgcttggcgctgaaggcatgtacctccatcactgtcaccacccgtcaacccgcccacgacggtctcgagagggaacggccccttgcgatgctctgtgctggtgatcccggcccgcaccatcgaggacctgaagcccttgtcagccgtctgtccctgctggtgacccggcccactacctccggagtagctgcaccctgttgtggtctgaggcagcctctgcactggtgcagcgggcaccgccccncgcgctgaccnccactagggagatgcagctgcagcacctgtcggatgcgctgggccctccccggcagggggggatcagagccctcctcatccagctcccgcatcagggcttccgccttctgcaccgtcagctctcgggcccggccctgcagcccctccaggtaggccagcagggtggagaagtgctcatcgggaaccttgtcactgtcatacatgtgcagcaggagccacgtctgcctcgtcttctgaaacctccagttcttgtgcttttgggcccatctgcagaggtagtccagggccagttcggcccccgagcgcctggcaggcgggtgctgggccacaaggcctgcctcccgcagacgctgcctctcctctttcttccgttcctttttcagcttcctttccaggaccctctgctcctctggggacagctctggctctgcgtccagcccgggcctgagcacagcttcgcccttggagccggctccttcgccacttggtgcagcctcagggcccagcagtggcccctctgctgacgccttcttcagctttttgttctttttctctgtcacttcaggaacttttctcttctgttttgcccctcgtgccgaattcgccacccaggcctcgctaccttaaaccgtagtagtactgccgttcc

SEQ ID NO: 162223 - DNA, 1043 bp, Homo Sapiens
gtgtcatgcacgctgttgactggggccttataatagtgttcatcccaaaggcctggtcgcgcactttttgagggacagtgtcgtagtaggtggcgtgcattaacggccaagtgactccaaccagctgcaagcattctttctggggcaaccgacagttgattcgggcaaggagcgcgatcagtaattggaggacacgtcatgggtacagggttctcctgcaaccaactggaatttcatgttgaaacactggtacgtagccagtctattaggaatggcttctcatgtgttccagtggacttcccgagcccacgtagggtattttgggtctgacttgcttgctcttccctcaagttgtctccagatcaagcataaatatcgtttcacatagttcactacaaaggtttggatcagctccatcgttctgcatccacatcatttactgcaagaattacatcagagaaggcctgacacaggtcttcttctggcaggggcacatccagatgtttccattgggcttggagaggcagtatcaaccaaaataggctcaggcgaaagtttttctttctgttaacaggctcaggttctggctcaggttctggctctggcactggctcagacactggcactggcaccagcataggtaccttttcaagaggttttggtagttttttatcaatgacttttccagtagctgaaggttttgcttccttcttcataggcattttggcctgcagttgttcactgactttgttaccaatgtccccaagagctgttcttggcctcagtccgggcttggaggttgcagcaggggccgtaggaacgcgctttgcgcctgccatgttgatcttcgccttattttcagcattaattttcgagttcctggtgactcggagcgccatggcttcctcttcaccaggcagcagctcagcggggagaagcagaacaccggaggcccgaccagccaaggacctacaaccagcagaaacccctcgtgccgaattcgccacccaggcctcgctaccttaaaccgtagtagtactgcc

SEQ ID NO: 162224 - DNA, 774 bp, Homo Sapiens
accccggttgtcccttgggcccacccggccccccccaccttgggggcctttcattcccttgcccccggctccaatggcccccgcttcccccccgttttgtgctcgcgggtcacggtccacgggtcacgatcccggttcccggcgccgctcgcgctcgctccggtggctccgccgtcgctcccggtcacgatcccggcccttttcctctggaccgtcagggccgtcaggcccgagctcccctggaggcccatcatcagggggcgggtcacccgcctcggagggctccggcatgttcgccaccgccgccacgcagctcctccttgcgcttccgctcccgccgggcccgctcccgactccggctgcttcgccgcttccggtcccggtccttgtccttgctccgctccctggagcgcctccgctcctccttgtcgcgactccgtgagcgcctccgccggtcccgggagcgggagcgtcgccgttctcgctccttgtctcgctcccggctccgctctctgcgctcccgctcacggtcccggtcccggtccctctcatcgtagcgggaggtgtcatcgcggcctgaatgccggatgttcacatcagcccctcctcttctggtaccaccgaggcctcctcctagccgccggggcctccagcccttcacggttcggcccctctccacgtccacaaggaccctcctgccatcaatcttcttgccatctgcgtgtttgtaagcggagtgcatgtctcgctcgtgttcgtactcgatgaaggccc

SEQ ID NO: 162225 - DNA, 942 bp, Homo Sapiens
  misc_feature (92)..(155): n is a, c, g, or t
  misc_feature (295)..(320): n is a, c, g, or t
  misc_feature (814)..(814): n is a, c, g, or t
  misc_feature (855)..(855): n is a, c, g, or t
gattaagcaataattttcagtttactagatgaaacagacttgcaacatagtctgcatgaatgcaaaataagccatctacagcaagtgataannnnnnnnnnnnnnnnnnnnnnnnnnnnnnnnnnnnnnnnnnnnnnnnnnnnnnnnnnnnnnnnaatcaaactattattacaaaggactttaccaagaactgctgtgtttcccccatcccatctgctggaagtcaacaagagcatctagcaactttgtgttcatgtcaaatgtcagatcagagcatcctaacgcaaagccaacnnnnnnnnnnnnnnnnnnnnnnnnnngaaagggaaacaaacaaaagagaaaacccccaagccccgtccccgccaaactgtagaacagtaactccagagttcaaattcaaaagaagagaaagtggcaattgaaagaggtgatggtggcgataatcctatgaatgggtttttgatttctctccttccaggggatgggtggagaatgctcattaagatttgtagttagaggttaaccatgtgagcccctcatagagtccgtcccctgaggtggcacaggagggctgcacataccagttcctgtcccgaatccgggtcaggcccagtttctcctggatctcgtggggtttcatggcatcgggcaggtcctgcttgttggcgaagatgaggattatggcgtccctcatctcccggtcattgataatgcggtgcagctcctggcgagcctcatccatgcggtcgcggtcggcgcagtcccctacgaagatgagaccttggggtcccgatgtaataatgccgccagnacgggccggatcttgtcctgggccgcccacatcccatacgnttggaactggacattttttgtaaagtacccgcctccacgtttgaaacccccaagtggggatggttggttcccgaactgggccccgct

SEQ ID NO: 162226 - DNA, 208 bp, Homo Sapiens
gagaatccagctttgacctttattcaagagaccagatgggttgccccaggatccggctgccagccctgaggccaagcacgggtggagacccacgacctggcctgccgttgccctgagctgcagcctcggccccaggatcctgctcacagtcaccgcaggtgcaggcaggaagcagccctgggggactggacgctgctattgattcatt

SEQ ID NO: 162227 - DNA, 489 bp, Homo Sapiens
cttaaatgtacacagggaacatgattctttttatgcaaacaataacttaggcctgtagcatcgctgccggctccgccacgggagggctgggggaggccagcccaggtcagcagtggccgaggtgacagaccgcctcctgctctgtcccccgcgcgcgccgcgcattggccacgctgcactgctggataaagagttcaatgattgtctggtaggtgcgcgtggctgtgagggcgtccatagtgctgaaatcaggtctcatcaaggtgggccagaagcagatggagaggttctcgctggtcatgagattcaccttgttgttgtggctgaccttgtttaggtgagagatgacatacttgaagacttcgtggttttcctttggaaatttctttaatacctccttaagggcatgcaacttctgctcccggtcgttgatttgtgtgcttccaccaagtcgatctgcatgttatacgggaaccaggggtcagcagt

SEQ ID NO: 162228 - DNA, 838 bp, Homo Sapiens
tttagccgctgacccaaccagtcctggtgtccatccaaaggtaaactcagctgtcacaagagagcgtccactctggccctgtttgggatttccagcctgagctcatcgataatttcttcgatatccttagctgtcaatcctcatagtaattgtcatttatttgaaccacgtggtgcgttcacacaggcccctaaacattccacttctataagagtgaaaagtttgtcaggtgtagtctccccgacctttattccaagctttttctgaatggcctccagtatgctgtcagagtttcgaagcatgcagggtgtagtagtcgcagacctgaatcgtccatactttcccaactggctttcgatgtactacatatgtataaaccaagtctgctacttcatatactctcacttggaggtacatgtagctcaaaacttcatgcacccttgttcatagcacgatgactgggcaaccacccattctgcctatatgggcctaaatccagagtactggaagtaacagctgcttgctgtctatggccttctgcgactacgtttctctatcactacaattcgcctctgatcctcttatagtctttcttggtgtagaaatcaaatcggacgtatccagggttattatacaggagtattcttctgtgcacacaatcaagctcctccagctccactatagcataactgtcttatgccaattccttacatgtctctccacatgtggacggagaggccagccgcccgggcccggagcgccgcggagaagcacatgcacgggccacactgttcaccttcctcgtgccgatttacacacccaggcctcgtacctagcc

SEQ ID NO: 162229 - DNA, 1170 bp, Homo Sapiens
  misc_feature (799)..(861): n is a, c, g, or t
ggcacgaggttttagcatcactgttttaatttcatgaaatacaagtacaaaacattgtataagtatactttttactacatggagatgaactaatacatttatgtttttatcagaatctgtatcacccagcgctggtcaatgtactagtagctttccacagggattttttatactattcctataaggttttatcatgaataaaaaagctcacaactcttttcagccattgcagattcacatttatcttaatattcctgttcaagatgctctggagaactgttaagaactacaaaatcaccttaggcagagttttgaatgagtaattttatttcacgttggccaagatctcccttatgttggcattgcaaagacactgcacttatctgaggttagaaaaaatgtagtcttaatagccctcttaatgtgtagcaaggcaaattaccatttcctaaaatgtccagaatatcatagtagttagttattcgttaagtagtaagtctatgaaaactccacttatagaagacaatagcaacagaggaccactaagtcctaaatataccaaagaaaaacaagtttacaaatattcaaactgtctgtcttctctacctctaaaatggtttaaccacatcaagtgagagtaacatcagccgattagaaagggaaaaagtaaactgtgctagcgtccggcattcagcttccatagcatgtctcacagttttcggccatttcagctaagagttttcttatgacaggcaaaaataatgattaaaataccattagctttgctgagaaatgtggnnnnnnnnnnnnnnnnnnnnnnnnnnnnnnnnnnnnnnnnnnnnnnnnnnnnnnnnnnnnnnngtgtttatctgtttcttaaaattcttgcgtgttaaaacattcaaagttatgtcaacctgtaaggataaaggggtatttaagataacatgtttggaaaactaaaccacatttttaattgccagcattatgctttgttcttggtagagtcatccttgtttcttctttttacatcccaattataaacctggccatagttgacttctgtggtagtaaattgatctcgaagaaagcgacgcgtgggtcgacgatatcccgggattccgaccgtacagcctgctttttgtaccactgtttatagtgtcactagat

SEQ ID NO: 162230 - DNA, 663 bp, Homo Sapiens
  misc_feature (336)..(452): n is a, c, g, or t
tatgtaatcaatcattttattattttcatcaacaaccaacacagcaacacaaattgacagccagtcctcaagggaaccttttttgaagtgaagagcaaggccctgaatgagctacctacatggaacatagtatttgcaatatgcaaatggagacctaaaggctcatgacaggaacagaaggtggctgtatacagaggaacagacacgaagtggagttatgggaagttcaatcaacaattggcaacaagctaggtcagtagtttacgaaagtggtcatctatacagtgcctgagtttgggttctgggcctggatcatgtaagaaaggcagcaaagtnnnnnnnnnnnnnnnnnnnnnnnnnnnnnnnnnnnnnnnnnnnnnnnnnnnnnnnnnnnnnnnnnnnnnnnnnnnnnnnnnnnnnnnnnnnnnnnnnnnnnnnnnnnnnnnnnnnnnaaaaacaaaagggcaggtagattccagataaataatgttgcaggaagggggtgataaaatacagaaatgtgatacacagcaaaccctcaactgctgtttcattggctcccagtgtcttaatctgtgtctgctaacactttaaggtacatctgaaatacccccaaacccagaaagttttcaacagctaggttgtccaagaacttggaaaatt

SEQ ID NO: 162231 - DNA, 543 bp, Homo Sapiens
  misc_feature (143)..(143): n is a, c, g, or t
ccaagaacttcagctcagcggttcccagcaagggttcgctgagtctctgtcctaggaggtccgagctgggtatgctgtgcggacgcagacactgcgggaaggaaacaggtgtcccgcggcggccaaaccttcgggcagcagcncaggtcgccttgctcaccccaggcggtctcatggcacgggcctctcgaaactgtgggcaagaaagggtcctcgtgagaactaggctcagaagaagagcgggggcggcgccacctcggggggagcggaccaggctggggccgcaagggcggcgtccggggccgcgtgggcggcttcgccgtgaatgagctggtgccgcaccaggtgggtcttgcggctgaagctctttccgcactgcgggcaggagaaggggcgggagcctgtgtggatcgcctggtggcggactaggttggttttggagctgaagctgcgggcgcagacggcgcaggcgtgggggcggctgccagtgtgcaccgcctggtggcggcccaggtgcgacttgcggctgaagcggcggccgca

SEQ ID NO: 162232 - DNA, 321 bp, Homo Sapiens
cttaaacacattttatattactgaacaaccaaatctaccctccacggccctgaggccttatcagttccactgattaaaaactttctcttccacggactttaagcccggtaggaaagagagaggaggagggggaaagagcaaaccatctttcttccaggcccttgactgctcctttgggctgggccaaggtttgtatgtaccacaccatgcatgactcagatgccctcaggtccctttctctatggtatgtatactgcttgtgtttgggttgaagcactacctgacattaaaggaaggacttgataaggatatgcaaaaaaa

SEQ ID NO: 162233 - DNA, 1078 bp, Homo Sapiens
ggacgctgtatcgcaccctgtggttcgcgcgtgcctgtgctgtgggcccctggttgggcggagaggtagacaccctgtgctggataccacccgtaggtgtgtaacaggcgtatgggacgcagacagttcgacattggcggtccagtattctccagttcaggcggcattccgtagagggcccagaatggggcaggggcacccaagggaggtgacacgaggatgtcatgaggaggaccaggcgaagtccgagacacacgggtgtgccccgtagaacgcgaagcactgtggtggggcaggcaccagcttggcacaagggagatggctgccgtcgagtgagcagcaggccaggcggtgtcggtcagtcattggcgaagccgcaccccttgggacctgcctcatccacggtgctggtcaaagacagtgatacaatgcccgcaaaggcatagttctcgctcagtgacgtgtccccggccatggcccgacttgcctctgctgctgacgtgggcaccacgctgccagggggcctgtcctcatagacggcacggttcaatctgcgcctgcagctggtaggagcctctgctgacagaacgacggtgcccacagggcccccagggcccgaggatcatcctcaaagtcctccatgcggtcaagagtagtgcggctactgcggacgatgctgttgctataggcacgagcactgcctggctcggagaggggcccgtagcgctggcccagcagctgcaccccgaagcctcaggtactgccgacgcagcgctggggggtgcccagccttggcattctcccgcagcagctggctgcgccggcggatatactgcgtccgaaactcgcgtccactgctaagacttgctgccacaccgcggccattccccggcctcctcctctggcgtgtccgcccgcggcagcactccggggctgcctccggttcttgaggccccccggagcaggaccctgagaccactgtcgccggttccttctgtctctcctccctttctcaggctccaaggcaagatggctgccctcgtgccgagtttaaacgccagggcctcgtacatagccg

SEQ ID NO: 162234 - DNA, 1268 bp, Homo Sapiens
  misc_feature (273)..(282): n is a, c, g, or t
  misc_feature (419)..(437): n is a, c, g, or t
  misc_feature (835)..(851): n is a, c, g, or t
  misc_feature (988)..(996): n is a, c, g, or t
aaattcactacacaaactctgtgattaggtaagaaaagcgacaagggctctccttgcctttttttaaaccattaaagtaaaatccataattttctacagagtacaacacaagttcacacaaaaaagacattttcttttgcaaatcaaaacaggaaagaaaggaaaagctcaaacaagataaaggaaaagcatttctacggctgaatcacgactgagttgattgaatcccgttgttgctgcagaacagactgtgcgtttggtcatagtggcaannnnnnnnnnctcttcacattgtgaaatcactttacattgttttctagtagaaaaggcaaaaaactttacaaaacccctagtgttaaatacaacgtttgtaccaataaaaaactcacacaggtttgtctccaaaatgtaaagtttcnnnnnnnnnnnnnnnnnnnaaattattcacaaaaagcagctggaaatcagaaaggcagctgccgctccagggtctcaaatccattaaaaccaccacagaacaattaaaacaatcagagagagaaaaggaaaaggaaacaacgtccaacatttggcatttggttttatccacaggttttcccagagctcctcttggaattgaaagcaaaatatattggcaaacactgcttctcaatacacaggaaggggagctctgggaaaacctgtggataaaaccaaatgccaaatgttggacgttgtttccttttccttttctctctctgattgttttaattgttctgtggtggttttaatggatttgagaccctggagcggcagctgcctttctgatttccagctgctttttgtgaataatttnnnnnnnnnnnnnnnnngaaactttacattttggagacaaacctgtgtgagttttttattggtacaaacgttgtatttaacactaggggttttgtacagttttttgccttttctactagaaaacaatgtaaagtgatttcacaatgtgaagagnnnnnnnnnttgccactatgaccaaacgcacagtctgttctgcagcaacaacgggattcaatcaactcagtcgtgattcagccgtagaaatgcttttcctttatcttgtttgagcttttcctttctttcctgttttgatttgcaaaagaaaatgtcttttttgtgtgaacttgtgttgtactctgtagaaaattatggattttactttaatggtttaaaaaaaggcaaggagagcccttgtcgcttttcttacctaatcacagagtttgtgtagtgaattt

SEQ ID NO: 162235 - DNA, 1040 bp, Homo Sapiens
gctaggtagcgaggcctgggtgttgaattcggcacgaggccgatctgtgttccgcggccggccgcggctgagtcttcccaggtcagggtcaggcgctttgctgagtccctttgtgggcgccatggacaattccgggaaggaagcggaggcgatggcgctgttggccgaggcggagcgcaaagtgaagaactcgcagtccttcttctctggcctctttggaggccattaactgtttgatgcgagcaatcgagatctacacagacatgggccgattcacgattgcggccaagcaccacatctccattgctgagatctatgagacagagttggtggacatcgagaaggccattgcccactacgagcagtctgcagactactacaaaggcgaggagtccaacagctcagccaacaagtgtctgctgaaggtggctggttacgctgcgctgctggagcagtatcagaaggccattgacatctacgaacaggtggggaccaatgccatggacagccccctcctcaagtacagcgccaaagactacttcttcaaggcggccctctgccacttctgcatcgacatgctcaacgccaagctggctgtccaaaagtatgaggagctgttcccagctttctctgattcccgggaatgcgagttgatgaaaaaattgctagaggcccacgaggagcagaatgtggacagctacaccgagtcggtgaaggaatacgactccatctcccggctggaccagtggtcaccaacatgctgtgcgcatcaagaagaacatccagggcgatgaggaggactggttagggcccaccagtccccgagtgccgtttctgtccattgtccgagagaggtggggccgcaattgtggagagttcctctttccatttgggagtccgcggcacggggggggacgggtcctgcgggcgcagccgttgggcggagcctgttgtattcttccggttttgcctgtgcttccaccgtgtgttgtacttttggggggtggctccttgagggtttccccaatgttgtttgtttg

SEQ ID NO: 162236 - DNA, 191 bp, Homo Sapiens
  misc_feature (162)..(162): n is a, c, g, or t
ttcagtctccaacgactctgccctcgatggtcctcgtgggttgggttgttttgtgcgggttgtgctgggggggagggggttcaaatatttattgtattttttgtttgtggcagcaactcaacagattctgctgctgggaagggcctcagcgttcctgaaganagatgtaggggacccactggttgttgccc

SEQ ID NO: 162237 - DNA, 649 bp, Homo Sapiens
  misc_feature (99)..(115): n is a, c, g, or t
  misc_feature (432)..(476): n is a, c, g, or t
aatataaaacaaatcctttaatttttcaagtgtttaaaaaacaattttatacttaagccagccttgaagataagcacaaaatttaccagtttacatttnnnnnnnnnnnnnnnnncgacaacaactcaagcacccgctctgtgcatagcactattctaggtgcaataaaagggaatcttaaccttagaaatatgagttcactttctggaattgtattatctccttttccagagagtaaaaataaataaaatcaccattgtttactacagatctgccccaaaccacatctggttcacagaaaggctaatttctgccaaattaaagatgtaatgaactcagttcctgctttcccaaaaacacgaaagcagaattccttttcactgaaaaaaataaacagttttccatgcaagggcagtttgcttctaataagtnnnnnnnnnnnnnnnnnnnnnnnnnnnnnnnnnnnnnnnnnnnnncttcctctaatattgccttttcttgtacaaggcagaccaggtatctttttatgctgttttcctttactaagaaaagtattgcatcttgaagacaaaccatttcccagagtagtgataaaaaataacactaaaaaaacttttaaggtgagtcacttacatcaccttgatgaagt

SEQ ID NO: 162238 - DNA, 401 bp, Homo Sapiens
ttgattttaaacctttaatgagaaaaaaatatataataccgagctcaaaaacactgtgtttggtgtcattgggtcaagggttggggatacacacggcagaattcggaaacagggtatagatcaacaaaaatacacagtcataacaagaaaaactggcgcctggcacaatcaactctcagtttcctcttcactcagcagcatgttggggatcccgcggctgatggggaacatacgtccagattccgggcactgcagggtgccctctatcacttccacctccagcagcaggtggtgcatggtcctcagaaactcctcattctcctcatatccctcaaccggccctttcggcacgttatcggccgcctccaggaacgccgaccactccactttaggtatcatcc

SEQ ID NO: 162239 - DNA, 933 bp, Homo Sapiens
agttcggattgtgatgcttgacaaaactacgacggtttttcagaactttaggttctaccagggtccaggctaaataggcagcccctgaaagaagttaggatgtgacacttcagcccctgcagggtaccacgacggtcatcccaggtttatccgggatgggcatgccaggcatctgcgatgagtcttgggaaagcccaggatccattttcttggttcacgtcattgtatctcccagaatttgtctccagcaaagatgtatgtcttcttgtttttgctccagttaaaggcggcatccactcgctggacatcagggggcagtcccagggtggtcagtggcttggggtaccctcgctccagggtgctggctgagtagatccagtattcattccgtgcaaagaacacagccttctcgtcctgtggggcctcgtataccgcatcaatcttttctgggagctcaggccagaatgtggccaccagcaggggccccatgggcttgtcgggtgtgccgtctcagtccgccaaatgaggcggtccttgaagaagaagatctcaccacggatctgagcgatgccatcaaatacaatgtcctgtttgcagatctcaggagtgacaggtcccagtgtgggggtggggccggtgccaaggtcaatgtcaggagaggccccatagagctcctgaatgcccttgatgtcatcctgggacagacggaagttcttggtgtaggtgtaaatgggtgccatcagggccgcagggtcttgggagtgctccagccccatggcgtggccaaactcgtgggctgccacgaggaacaggctgtgcccttggtcagggcagaagccgtacttcttgtcgcggtggtagtcctcagtggtgccgctccaggaaagtgaaggggaagacacagggggcaccttgtgagttcccaccaaccag

SEQ ID NO: 162240 - DNA, 582 bp, Homo Sapiens
ccctcgcgaacgtgttatcccacaggtaacttcttgtccttgatcttccttttctccatgaaatctcccaggcactcagcaacatgatcaaaaagctggcttccactgccgtgcacgatgttctctggggtgtcataaacctcggactccatgtgaacattctggtttttctcatgattcacttgcacccgcagaattcgaaaggaagacccaccaagatccagggcaatgaaatctcccttttcagagccatcaggaatggaccttacgaatgttggcaacatcttgactgtggctgttggattaaaatcccgggagaggccattcttcatctccttcctgaagcgagtcatgatatctatgagagtttcatcggagagccgcatggcatacagatacttgtcaatctttttgacctggtcatccttcagctccgtgaagtaataggccaggagctgcgcggcgatcatgctgcggtcgggtcgcggggcggcaggcgtggggacggtcgtcctccgcagcctgcgagccgtgtccctccgacgctgtccgatacacgttctcgaggaccgacttatatga

SEQ ID NO: 162241 - DNA, 303 bp, Homo Sapiens
atgtgaaagtagatttttattacagagcaaatttttctatcaattcaatgctttaaataaaacaacataataccataaactgacaatgacctgggagcatgtaaatacttaaggctggagaggcatttttattcttgataaatttatataataaattcttatgacacttgattccaaattgtatgtacgaattggcttgacataataaacataaacataagggcaatttaaacattggcagtagtttatgtaagtcaattcaaggtcagtgactggagaactatattaagagaaacctgaggt

SEQ ID NO: 162242 - DNA, 995 bp, Homo Sapiens
  misc_feature (51)..(59): n is a, c, g, or t
ccccccttaaaaccggaaatttttttggttgccctcttttgggggggaggnnnnnnnnngtggaaaagggtgagaaaccccccgtggaaaaaataaacttcccccttcccgcggtccaaactttaagtgggggtttccagggacccctttttgccccctttgttgctggggtccaacaaagggaaaattttggggtccaagaaggggtgggaaaacaggttggtttcaagacccgtgcagcaaaggccactgccagggtaagttttaaggcaaattttatctcttcttatccagtctgagccggacctaaccttctcaccaccgagcaatcctgcttatgctggacatgcatcttgggcaactccggatggaggtgggatgagggagcccggggcagataccaggaggtctgggccttagtagggaatggacgtgtgtgcttatgaaggctgcaggcactgggcacagctcctggcccagctgcccctcagtggtacacaggaagcagggcccaggaaaactgagatggcaaaataggcccgggctctggaaagcaacgtgaggtcatgcagggttctaagggaagcgggaaggtgggggctgtggacacagggtggcgggcgctgcctctcatggcttctcttctccctggtgggctggtgggctagtagctgaggccggcggtcctctcccccggggagcaggcagatgactttggcaaggggtggtgtggcgggggctggggttactccgtctgggcgtcgtaattggctccccccgccttcttcagctcgcttcttgatgaaatcttcctccagctccttccgatcactgatcacaaactccttagcgaaattctgtacgacctccttcaccagggtcttgtccgtcccggttttggcgcgctgcagcccgctgacgttctcaccgatcctcgtgcggaattcgccacccaggcctcgctacttaggacgtataagagcggagtagattac

SEQ ID NO: 162243 - DNA, 928 bp, Homo Sapiens
cagatgttctacagaggtggtcaggtgtgacatgtgcaggtgggagggccagaggaccaagacgggcagggagggtgctctgggggacagtatcctccccggccggccttcacttcttggccttgcctggggcagccacagcttccatggctttgcgcaccgtctcttcatcccccagaaactgcatgggcttgataggcttcaagttcttgtccaattcatagacaatgggaataccagtcggcagggttcagctccatgatagcctcttcagagagaccctgcagatgcttgacaatgccccggaggctgttgccatgggctgcaaatcagtacacgtttcccctccttgatctggggaactatttcttcattccagaagggcagagctctggcaatagtatccttcagactctcacaggagggtagctgatcttctgtgaggtctgcatacctgcgatccttactgatgttgctgtagaaaggatggtcgggctccatcggaggtggtgggacatcataggagcgcctccagatcttcacctgggcctcaccatgctttgcagcagtttctgctttattgagaccggttagacccccatagtgccgctcattgaggcgccaagtcctcaccactggcagccacatctgatcaatggcatctagcactgtccagagggtccggatcgctctcttctgcactgaggtgaagcagatgtcaaactcatagccagcatctcgtagcgcctgcccgccgcgcttcgcctcctcgtggcccgccgggctcaggtcggcgtcgtaccagccgctgaagcggttctccaggttccatgcgctctcgccgtgccggatcagcaccagtttgtaggcggccatggcggcgcggacgcgtgggtcgacgatatcccgggaattccggaccggtacc

SEQ ID NO: 162244 - DNA, 771 bp, Homo Sapiens
  misc_feature (121)..(155): n is a, c, g, or t
gcggggagggggcggcgaaaccacagggatattttttattgggacttcagttccgcgggagatgggagttggggccccgggcaacccaagtgttcttgtaaaataaaggaagaggcggggnnnnnnnnnnnnnnnnnnnnnnnnnnnnnnnnnnncccatacccccgggccaaaaaattaaggggggttttcttaaacaatccggggaaattgccctaactttaatccttgccttaaagaaggagaaaatttttcccccaaaaacgtggtttaaccaggagggcccaatgcatttgcggccctccaagaacatggagatgaacgtgatagccagactgtccaccttttgaactttcattcaccaccattcgataaccgttattcaggcccagatcagcagcacatttcttgccaacaatcattaagtgtccaagaagactttcatcatcatcttctgccacagaaatctgggatatatgtttcttgggtatcaccagaaaatgtgttggtgcttgaggggaaatgtcatggaaagcaaggcaccggtcatcctcaaaaatgattttggctggtatttccttgcggatgatcttcccaaagatcgtgtcgccaccaggccgagcgacctgagccttggcaatctcatctgccatctcggcctctctcccgcgcggcggccagaggagaggctcggaagaagggaggaacccgcagagcgtgcggcgcgagagggcgcagccaagcctgcgcaggtgccccggctctggcccc

SEQ ID NO: 162245 - DNA, 1048 bp, Homo Sapiens
gtttgagagaaagagccaaaaatagctattctttgagtgaagggatcagaaatgacaccggttgggctctgggacaggggataacagtgggtcctttggggtcctttgctcccacccagcctcaagcttctgcccagtactccgatattctgggaatcacatagatatcctccagataaaatggtgcgtcccttccatgtactgtagatgaaatagtatatcccatagcccaccacgcagggccctgagagagagaaaaggggagtaaggcttctggaagcctgtggggagacctctgaggccggctggagaggtggacttctaagggccaggtgctcttacccagtagcttcccgggcgctggaagaatctctggcttccaaacacgtgatagaacggaattgtctccaaggccatctgctctcagggctgccgagattggagttgtgaccaaagagatagagcaagagtacgtgggtgtatgcccagcctggagctgtcgcctggggaacccatccctcatttcctccccagcctccgccagaacctgggcgctgagcccccaccttcttcactgatcttcacctgatccgagagtttttcgagttcggctagctcctaaggcgtgggtacggaagctagattagagcagaagggccccgctgctccccgagcaggttcccaaggcgagcccctccccctgcccccgcctcctacgaccccgctctggccgcgccactctgacccccgggttaccggcctgcagtcttcacccgaatcagcctcaggatatctccacagtctccctccttggcctctctggatccgcacggaagccatccaggatccccgctgtctgggaccaaagtcccagggcctcgcaaacggcaactagaccccttaaagggcctacggacttggatcctgaagagcctgagagagcgggctggcgggactcgggggggacggcggggtagccgcggcctggtaagtggagctgggattccggcgccgtacgggaggagagagtaggccagcgaggcgatcc

SEQ ID NO: 162246 - DNA, 704 bp, Homo Sapiens
  misc_feature (69)..(111): n is a, c, g, or t
gagttttagagaaatagtccttttaatatgacttagaaactgcttttctctggctttgtttcactcttnnnnnnnnnnnnnnnnnnnnnnnnnnnnnnnnnnnnnnnnnnnaatgagctctgctgtgcaggtggcttctccaagactgttgacagccttgcaggtgtacttggcatcgtcatccccgcaaacatcactaataattaaagagcagttcccgtcctcatcgtagtctatctggaagtggcgggactccctgattgactggtcatctttgaaccagacaacctcggggtctgggtatccttcaatcttgcagtcaaatctagcagcacttccctccacaacttctaaatcgcgaatggtcttagagaaatagggttttacatgaggcttttcctcagcaacagcctcaaggaaagcttgggacacatcttcttcagattctagtttttctgcattgagcgggctggttggtgaccctgttgaggatttcctgccactgagccctgagatcattgccatagaggacagtcttccaatggctctcacagcattgcccgttttctgccatttccttctttgcatgtacttcttcatccggtccttggagagtttcttggcctccatgttcttggtatctttcattagccatggatgctgaaggcactgcgtgcagtccaggcggtttttcatatctttct

SEQ ID NO: 162247 - DNA, 2078 bp, Homo Sapiens
  misc_feature (1370)..(1409): n is a, c, g, or t
  misc_feature (1546)..(1546): n is a, c, g, or t
  misc_feature (1964)..(1964): n is a, c, g, or t
  misc_feature (1984)..(1995): n is a, c, g, or t
ggtccggaattcccgggatgcgatcacaagggagctgcccacagaggtaaagacaaggtcaggtaggctgagagacgcaggaaagcgggtcaaggcgtacggctggagggcaggggcgggccctgggcgtgggctgggggtcctgccccggggcgcaccccgggcgagggctgcccggaggagccgaggttggcggacagcttggccctgagcttgaggggaaggcagcgatgggacaaaggacggaggtctaggaagagggtctgcacagcagaaagcacgggtaggggcggcctgacgctcggaagacaacggatgggagccgtgtgcacgtcgggagctcggagtgagcgtgagttccgtgcccaggcccgcgactcggcccgacaggacagcgctctcgggtcgacggggtcctggagccgcgctcggggagggcgcagcggagggcgagcggcggcgttaggacccggaggcgcgggcggactgggggcggcggggctaggacccagcggctccggcagagcggaagcggcggcgggagcttccgggagggcggctcgcaggcaccatgactcctgtgaggatgcagcactccctggcaggtcagacctatgccgtgcccttcatccagccagacctgcggcgagaggaggccgtccagcagatggcggatgccctgcagtacctgcagaaggtctctggaagacatcttcagcaggtgttctccagtgccaagtaccctggtccagagcacctgcagggatatggcttcatccttcccgggcgccccggaccctggcctgcagagacgctcccgccacaggatccagagcaagcaccgccccctggacgagcgggccctgcaggagaagctgaaggaatttcctgtgtgcgtgagcaccaagccggagcctgaggacgatgcagaagagggacttgggggtcttcccagcaacatcagctctgtcagctccttgctgctcttcaacaccaccgagaacctgtagaagaagtatgtcttcctggaccccctggctggtgctgtaacaaagacccatgtgatgctgggggcagagacagaggagaagctgtttgatgcccccttgtccatcagcaagagagagcagctggaacagcaggtcccagagaactacttctatgtgccagacctgggccaggtgcctgagattgatgttccgtcctacctgcctgacctgcccggcattgccaacgagctcatgtacattgtcgacctggggccccgggctttgccccctctgcccctggcaccattccggaactgcccaccttccacactgaggtagccgagcctctcaaggcagacctacaagatggggtactaacannnnnnnnnnnnnnnnnnnnnnnnnnnnnnnnnnnnnnnnctcctgaggtgctggccagtgcatccccactcccaccctcaaccgcggcccctgtaggccaaggcgccaggcaggacgacggcagcagcagcgcgtctccttcagtccagagagctcccagggaagtggtcgacccntccggtggccgggccactctgctagagtccatccgccaagctggggggatcggcagggccaacctccgcagcgtgaaggagcgaaagctgggaaacaagaaccacaaggagcaggagccaagtgagagccacgagcccagggggggaccttgaaggcagatctccttcaacaagctggtcatggagcgcaaagggcatctctgggaaaggacctgggggctggtgaggggccccgaaggaccctttgcccgggggtaagaattcctcgcctcctctggccgccaccggaacagcgcacgggcccagggaggacggggacaaccggcgaaccccaggggggctccctgaaacccttccccccccaaaacccaaacttgggcccctggctctgacctggacccacgccagggaccccctnccccaagccgggtttccctnnnnnnnnnnnntgataggaacctgctcggggcgcggggaacccctctcagggaaacggaaagctggggccgatggcccacacgagagggggggg

SEQ ID NO: 162248 - DNA, 123 bp, Homo Sapiens
tggcaccacactgttttatttaaacctgcaaacaatataaagaggtaaggacttctgacgccaaaccatgcaagtaataacaaaggaacagagaaaaatattaataacaaaaagaaaatcatt

SEQ ID NO: 162249 - DNA, 197 bp, Homo Sapiens
gacttttattaaatctttacaaaacagaatacaaaattccggcattgacagttggtgtaaagaaaaacatccaagcactttaattccaatgtaccaggtgaactgacggagctcagaagttttcctttacaccaactgtcaatgccggaattttgtattctgttttgtaaagatttaataaaagtcaaaaaacttgc

SEQ ID NO: 162250 - DNA, 367 bp, Homo Sapiens
gcatgggcagataggttttattttcaaaatgctgttcttaacacaaaaataaaggctttactatttacttaagacgtgtggtagcttgtcaaaacaacccagtgcaactaactactaggctttcggatctgccttgagggtcggtctgtggcattttaaatgggagaatcttggttaacagcaaaccacagaacatattaaggtaataagtttacccataaaagcaggaactttctatataatactttgggacttagacaacaaaaatcctttgttacatctgtctgggtttaagtccccaacctctgaatttggttttaagtttacctagtgactgactactctctttataaaaaagcctcgtgcc

SEQ ID NO: 162251 - DNA, 1464 bp, Homo Sapiens
tgtgggccttgtcgatcgcgcgcctctccaccccccgggggtggtccgatctgctcaccactaccggtggggacggaccccccggtgtgggagggaatttctcacacgaacggcccgctgtgatttgcccccctcatcgcggtcagcggatgtcccgaggagctcgctcgcctggttccccctcaccagccttcaacatagtggcatagaagctcttctccggcagcctcccttcgatccgctgctgcacacagccagctgggtcttggcgctttcttgcttggggtagagctgcaggacgttctggaatcagcccgtgccagttcaaagtcattcgcggccaggtgggcctctccccggcggaagaggcccttctcgtcgcttgcctgtccagttctagggcctctgttacagctttcaatggcatgcacgagaaggcctgctatgtttcagatgacacatggccaggttgaggctgagagcgaccagtcgaacgggccctgttgctctcatgtgcttcctcagttggacaaactagactcatattccagccaagacacgatcttcttatactgtagtcaagctcgcttgtacataccttccttgaagtacacagtgccccgctctcttcactatggtgctctgtatccagcttccgtgcttctgaattcatctcccaagactcctctggccttatcaacaactcttgaggtcgtaattcatatttcagctacagcattattggtgggatttggaacttttccctgtcgccaacacctgccaaaagcatagctgggcttgaggtacacgatggaatgttctcctttctccatgcgctgaatggccctctccagaccataaggcagatccaggttctccccctcgccaatctcaaagcggagcttcccgctggtcaaagagcttgtccttgtagtacccttccagtgcgacctccacgatagcaccctcattgggcttagcatagccttcaccgcgagtctgtattctgcgaatgattccgccatcttcctcttccgtcagatcttctcccttaaactcaaactactccacctcaaatacaagcgtggcattggggggaatctttggaggactgcctgctgaaccgtaggcatattctggtttgcaggtgatgtggcacacctcccccaccttcatggtggctatggcaatgtcccagccttgatgacctccccttttcccaggtcaaaggagaatttgtccttgcgatccagactggagtcaaactttgtgccatctaatagccagccagtgtagtggacaaagactcggtccccactcatgggcatctctgtacctccgccctctctcttgatgaccttcagcacgccttcgtcctgtttggggctgatgtccactccctccatgggcagcggcgccgactcctcgtgccgaattcaccacccggcctcgctacctgaaccc

SEQ ID NO: 162252 - DNA, 739 bp, Homo Sapiens
  misc_feature (661)..(661): n is a, c, g, or t
  misc_feature (704)..(704): n is a, c, g, or t
tttacagccttggccatccatatatatttctcttaattttccacaatatgtcctcagcaagtgtaaagttgtagaaaggtgaacaccatggtgtcctgtagaagaaataaataggaggtcattttccaagatgcatggtgactctagacatcatcaggcctcactgtaaaaccttgcttttccggatggtgaatggatgtgaaaagttttactaacacttcttttccaaatgttgaagaattttaatttttttcttgttgtaaaatgttgatgctccagccattgaaaatagtgcaatatgaaaacttgctgatctgctttttgtctgaaatgaatgataacctaacacaataggtctctgcttatttctgctcctcagcaaccaatgatatcttcccatggctgtcacaagtgataggcttagtgtagtcagattcacttcaattctgattccttgaattctaatttcttaaaggcaacagaggatgacttggagtcttgtgatgctagatctctacatgacatgaaatgttgatatctaggcatgtaggccacttccctcgttttgttggtaaggaacttaagtgcagagaaatggtttattcaaagtcccatttagcaagtggcagagctgagtcttggattcaggtcttaccacttnctggcccagtgttgtctccactatccatgacaatggaccgcanacttgcctcatcttcctaccagtcatctgctatct

SEQ ID NO: 162253 - DNA, 784 bp, Homo Sapiens
ccggggtttttccttggattcccccccaggggccttgccatccaccttccttcatggaagggtttctttaaggacaggggccccataaggttcttttttaaaaggcatgtttcccaatggaggtgttctttgggggccatcaattccacgttttcaggggacgatgccatcagcttctgggaaaattcggggtttagggataattctccctgatcgtgtggagactcgtacccgctctcctgcttcagtaaatctccactcgatctcagtgggtttcctgtccataggatccacaagtttgacctggcggtggagcaagggggcttcactagggatcatggttccccggtaatccatggtcttgccaatgtagcggtaatgtgtgttcagccctcccacgaccacccagtttcgctgccggataacttgaaccactttgccctgcttcccggcatccttgccttctaggatctccaccgtgtccccacagaacagataccagtcttcatcagagatgggttccacaaccactgggcgccgcctgatccatggggggttcttcctcttgtctgcaacagagcctggggggctcatcccatagcggtaatgggggggcagagtgaccttggatgccaaggccagcagggcagaaagacgcatgcctggaggttgtaagaaatccctttgccagcaaaacgctcgaaaccttccttgtcagctctccactttccgcggcacttcggattttcagcacatgggccctcagcgtcccctcccccgcccc

SEQ ID NO: 162254 - DNA, 612 bp, Homo Sapiens
gttgctaggtataattttattttatataaaaagtgtttctgtgattcttcagagcccaggagtcagtgctggtggttggagggacctgcccccactggttcatttaaccctttgtctcggtgccctcagaacctcagccagaaaggcaaggaggaaatcagagcaggagcctcatactcttggtgatctattcattctgtgacctcaggggtcacatataaggtcagtgtttctcgtccccgccggatctgcactgccaactgggattgggttcgaacagcttcataaacatcttcagcattttgtaccatctgctccccaatggccaaaatcacatcaccaggccgcagaccagccctgggactcagggtcagcatcatcaccccaatgtagcgccgctgggacccactgattccggaggaggaattcttcttttccccacgatgcagaaactctcgaagacgatcagaaagggatggcaaaggagattccagctgtgaccttcatggtgttcactccaatcacctccccatccaggttaaccaggggacctccagagtttccaaaatcaatagctgcatcagtttgaatgtattccacattggtttgggg

SEQ ID NO: 162255 - DNA, 643 bp, Homo Sapiens
  misc_feature (415)..(415): n is a, c, g, or t
  misc_feature (560)..(560): n is a, c, g, or t
  misc_feature (586)..(586): n is a, c, g, or t
ggctaaaatattgctttattcacatttttgtccttggaggaaaatctaggcacactgcaacttggatcgtgtaaataaaggtacaaggaatgttttaagtcagaaaagggcatcacgcagtcagggggctgtgtggacgagctcaatttcgatgcatctcgggagacccgggcaaaaggccgcttggattccgggaggcaacgcccccaagtcaggatcccttgctcgccgcccccaaccggtcaggatccctggctcgcgtccccaaccggttccgtgtctcacctgggtcctgcaggcgtccactggaggaagccggatggcgcgggcttggtctttcaggaaggctggctggcaccgggcttccttcgaaggctcaggaggccagcccagtgagggatggaggtggctttanagggcgacagttgtgcagcactcatgagcaacagtgcccaggacttttgaagtcacgaagggctcctgaaatcgacagctcaggtcccgcccctggggcgacaaaggagtcttgggggcgtgccgccgggttggaattgtggtancagatttttgggggaggagggcgcanagcagctagaaacgcacatcctcattctggaactatcccaaggcccccatgcttctc

SEQ ID NO: 162256 - DNA, 277 bp, Homo Sapiens
  misc_feature (131)..(142): n is a, c, g, or t
gtaagttactattttcatgtgaatatttatgtagataaaatttgcctcctggtaaccctgtaatggatggggcccagaaatgaaatatttgagaaaaacaagtgaaaaggtcaagatacaaatgtgtattnnnnnnnnnnnngcctattaatagggtttctgcgcggtgcagggttgtaaacctgctttatcttttaggattattcctaaatgcatcttctttataaacttgacttgctatctcagcaagataaattatattaaaaaaataagaatc

SEQ ID NO: 162257 - DNA, 717 bp, Homo Sapiens
aacacagcactgagttttattagggatttcattaaggttaaatttctaggaatgagggagtcctagttagaggacccaaaagcccacgaagcctcctcagatctcatagtgaaccacccgctctggttctttggagggatcaccgcctcgttccaggtacagattattgtaaggatactgctttggtcccacaggctggtagacagggtacacgtcccccacccagcacatgaatatcatgaaagccaggaaaccgaagagctgcatacacatgacatgccaagaaacaggtgtgggggatgtatccacacggttcctgttgtacatgtctaggtgccagtgcatcggttcaccccagttcaacctcaggcccggctggtcccagctataccatggatctctctcatgctgtgagcggtcagggagcttcgggtagtcgccataccccatgccatcatccgggtaaggttcgtagtcttccacacgcatattatacttcttggcggcggcggcccgttcttctggggtcctaggatagggccccgggaacatgtccttggtcatgtgggaggctgtccgtgcgcccagcggcatcacgttccgggatgccctttgcagccactggactcccaagaccccggccctggccaccgccatcttcaccttcttgccctcgtgccgaattcgcacacccacggcctcgctacctagccgtta

SEQ ID NO: 162258 - DNA, 663 bp, Homo Sapiens
  misc_feature (287)..(315): n is a, c, g, or t
tcccccctcatttcccatggatggtggaccccattattctctcatctcggcattcagggaacagtttccttagcggcccctggtcacatgtcatcgggctgggcaggaagcgtccctgggtgcgtgctccacttctccctctcaggaagcccagtttcatccttagtaccccccctcgtgcccgctgtcggctggttatagcacttccactgctactgtcagataggaagtgatcgaagcagggggcaaagagaaagcccatatttgttctaagcagaaaagcaggnnnnnnnnnnnnnnnnnnnnnnnnnnnnncacctgttgacctgagagaagtaaattccagaagggaaccaagaactcttcccttccctggtgagtatttccattattccgttaaggtttaatatgcattcagattacttttactaaataggacaccataaagcttttgttatatattaaatgtaaactgaaaggaatgtaaacatatgtattgttaattataaatatagataagtaatgacataatagatgaaaaagtcttattcagatgtatcacattcattttacattacccacctattgtcgcatggtagaatagttttttgtctctgaatatgtgaataacttgacttgcattgatctttttacatatttaat

SEQ ID NO: 162259 - DNA, 764 bp, Homo Sapiens
  misc_feature (340)..(364): n is a, c, g, or t
  misc_feature (374)..(469): n is a, c, g, or t
  misc_feature (587)..(587): n is a, c, g, or t
  misc_feature (736)..(736): n is a, c, g, or t
ttttaacagtgtgatttattttaatttcaccatattacattagcatacaagtaatttgtacatttaaagggtagctccactggtgtaagacagcaggctgtagttcaaggacccaagatagggagatagatttcctctatcgcagtagtgaacagagacaaagtgcttactaggcaagttcacattcacacagaatttgaccccatctattatctaatcccctccctatcccagttgtcagctttctcaatggaatgacaaggggatatagcttaaaaaaatgtcaatgagctgaaatcatctctactgattctaccaggaacctataaaggaacaaggnnnnnnnnnnnnnnnnnnnnnnnnncttcaagacnnnnnnnnnnnnnnnnnnnnnnnnnnnnnnnnnnnnnnnnnnnnnnnnnnnnnnnnnnnnnnnnnnnnnnnnnnnnnnnnnnnnnnnnnnnnnnnnaggaacaagttctttgaaatacgccagagaattaacattatcagtgggccaaatgtgtggaagatgtattatcctagtctcttttcctgttctctagaagtatgttactggctcttanaagatttcacaaaaatacgctttgaggagaatcacagctttcttgattagtatctacaaggcacttaatgcacattttcagtgaggaagctgatggagagagaaagagtacatgaacattctcttatactgaacgcaaaattctggatngtaaatacatcagttgtactgctctgta

SEQ ID NO: 162260 - DNA, 348 bp, Homo Sapiens
tttaagtttaacatgtacttttattaacaacttaatacaagactgtacactgtaggtgctgaaatcaacccactcctgaaaactgaaaaaccagcatttctataccactttgggctttggttataagtgccatcttctacagcaaaatcacgtcttaagaacaggaaaaacgttccacgggaatggagagattatctatgcataaacagctggggatcatttctagctttacgtgattcactacacgctctggaatgttcagttcccttttctacagtcctaccacgagacatacagcaactaagaacttggccacaggtcctgcctagacacacatcaatatgaaac

SEQ ID NO: 162261 - DNA, 633 bp, Homo Sapiens
ttttcttttaaacatttatttatctactgtacaaaatatttacatcatcagctgcaactgcctggccctttcacctggcctgacgaatctgcagcagggcttggtctctgccaattttccagaaacatgctgacactctcctaggtattcactcatgtctggtctccttcaaagacgctaaaaggccagaagggtagctggccccccaagtacctgggtcacaaggacataaataaaagaactggccaaaataagaaacactaatagaaaattgcccaagaaataacactctctcatctctttgacatattgtaccttttccccacactggctagtatgaaagagtgttatttcttgggcaattttctattagtgtttcttattttggccagttcttttatttatgtccttgtgacccaggtacttggggggccagctacccttctggccttttagcgtctttgaaggagaccagacatgagtgaatacctaggagagtgtcagcatgtttctggaaaattggcagagaccaagccctgctgcagattcgtcaggccaggtgaaagggccaggcagttgcagctgatgatgtaaatattttgtacagtagataaataaatgtttaaaagaaaa

SEQ ID NO: 162262 - DNA, 822 bp, Homo Sapiens
  misc_feature (277)..(332): n is a, c, g, or t
  misc_feature (686)..(731): n is a, c, g, or t
cccggcaaactttctggctttcggtccagagctctgagtttctcatgttctgctctcgaggttctgacagctgtttttggacttaattaaccattgcaagtggaaaccaagaaataattgtagcataactctctctattgtcatgttgcttctttctgcaaatatatcttagaagttagactttaaacctttgatctcccacaccaaaagagaaaataatatttatatggaagtaattttattttagtgtttgtgatttattgtggagagcaggtgnnnnnnnnnnnnnnnnnnnnnnnnnnnnnnnnnnnnnnnnnnnnnnnnnnnnnnnncacagtatttacagagataacagaatggcttagccatgcaaaacaaataactttggtttttccccttttactttggtttaaatgttgaccaagattcaattttttttcctgccaaataaaacttcaataaaagtttagaggcaaaataacgtattttctttttttcccataatattttatacagcatcgagtctaagaatattttatgcatttaatccataccaatgcactacggaagcttttattaaacggagtcactattgcccagacagtaaatggtttacaaatgtacaataacgtatgtttctaaataatgcagaagtggcaaagtattattcctattctcatctgacnnnnnnnnnnnnnnnnnnnnnnnnnnnnnnnnnnnnnnnnnnnnnnatgagtctaagaaacaaacaccagtttttctttcccaggatttacacaactttaaagggaagataaatgaacatcagatttctcctcgtgc

SEQ ID NO: 162263 - DNA, 495 bp, Homo Sapiens
cagttcttagacattttactttttttaaaagaagccatatattacaggatatatagggcatgatatttacatacagtacagtaaacaggttggtttccggtaggatacagtattctttccatgagtataaatcccccccttccctgtgatgctagacccagctggcagacaacagcaacggtggggcaggatcatggggtataaagtctccctgggtggggctaaaaatcaggtagatgcaaaaacatccacaaggggtcttgcagggaagggctttgcttcatttctgaatttcctgcagcccacccaccccctcagatccccaccccaagacttccaaggagctgaggggtcagaggagaggagaatggggtgaagtgggacctacactctgctgaagctgctcatgggtgtggatgaccaaaagtgaggacagaagacgaggccgggggacaggaatgggttccattcaatccagcaacaacatgcaccatg

SEQ ID NO: 162264 - DNA, 516 bp, Homo Sapiens
ttcagattttagtattttattatttccttgtaaaatggctgaactaaattaaacccttgtttcccatttgttctataatttatagtgaaactgagaacaaaactatctttataaatgatagctaaaagtatttccagatatttaaacaatttaaaataaatttcttctgcagagatgcaaagcatctcaacactggaatgaacaaatgccttaaattcaatggagtaaacctttagaatgaagaggaactgtcatttcacccaagccgaagacaacagccttatgcacttgtgtgctctgtctttgctgcttctcgtgtttcaagcctttcctgtgggatcagcacagcaaagtgcaacttaccaaatggtttaatgactggttaattctttcttctcccaatggaaaagcaatggcaacacaacagtagactgctggcttgacaatcttaaacgtgagcctttgcacatgtaggtttatcatcatttgagtatacgactaagcaagtcaatgaac

SEQ ID NO: 162265 - DNA, 509 bp, Homo Sapiens
  misc_feature (43)..(43): n is a, c, g, or t
  misc_feature (83)..(169): n is a, c, g, or t
  misc_feature (470)..(470): n is a, c, g, or t
gaacgtctgaggttatcaataagctcctagtccagacgccaantggtcatttcacagaggaggacaaggctactatcacaagnnnnnnnnnnnnnnnnnnnnnnnnnnnnnnnnnnnnnnnnnnnnnnnnnnnnnnnnnnnnnnnnnnnnnnnnnnnnnnnnnnnnnnntgacagctttggcaacctgtcctctgcctctgccatcatgggcaaccccaaagtcaaggcacatggcaagaaggtgctgacttccttgggagatgccataaagcacctggatgatctcaaaggggcacctttggccaagctgagttaactgcactgtgacaaagctgcatgtggatcctgagaacttcaagctcctgggaaatgtgctggtgaccgttttggcaatccatttcggcaaagaattcacccctgaggttgcaggcttccttggcagaagattggtgactggagtggccagtgncctgtcctccagataccactgagctcaattgcccatgat

SEQ ID NO: 162266 - DNA, 158 bp, Homo Sapiens
ctcgggcccaaactcgtgttatattatcgaggtggaaaacagccatatgtattaggaggggaaactgaggcagaccacaggacggggctccagagggaggacaactaggcccagaaccccttctgtcgtcttctcgcagccgtatagtagtagtaggc

SEQ ID NO: 162267 - DNA, 772 bp, Homo Sapiens
tatcctagttgccataggatttttattttcgcggggcttgtgttttcacttcccttgtggttttttggggcgggggccctttaacggaagttcatccttttttccccttcccatccatgaaaggcaaccttaagaaagcccaggagtgaaaaggggtaaaaagatccccagtataaggtttttgggtgtgtccttcaaagatttccccaacattgtcttaaagggaagtcccagcagtttagctgtttttcacagatcagagaggatggtggggcagccaggagtcatcagtaaacccaggtgagcagtgcaggactgaatgtcgctgtccacttgcaggtgggagtccatgtggagggtgctccttcttgtttctcattgggacggtgactgtgtatagtggaaagcacagagccaatgagggacaggatggctgtggtggagggaaaacagtgcagggctgctctgtctctctgtcctgtcccgttaggactggtgggccaccacaggtttcgcgaaggtgtggctggccattcctttcctcgcgttggggtttctctgtgtcagcgagcctcggtacactgatttccgatcaaaagaatcatcatctttaccttgacttttcagggaattactgaactttcttctcagaagatagggcacagccattgccttggcctcacttgaagggtctgcatttgggtcctctggtctcttgccaagtttcccagccactcgagggagaaatatcgggaggtttgacttcctcccc

SEQ ID NO: 162268 - DNA, 619 bp, Homo Sapiens
  misc_feature (146)..(184): n is a, c, g, or t
gaataaataagcatcaattttattgaatcatgaataatttaagactggtacaatcatcagctttattctctatgacatggggcatgatgtccagcagatcattggcaaatccaaaaacctcatgacaaatgaaaattaaataggtnnnnnnnnnnnnnnnnnnnnnnnnnnnnnnnnnnnnnnncggatggaaacataccgtacacaaaatactcaattcctagttttctctttaaaaatggctagaaaaaattcatcaaaatgcagcactttaatcaattatttacaatttctatgttacaatgaaaaaatgtacatcttatagaacatatttcataaaactgctccactggaaacaactagatcaaaacagcaaaccttccatttaatatccacaaagttggattatttttcctttttgaagtagattcgccacaatcaaatttgaatacagagaattttgaagtttaagcatcaatcaacaaagtaaaagtccccaagatacaacacagatctaggcaagtcttgttcctgtcccactcccaccccacccctaatgaaacttaaaaggtattcccatttcaattatggactgtatcattcttggcagtttgggaag

SEQ ID NO: 162269 - DNA, 1152 bp, Homo Sapiens
tgtcgctgaagcaagaggacgtcgtgtaggtcgtcggtctggagatgcttttcgtagtcgttctctttcgctgtgcgactcgtgcgtgatggtgctgtgcttgttggagaggctctgtggttcttcaggattgacttgttgtagttcatctgcattgtatcctgaaatatgtggttttgatgttctctcgtttcctgtgtgtcctcttggccactactgtgcgattgctctttgtgtgagtaagtggcttctcgtgtggctggggacgacattgtgttgagccccagtcattcgtctggggggcaacccagtgcggctcaaaagtgttgccccacttggtcgcctttaagggtgtcgcccgagagagagctttgacgaacatctttccaagttcagtctaactgctccacaggtccacaggtgtgcaatatgttgtctccagaatgaactttcgggagctctggtaccagagtttgaccaaccatcggggtgtaagtgccattctggtatctgtagatttctggccaggccaaagtcagccagcttgactgtttccaccagcttgtcagcagtatgttctctggcttcagatgctcggtgaacgatgcatattggcatgaaggaaatgctaggcctcttagaaactggcagcatcagagtccttgatcgtttcggctggcaagcctggtgggggtgccttgtccagataatgtccttaggtcctggtctacatgctcaaacaccagggttagccttgatctcccgctcagttcgggatgtggcacagacgtccatcagccggacaacattgggatgctcaaaagcctccagtcgcctcagtaaagccacctcacgaactgtgctgatgggaaggcctcctccacctcctcctccattggggactctcacactcttgagggccacaaagtggccactgtggggatcacgggccttgtacactgtcccataggcaccgacaccaatttcagccactggctcatatcgagaggtagccattctcagatcaagggagagccctggggtgtcagcggagaccgcgagcaggcgcggcgcctaaggaggctggcggccccagcctcgtgccgaattcacaacccagcctcgtacctagccataaggttaggagggggt

SEQ ID NO: 162270 - DNA, 697 bp, Homo Sapiens
  misc_feature (373)..(394): n is a, c, g, or t
  misc_feature (518)..(545): n is a, c, g, or t
ggggctctaagctgcagcaagagaaactgtgtgtgaggggaagaggcctgtttcgctgtcgggtctctagttcttgcacgctctttaagagtctgcactggaggaactcctgccattaccagctcccttcttgcagaagggagggggaaacatacatttattcatgccagtctgttgcatgcaggctttttggcttcctaccttgcaacaaaataattgcaccaactccttagtgccgattccgcccacagagagtcctggagccacagtcttttttgctttgcattgtaggagagggactaagtgctagagactatgtcgctttcctgagctaccgagagcgctcgtgaactggaatcaactgcttcagggnnnnnnnnnnnnnnnnnnnnnngacttgcctgggaggccgcgagaaacttgcattggaagcttcagcaaccagcattcgagaaactcctctctactttagcacggtctccagactcagccgagagacagcaaactgcagcgcggtnnnnnnnnnnnnnnnnnnnnnnnnnnnnctctccagcctgggaactataactccttgcgagaggcggagaactctcttccccaaatcttttggggacttttctctctttacccacctccgcccctgcgaggagttggagggccagttcggccggcgcgcgtcttcccgttcggcgtgtgc

SEQ ID NO: 162271 - DNA, 536 bp, Homo Sapiens
aaaaaggcccatggaatgaagggaagagccgcgcagccctgagcccggagcgattgtttgtcgcgcacccaaaggcaaggagggtggggagctgggaaaggatgcgcggcctccgcgtccccgcgcgcctgggcccggccaaccagcgaccccgcccggtgggcaggcgcggcctcggccatcggcgcctaggggccagtaaccatgacgacggccgttgccaaggccgagagccaatagaggcgtcgccggggctgtttcaaaaacctaaagcaaacaacgaaaaacgctacatcgttgggggaggggaaagactgagaggacccggggcccctccctgaggctcagaccaggcctcgcggccccggccggcgtgagccgtacaaaatctacgtcacttggggtagaaaaacaaaaacaccgaaaagcccacgccggccgctctgaccggccgacacgctcacttgcggcccttgggcactttggggacgctgggcttggccgccttcttcaccttcttgcccccggcggccgca

SEQ ID NO: 162272 - DNA, 994 bp, Homo Sapiens
  misc_feature (419)..(419): n is a, c, g, or t
acaccaattggacgcatggccgggaaaatgggcgtcgcggcatgagtggccccccgtccgacatggggcatttggtgggcaaactcccgcggcaagttcctcaatcccggggagtctggtctgtacgcatccccttcgaaaggggattccgttcgaggcccgcggtggaccactcccacccagggtgaagcagcccaggggggttaggcctttccccataggcccgcaggatcccggtccaggatggctggggagcacgtggcacatttctccagggtggccgcgtagcagccctcgcaatatgccctcctctccacgggcgtagaaatgctggccgcgaagctgggcccggcatgtagaacatacaaagcagcccacgtgaaagacgcgatcaagggccacaaccccagccccatccnccaaccacatcttctccgcagccaccacactggccaaagtactccccgctgggcgggtggttcatgtcgtgaaccagcttcttcgtcagcctatccagctcatcctctggaggctggctcaggggcacctgtcggtctggtcgccgtgacgcatgaccccgacccccattcagctcggccagcgtgctgctcagcaagtctatctcggcgtccaggcttccagggcgaaggccccccctgtctgcagggagcccctgcgtgtgctggagtactccatgggaccccacccacgccggcccccgatcctccggtccccctggggcctggtaacactgctcagatggaagggggcaaaaattgaccctggggtggggctggagtgctgctccgtgggccggtggtggccccggggtgccgcgggggatcgccctcccctgaggggctctggcgggctccggctgcttcgggggcagccaggtgggccccgacatggcctggaaagggggactccagacagcggtcttgaagccccgagcctctggccttcaccccctcttccgtcccgcacctcgttt

SEQ ID NO: 162273 - DNA, 179 bp, Homo Sapiens
gcaggttagcattttattagataaaaacaggaaggagggtgcctacccacccctgcctgctactggctctgaagggcactcctcaacttccccaagaaagaggacgcgtctctgacactgtgatcatgacaggggttcaaacagaaagtgcctgggccctccttctaagtcttgttacc

SEQ ID NO: 162274 - DNA, 574 bp, Homo Sapiens
  misc_feature (175)..(175): n is a, c, g, or t
  misc_feature (349)..(349): n is a, c, g, or t
ttttctaaaaccaaatctttattctctagtttgaaaaggaggggtaaatggttgttctgtttagttccagagaacagaacaaggcccaataggtagaaattataggaaagcagaattcattcattataaggaaggatttctaacaattagaatttctaacaattagaatcatccngggcctcaggaggtgcggaagttcctgtcacctaagtgctcaagcagaggccaggtgtccatatgctagaaatggagaaaaggaaactcaccagcaacttcccctcagctggccctccatcaccaatgcggcagtccttgctgtgacatgctgagctctggaaggagcgaaggnaggggctgcggtgttcagacaagagcctgggacacagtgctgctgacagccagggggaggctctcagcgctggggaggggcgacagataaagcgagacagaccaaggagtaaatgccttggggtctgctctttggggaaggaagaggatggaagtacttaacagcagacgggtctctccaagtctgggtgcctacgcagggggcaggtgggaggggaagggagat

SEQ ID NO: 162275 - DNA, 917 bp, Homo Sapiens
  misc_feature (340)..(398): n is a, c, g, or t
aatctctcctaatttatttcttgtacatctttctacatttcatacactcattaaaaacacttaacacatccaattaaaggttctgcaaagtcttctgctggtgggtgctcttcatcccctggatgtaaagtttactttgtaaacaaacaactgtgaggcaatctagagggttagcgagcctcactttagtttccggagtgggcttcaggtcttgctttgcacatcaatggttcaaaatttatagctgcagaatattctcaagtcatgaatattaggtgtctgtcaatcttggcctgactatcccagtaaggagaattttccttcaaagatatttttaggnnnnnnnnnnnnnnnnnnnnnnnnnnnnnnnnnnnnnnnnnnnnnnnnnnnnnnnnnnncgttcattctcatttagcctctgtttcatctgctgcaccttctgagctgtggtggcctttctgtcctctcgaatacgtttccgtagagcactctcactgttctcctccattgtatcttgcattttagaggaaagtcctgtacatcggtcacctgtcagtttttcttcttctagacctattctgttcccattgtatttttcagtcattattttgtttggtgaatgatcaaaggcaggagataagtcttccttagaaagttctttccatcgtttctgtatactagaatctccctttatacattttgctccttctattatagccatgtatgagaatctcagttgatctggggtctgaataagacaaactgacaggtgaccgatgtacaggactttccctctaaaatgcaagatacaatggaggagaacagtgagagtgctctacggaaacgtattcgagaggacagaaaggccaccacagctcagaaggtgcagcagatgaaacagaggctaaatgagaatg

SEQ ID NO: 162276 - DNA, 667 bp, Homo Sapiens
  misc_feature (91)..(140): n is a, c, g, or t
  misc_feature (187)..(196): n is a, c, g, or t
  misc_feature (225)..(233): n is a, c, g, or t
aatacaacgtttaatcatctggttgatcaagaaatgcaatgctcagtctaggaacagcagcagaaatagcgagagacacgggacttttatnnnnnnnnnnnnnnnnnnnnnnnnnnnnnnnnnnnnnnnnnnnnnnnnnnccagagaccaaaggcagcatccttgctaattttcatctacattaagnnnnnnnnnntcttgtaactaatgtttttattttccttnnnnnnnnntatttcgcttaggcacaatttgctggtggctttagaagaataagccaggtttccacagcatcccccttgagtgatatgtttccatttctccgctttttatagttaaggcatttttttcttctctgacaaagtgtatgttttgttgcttgctttcaggttttgtttactttcacatgtgcccggagtaggaggggtagtacttggaggtccccttcatgcccgaaggggacaggggcccggggctgttgagggccagctcgcctgacaggaagccagcctgagtcaggccgcccacgcctgcgtctctcccgaaggaggcataggcgccccgctcaccgctcttgcctccgagtcccggtcccaggaatgtggatgaagagaggctgctgtgcgactcaatgaaatgggtgccccttcctgaagtcccgcctggg

SEQ ID NO: 162277 - DNA, 487 bp, Homo Sapiens
  misc_feature (317)..(317): n is a, c, g, or t
agttcgacggagactctcttctccggccacgcagacacactctggatagccacccattttgcgagtttcttaatgtagcgatcctgattttcatctatgtacttaaacagggtagtgagggccgccatctttcgaccagaccccagaccgcagatctcgaaggttcttggaaggaagagcaactggtcagtaattgtcagaaatgcagacatagtccacatccttaaagaatgtgtctttccgggcaaaaatcagctcgtctaggccctcagagcctgactcctcacatgccttcgaggcagaatcggacgttgacnaggaatctcctgcgcctgttttctgatacgcttccagggcgtttatcccgccggccaccgggcccttatcatcagtcgaacctctcccatacagcttgccgtctcgctccaccagtacagggctggctgtatgggagagtctccgtcgaaactggtagccagctcgataa

SEQ ID NO: 162278 - DNA, 1105 bp, Homo Sapiens
  misc_feature (728)..(728): n is a, c, g, or t
agcgaggcctgggtggcgaattcggcacgaggcagagtttcaagcgccgcttcctggcggcgcgcgccctgcgctccttcccctggcagagcttagaagcaaagttaagagactcatcagattctgagctgctgcgggatattttgcagaagcacgaggctgtccacacagagcctttggatgagctgtacgaggtgctggcggagaccctgatggccaaggagtccacccagggccaccggagctatttgctgacgtgctgtattgcccagaagccatcgtgtcgctggtcggggtcctgcggaggctggctgcctgccgggagcaccagcgggctcctcaattctacatggcccttaccgtctgcaacccagagatgtgccagctgttcaccaccgagctatgctggactgggatcagatgggaagcggaagctcatcatgaccagaaactgtttccctacagagagcacttggagatggcaaagctgaacctcacactgtaggactcacacatgactccaacgggattgtgagaattaagtcactctcgtgggaagaatttttatatgggaaagcggataaaactttcattggactggaatgtttggagaatgttaaattccaaatcaggaaccacaaactgcgctctaataagacatcggctatctaagcatgtgggttccccctttctgcccgcagttctggttctttagaaaatcaccatanatcagacaatgaaattctggctccaaaatagcattttctttgtgcaaataaaaacgtgtgtatcaagtatgatgttcccccaacttggacccacttggttcctcacaaagccaagcccgctgcagctgccacatccctgggcttacggtgcagcaggtgcttttttcaagacaggaatcaaaatgttaggaacacggcagaaaggggacacctggagaccaaacgcaggatgaggagttctgcagaggtcacagggaagtcacagaacagtaatacgctagcaggggcatgggggtgcagacctggatgtgctggaagtgcttctggtggatgaggcggctataatactccctcagaggccctttgcccctcgtgcc

SEQ ID NO: 162279 - DNA, 887 bp, Homo Sapiens
  misc_feature (98)..(98): n is a, c, g, or t
gaggcattgccatctcccaagtgctcttcgtagggaaaacagtttctgctcatgacgaggttcccactccccatctgaatcccggcccggctaagctnggtggtgaacagctggcacgtctctgggttgcggacggtaaaggccacgtagacctcaggagcccggctggtcctcccggcaggcagccagcctccgcaggacgccgaccagcgacatgatggcttctgggcaatacagcacatctgctgcaatgacaacatctggctggaaggcagagagctgagtggaccgtcgcgacgtcccagtccagctgggccactgtcaccctggggctgtctaacttggcagtgatgtctgcctctaatgagaggccattgagaaggacattccctcggagctgctcaaggacccggctgtgacagtcgctgaagatgtatgcccgggggcggcacatcttgcagatggccaggcctgtgaggccagcaccactgccaagctctaggacagtcctgttagtgaagactgccgggttctcgatgggccattctgcaaggtagagggcggcgtcccatgtgaccaggcctgtggtaccgtaggagatgatggccgtgctctcggagagtgtgaccgagcctcctgagggctttttgatgagttctgagagaaagcaccgggcatatttgacggacggcgggtgcttcacacacacaggatgcttcacagtcttgtgcaaaatatcccgcagtagctcagaatctgatgagtctcttaactttgcttctaagctctgccaggggaaggagcgcagtgtgcgtgccgccaggaagcggcgtctcgaaagctctgcagcaagagttcggtccgcgcgttctcctcggcattaatgc

SEQ ID NO: 162280 - DNA, 516 bp, Homo Sapiens
cggcacccacacgcttagacagctgatatcttattagagggcagtttgtggttcctgatttggaatttaacgatctccagacattccagtccaatgaaagttttagccgctttcccatataaaaattcttcccatgagagtgacttgattctgtacaatcccgttagagtcgtgtgtgagtcctacagtgtgaggttcagcattgccatctccaagtgctctccgtagggaaacagtttctggtcatgatgagcttctgcttcccatctgatcccggcccagcctagctcggtggtgaacagctggcacgtctctgggttgcagacggtaaaggccacgtagacctcaggagcccgcttgtgctcctggcaggcagccagcctccgcaggaccccgaccagcgacacgatggcttctgggcaatacagcacgtctacagtgaaagcttcaggttactgcggagggtttgaggcaggcccaggagcgagcccacggtctgccgacgcggggccaggg

SEQ ID NO: 162281 - DNA, 1010 bp, Homo Sapiens
  misc_feature (878)..(878): n is a, c, g, or t
ctttggagatcagagggtcgacgctgcttcgttgcctggactctggtttccgccctggagcaagccggggcctggtcggcagctgggccgccatggagtccacgctgggcgcgggcatcgtgatagccgaggcgctacagaaccagctagcctggctggagaacgtgtggctctggatcacctttctgggcgatcccaagatcctctttctgttctacttccccgcggcctactacgcctcccgccgtgtgggcatcgcggtgctctggatcagcctcatcaccgagtggctcaacctcatcttcaagtggtgagacagagaagccctccggcatcctggtccccacccccgagggccctgagtcatgtgtttctttttggagacaggcccttttggtgggtccatgagtctggttactacagccaggctccagcccaggttcaccagttcccctcttcttgtgagactggtccaggcagcccttctggacactgcatgatcacaggagcagccctctggcccataatgacggccctgtcttcgcaggtggccactcgggcccgcaggcgctgtcctgggctggctgatgactccccgagtgcctatggagcgggagctaagcttctatgggttgactgcactggccctcatgctaggcaccagcctcatctattggaccctctttacactgggcctggatctttcttggtccatcagcctagccttcaagtggtgtgagcggcctgagtggatacacgtggatagccggccctttgcctccctgagccgtgactcaggggctgccctgggcctgggcattgccttgcactctccctgctatgcccaggtgcgtcgggcacagctgggaaatggccanaagatagcctgccttgtgctggccatggggctgctgggcccctggactggctgggccaccccctcagatcagctcttctaattttcatttcctcaagtcacctctggccatgcctatcctggcctcgtgcct

SEQ ID NO: 162282 - DNA, 1219 bp, Homo Sapiens
  misc_feature (693)..(693): n is a, c, g, or t
  misc_feature (704)..(704): n is a, c, g, or t
  misc_feature (777)..(777): n is a, c, g, or t
  misc_feature (874)..(874): n is a, c, g, or t
aacaaaatgtattcatctttcttggaactgaaaaataaatctatgtacaaaacaggaagagatcaggctcttgtcacccactcctaaccctctgcagatttcctccgggatgctccgagatgggctggacctctgggaggttcccagagggtcggaagggaggtcctgctctgatccggggccagtttcgtcaggaagagggcggggctcaggatgctcataggctgggggcggagttttgtgtcccagactcgggatacgaaggagaggaaactaggatttccaaattctggagcaggactgaagttatttggggcagggagcttggattcgcaagatatggaattctgaagtgcggaaatatactcctaggggctgagtggtcctaggctcccgggctggaggtgggacctgtgctccttgggttaagggtgaaacctcagctcctacaagctgggaggagccctgagtaacgttggtctggctctaggtgagcggttccgaggaggagcttgggtttctaggggctgggcctttaaagactggtaattaggacccagcgtgaggtttccattggccggctgggattctgggagaagaacctatattctaacgactggggcagagccctgggttctgagctggagaaaatcgtgggtttgatacagactgtactcgggaccgggaacctanggtttgggtanaggtgaggcctgtcccctttgggctgggggcagaacatgggctcagagttgggggactaagggcggagcctgnggtccccacaagcggtccgaagtccccagtagttcagagggctttgcgctggcgcttgaggaaagacagagtgtagtcactaggggtggacactttnctgcttcttcatctgcacttgcgactgtgccgtgagttgcagcttgatggcgctcgagttgatcttggtggccaccagcagctccttcatgcccttcatcttctcactctggaaagtgagcactggaccctccggcggtggtgatgctgcgggtgctggcacctgagccgtgctgccaccttcagggcctcgggctgtgccagcgacagtcccaggaggcttccgggggggtcctgacactgcaccctggccggtgcccaggcccttgtccagtgctggcttcttgggcggcgggggctcctctggcttggactcccgccgtgggccccgccgccggccttcccc

SEQ ID NO: 162283 - DNA, 580 bp, Homo Sapiens
  misc_feature (412)..(412): n is a, c, g, or t
tttgagattatttgccctttaatttgcatttaaaatcagtttctttaaatactttagttacaagttctgaatagtgaagacagagtagtagatgctgcaggcactcagtattggctccaaggaattccaatgattgtgcccagatccacgggcaacacaccttagaaatgacctcatccatttcaccactaggtactaacaccctcagggtggtttcctaccccagtccacgtcctccagatctgtgtccctgcagaggaagagacaaggccccgctataacgcaggaagggaccaaaactggctcctcagcccaggtgcttacaagcactttaactcgaaaagctccaggcaatgtgagtcagtctagaggagacctcccctgccctagtcttctacaggctctggccctncctcgggaccaggcttggtcccactggcatgatgtgctagaatctgctctaagaacaaggtgctagaatgaggcccagcaaccggcaaaggggttggaaagggttgctaaagccccactgtgtgagaatgtgccaagagagatctcttggggtaggccattgatgaga

SEQ ID NO: 162284 - DNA, 1179 bp, Homo Sapiens
  misc_feature (95)..(149): n is a, c, g, or t
  misc_feature (197)..(306): n is a, c, g, or t
attttaattgagctttattttctttggagggagggtcttgcttgtcatccaggctgtagtgaatgggcatgtcataactcactgtatccacaacnnnnnnnnnnnnnnnnnnnnnnnnnnnnnnnnnnnnnnnnnnnnnnnnnnnnnnngtaagtgccagcacatgtggctaatttttttacatctttgtagagatnnnnnnnnnnnnnnnnnnnnnnnnnnnnnnnnnnnnnnnnnnnnnnnnnnnnnnnnnnnnnnnnnnnnnnnnnnnnnnnnnnnnnnnnnnnnnnnnnnnnnnnnnnnnnncaaaaatcatactttattcttgagcccattggtcagggtagattcgcacactccctctgcagtgactccaggagcccctctcacagctcagagcggaagttgaggttgcagcttgccattttttccggcatagtccgcattgaagcgctcattttgcgccacggtgaaggtgttcttccagtccccagccatgcttttcctcatgaagggggagatgctgtggtccatgagctcctgggggacggtggtgtagttgttcatagggttcttcttcatctccttgaacgacgtgtgcctgaaccatgaagtgcatggtctcctttggcagggagcgcccccacaaacttccggatcttttgaatctccctttttgggttctccttcatgtcttcatagaagaggtagagaacagggtgggtgcggctcagctcccaccactcctgcacgtgctggtaccaggatccgtaggacacttctccgaccatgaacttctccaggaagctgtcccaggtcccaggctcaaggaagggcacccgcatgaagatgggagctcggtgacacttctccaggtcaccaccctggtagatcatgtccagaatctggcttacccaggtagtgccggacttggggtaggtgctgatgagcaggtcatcaggccgggcctggaagctctgcaggggccccagtgcctctgcaaagtacttgatgagcgggacccccttcacgtactccagtggcgggcgggaggtgtcctggatcagctccatgttcctgagctcttgggaacctggcctcgtgccctcctcgcccgcagtggctgattgtgggtgttgtgtggggaatgcagggttgttctctgagctgagggtttcc

SEQ ID NO: 162285 - DNA, 484 bp, Homo Sapiens
  misc_feature (43)..(52): n is a, c, g, or t
  misc_feature (154)..(211): n is a, c, g, or t
  misc_feature (225)..(225): n is a, c, g, or t
gtcggtaccccacttatgcgtgggcacatagtttattgagaannnnnnnnnnggagatggcaggggtctcatatgttccccagactagagtgcagtggctattcacaggcgccgtctagcgcactacaaccttaaactccgtgggctcaagcannnnnnnnnnnnnnnnnnnnnnnnnnnnnnnnnnnnnnnnnnnnnnnnnnnnnnnnnngtctgccaatactntctatcagtctgtcatgtttactgtcttttcctccatacagaagtttttccttctcagttgggtcaagtccattgacctttctgttacagcttgagttttgtgtcttacgtagaaaaggtgcccctgctctcactttctgcacagctatcaggtccagctcatagcagttcttctatttatccatccactgccccaggagctgcctgggcattcactgccccgcacccctctccagccccaaggtagagctcgggccct

SEQ ID NO: 162286 - DNA, 1088 bp, Homo Sapiens
  misc_feature (99)..(99): n is a, c, g, or t
  misc_feature (101)..(105): n is a, c, g, or t
  misc_feature (111)..(111): n is a, c, g, or t
  misc_feature (113)..(113): n is a, c, g, or t
  misc_feature (115)..(117): n is a, c, g, or t
  misc_feature (119)..(119): n is a, c, g, or t
  misc_feature (126)..(127): n is a, c, g, or t
  misc_feature (228)..(228): n is a, c, g, or t
  misc_feature (240)..(240): n is a, c, g, or t
  misc_feature (285)..(285): n is a, c, g, or t
  misc_feature (287)..(287): n is a, c, g, or t
  misc_feature (292)..(293): n is a, c, g, or t
  misc_feature (301)..(301): n is a, c, g, or t
aaaaaaagcctggggggtaacgggcgttaaaaagttttgggggcccccctttcggaagggggaatacttctttaagagccggggcccgccccctttttntnnnnntttttntntnnntnttttccnncccggggggggaaattaaattacctctttttaattaggccccaaaaattaccaggccaaccctagccagcccggcacggccccgagaattaaggttaaggncacagagcaggncgacgggcggcttttccccagggcccagggcctgcatgcccccgnancttcnntgagccanactccctagggggctggggtttcgagggtcctggagggcctcttccccttgagatgaggggaacggaacagggcaagaggggcgcccccatgggcgcaaggggtccacgctgcgccgcgatcacttctcgaagtagggcaggtagaagaactggaagccccggtggcccttgaccgcgcagtagatgaagatcacgtgatagactccaggcaccaacaacaggaagcccggcacgaagaagatggcgctggagacacctggagagggggtcgcctccagtcccacgccgaccaggatcagcaccagccccagcagcaggagcaggaaggaggccagcaccactcggcggttcttctggatcaaagggtgttgggtccagctgcagcaggtgttgtaggagcgctgggtgctgctgctgatggtgctgaaggaccactgggagctgcggatggaagttcggctggaatccctggccctaacctggtgccgactcccccatccggctccggagaggcctgggctccatcctcatcgttctccaggttctggtagcgcagccgggactgcttgtcctcgtcagccacctcgaaccgggcccgacgctcgaagtgcagcggcccaaagcgcgcgaccccgctggactcgggcccagggcccccgtcctccagggacagctcgaaggcatcatcaatgctgaactggggccgggcggcgctcatggccccggcccgctcaggcgccgtgcgccgccgccatctgcgcatcccgggaattccggaccggtcca

SEQ ID NO: 162287 - DNA, 859 bp, Homo Sapiens
  misc_feature (73)..(83): n is a, c, g, or t
  misc_feature (156)..(216): n is a, c, g, or t
  misc_feature (524)..(548): n is a, c, g, or t
cgagagatggggtgcggggtatgtctcagggatgacgtaaagggggtgaggggatgttattataatctttgtnnnnnnnnnnnagataaacatataggatgtagcgatgtgggattctaattgacggtccgttctttggaattgggtgggaaatannnnnnnnnnnnnnnnnnnnnnnnnnnnnnnnnnnnnnnnnnnnnnnnnnnnnnnnnnnnnttggggagttagggtgtgggctgtaaagggagaaggctacgaggccttcaaggttgttttaatttaaaccaaataattctgagcaaggcatatatacgttaaaaacagatgggcgcattaaaatttcgctattttacaatctaaattgtagcgacatatacaaatactgagtgagtacagtacatgccgaggtaagataagtacattctgggagaatatcactgacgctcaaaccatttttatttccaatatgtatttcaatacatgtttgtttccacttttcccagtgccacgcgcacacacacacnnnnnnnnnnnnnnnnnnnnnnnnncagtcacaagttggattacattagaattggtgccacagttaactttttaaaagcattttaataaccacccaactcttagattttgcagtttagggacttcaagttcagaaccaaaaagcagagaatcgtttcatgtgacatgatgtttctatagacctcttgctctctaggtgacaatgcagagccagggcaaaggtgtttaagctttgtcaccttccacagctttgtggccacattcatatttagataagctcggactctgctcccctcttctggagatggggagaggcaagtgtgtatgtgttgtcacc

SEQ ID NO: 162288 - DNA, 1035 bp, Homo Sapiens
  misc_feature (74)..(92): n is a, c, g, or t
  misc_feature (688)..(714): n is a, c, g, or t
gggaggaatatacggtctaggtagcaggctggtgttgaattcggcacgagggagagagagaactagtttcgagnnnnnnnnnnnnnnnnnnnaatagtaaatatttaattgtttccatcagcaattccagcacaagttttcctggatggtaggcagaatcaagctacccaagggttcatgatgaggtatgggggtcactgaggagacccccagagtcactgacccctcccgccacctccacacaccaggtggccctgcagaatgagggttgggctgatagaatgtcaattaggggagacaggatacagggtgagggaacagggtctagcttgtatatttgcctgcaggaaggagggagggcaggagagactctgcatagaaggactggaactacacatttaagttttcaaccccaatatgcagggggaaacagccaagccactctccatctgtctagtattaggaacctctcttcaagtggtcttttgtcatctctgttcttcttcccaattctgtattccagattccaaattctacaattgaaacccaagttctgaattctaagttctaccttccgagttcctgttacgtgtctgtctcctgcccctaaatctttcctggctcccatccctttccccagcccctctgggcagaatgtctgaacctcctcctgaccgtggtgacgagnnnnnnnnnnnnnnnnnnnnnnnnnnnggcagttccaggcttttctccagcaggagggacttggctcagactgtccagcaagtgggtggcccagtgggaaccagggaattcctgagggcctggcctggcctcctctctttccaccccacctctaggcactggacatactacctttttgtgcaactaagctaaacagaggatttccaagggtgataactgggggactggtgggccttggaaatgagggaattttataagatatatgaaggccctaaaagatcactattctttcatttcagggaaatcagaaactacttcctaacaagggggaaaggaagccacgcaagg

SEQ ID NO: 162289 - DNA, 1000 bp, Homo Sapiens
  misc_feature (125)..(133): n is a, c, g, or t
  misc_feature (211)..(255): n is a, c, g, or t
  misc_feature (435)..(443): n is a, c, g, or t
  misc_feature (983)..(983): n is a, c, g, or t
ggagggggacgggcaggaagcacaggcggcggagggaggcgaaggagggaaaaggggagggggcgaaagcaaggaggcacagcaccccggcgagcgggagaggcgcagggcgggcgagcgaggcnnnnnnnnnagagagccgccgagggaaggcgcagcaggaggggggcgaagagggagacggggagggagcagagcgaggggaaaggcnnnnnnnnnnnnnnnnnnnnnnnnnnnnnnnnnnnnnnnnnnnnnggggccttttcccagtttacagctcctacagagcactctgagggcctgtctgcccagtggaggaggcttccggctggtgttctagggggcatcttggggcattgactcaggtgggggggccactctcttctgggagatgaccctggtaaagcccggcgaaggcgagacagttctctctcnnnnnnnnngagatggaaggttttattagactaggagatttgtgggaggtatgagcgctgggccaaggtggcacgggccatgctcaaggcaccctctcgggtgcggtgaccgccaatgaagccgcttgcatggacgaagatgcagccagggatcccactgacctggtccagggcctcgtcccgaagaccccgccatggctctggcaggggcagccggctttggaatgagtggggctccttgggcacacactgtattcgccactgtccagcctggtcagtgtagataacaaagaagatggccactggaggggacagcccagattccaggtggtagagatgctccttccagggacatgcacctttcgccagttccacaatctctccacttgggtccacctggaatcgctgggcaagggcctcttccaccaaggcccgggctggcagccagctgtgttggtagaaatctaatctctgcagaaactcctcttgaaccagatccattgcacgcttgaaccctgcctcagttcttcctcgtgggaattcgccacncaggctcgctccttgac

SEQ ID NO: 162290 - DNA, 643 bp, Homo Sapiens
agaattttctttgagcaggtttacaatttagcttacatttttcgactgtgaacgtgaataggctgctttttgctttcttctttccagaccccacagtagagcacttttcacttatttgggggaggcttcaggggactgttctcaccttaactcagccagaaagatgccctagttgtgatcaaaggtaactcgaggtggagggtagccctggggcccctcgacatcaccgtcattgatggagcctgaaccgtgtgctcctcggcagatcctgggcatgatgggccgagccacctcggatcccactgattggccagccgagcgagaaccaggctgctgcatggcactgaccgccgcttccagcttcctctgagccgcagggcctgctacgcgggcaagcgtgctgcctctcttctgtgtcgttttgttgccaaggcagaatgaaaagtccttaaccgtggactcttcctttatcccctcctttaccccacatatgcaatgacttttaattttcacttttgtagtttaatcctttgtattacaacatgaaatatagttgcatatatggacaccgacttgggaggacaggtcctgaatgtcctttctccagtgtaacatgttttactcacaaataaaattctttcag

SEQ ID NO: 162291 - DNA, 309 bp, Homo Sapiens
aagagcttaaatgtttatttaaaacagaaatgccaaaccactccactctcaacctttcaagcaacctggctaacaataaactagttcttctgcaacaatgttagagcagaggagtaactcaggttatactgtaactcaaaagcaatactactagaaaacttaaaacacctagcactgcataaagaaaaaaagcaggacaaaatttaaagagaattagctacagaaaaccattcaaaggcatttctactgcctcatcttttactccatccccctttgaactggtttctgtttgcatacttgtttggtggg

SEQ ID NO: 162292 - DNA, 689 bp, Homo Sapiens
  misc_feature (564)..(564): n is a, c, g, or t
  misc_feature (626)..(626): n is a, c, g, or t
  misc_feature (630)..(630): n is a, c, g, or t
  misc_feature (643)..(643): n is a, c, g, or t
tgtacaaataagttcttggattgatagcaacaaaggctcatgttcccccttccctccctatctttgaagaactaaaaaaggaagaaacaaaacaaaaagttcatccccacaacgccagacacgatgcttcttgaccagagtctgcccagaagcccctcctgggagctccttctcaatccgcctcactgcggccaggtcattctgggggtgcctggtcccaggggctgcagcacctagttttatagttgggagaggttgggatagagctggggaggcagctgaggtgttttagtgtcagaagagggctggctgacccccctagctcaatttggtctcacaggtgagaaggtacctggctataaatatgaatactgattgaggcaggcttgatctgggactttcagggcaggcagaatgactatggcccaggtcccacaggatgtgagtttccgggctcagcatcatggtatctggggcccatgtccaagtggagcctttggatgcctcctgccatcctgtgtgcaccctgaggccctataactcgtctcgcatcttgtcaccttnaggccgaccaggcgcccaaatgaatagcaggagcccgctttgtgtcccgcacttagaagatngaangggtgtcgcgtanaaacagctggggctgcgcagctcctcgcgccccctagatgtctggt

SEQ ID NO: 162293 - DNA, 1126 bp, Homo Sapiens
  misc_feature (1031)..(1049): n is a, c, g, or t
acggctaggtacgaggcctgggttttgaattcggcacgaggctattacaccagctttcttgatttgctacctccctggagctccctgacccggacgctctctgggccaaatatggcagcgcccagcaacaagacagagctggcctggagtccgcggctggccgcgtgagtaggtgattgtctgacaagcagaggcatgagctgggtccaggccaccctactggcccgaggcctctgtagggcctggggaggcacctgcggggccgccctcacaggaacctccatctctcaggttcctttgcccaaagactcaacaggtgcagcagatcccccccagccccacatcgtaggaatccagagtcccgatcagcaggccgccctggcccgccacaatccagcccggcctgtctttgttgagggccccttctccctgtggctccgcaacaagtgtgtgtattaccacatcctcagagctgacttgctgcccccggaggagagggaagtggaagagacgccggaggagtggaacctctactacccgatgcagctggacctggagtatgtgaggagtggctgggacaactacgagtttgacatcaatgaagtggaggaaggccctgtcttcgccatgtgcatggcgggtgctcatgaccaggcgacgaatggctaagtggatccaggcctcgcaggagaccaacccaacccgtggcccagatccccgtggttcttccgctcgccgggtccacccgggagctccagacatcctctgcagggctggaggaagcggcctggccgaggaccaccaggaagaagacgacaacctgcagcgacagcagcagggcagagctagtctgagcgggcgaggcacggctgtgccgagaggcgtgggttgaagggttgaaagccttgagtgtacggcaccacggttccgggaggggctctttccatcactctagagaggggtacccctcccaggaatcgggggccacgagggggggaacccccaaaatgagggcccggtccaacacaaannnnnnnnnnnnnnnnnnntggcccacaaaaacacaaacggcgcgtctggcgggacagaaaacaagcgagcgccacatcagaacaggccagctaga

SEQ ID NO: 162294 - DNA, 369 bp, Homo Sapiens
gccaagcgcaagagatcagcgcctgagaagtcgtcgggcgatgtccccgcgccgtgtccctctccaagcgccgcccctggcgtgggctcggtggagcagaccccgcgcaagaggctgcggtgagccaatttagagcccaaagagccccgagggaacctgccggggcagcggacgttggaagggcgctgggcctcggctgggaccgttcatgtagcagcaaccggcggcggctgccgcagagcagcgttcggttttgtttttaaattttgaaaactgtgcaatgtattaataacgtctttttatatctaaatgtattctgcacgagaaggtacactggtcccaaggtgtaaagctttaagagtcatttat

SEQ ID NO: 162295 - DNA, 455 bp, Homo Sapiens
acgttgttgttccattctttctttctccaatttcttctgcttttcacgttccattttttcaagaccttcgcgaatccaagcgggaagagtcctgcgttttactgcgtcaatttgtggaggctcctgcttcacaggaagtgcaataggtgaacgctgacgatccctgaatgatgatggcctttctcttcgattctggggaggtgctggaggtcctggaggtcctggttgccaataaggaggatgaaatccaccttgcggtggaccaaaagcagccccatgctgatagtcaaactggttcactggccccactgcaaaattatcgggtggtccaccaaagttgtgattgttctggttaaatatatgcctgttgtcaggggcaaattccccactgtcctgactgttgctgtcttcagaaggaggaacaatgtccattgggcctggtgttggcggccgca

SEQ ID NO: 162296 - DNA, 487 bp, Homo Sapiens
  misc_feature (469)..(469): n is a, c, g, or t
gttactctgatgtttattttaatgcattttattccacacagactggaataaaaccagaaaatgcaaagcaaaaacaaaaggactggagtcttagcatcagaagggcaccatatatacatctacagttggtggccaatacaagtcattgccagacagtccttgtaggcacagaacagcctagacccagccaagctctaggaactcacggtcccaaggagtctagacgcttgttctgatgctccgaccgtaagaaaaatgtgggagtgatgaaggctttatgatttactcattatagtaataatagcagcctagctaggtgcacaagcagttataaaccatttatattacacagaattattcatgtctcccattctatccttatgccgaaaaattgtacttggatcccagtgagttgttagatgaatagtgataataaggaatgggtaaatcatgcaccatttcaaagatntgttgcactgatttccat

SEQ ID NO: 162297 - DNA, 224 bp, Homo Sapiens
cttctctcgctcctgttcttgttctttttcaagttctttctcacgctcccgttctttttctcgctccctttccctaatttcctctggagatggttgtttttccaggatgccaagcttctcatccaatcgtttcagtttctccgcacaagctgccttcctttgttcttccattcttcgctcttccccttctgtcgtcttctcgcagccgtatagtagtagtaggc

SEQ ID NO: 162298 - DNA, 390 bp, Homo Sapiens
tttttggcggggcaggggttggcgggggcagtcctttgaactaagattctctcaggaaccactgcaggaaatgaagtgattcagaactcaccaattatgaactaaccttcaatgccagaggctttaacagtttctaataaaaattcagttcagatctcaagttcagataagtctgaaaaaacacttcaaggtcatctgaacgaacatattctaccagtactttatataattgtatttacctgttcctaaaactttccgtgaaagaaatgttgaattttcttcagaaatagttttgagcaaaatgtcaaaacaattctcccatgctcagtgtacttttgactatactctgaaaatatttcttcttgttttcctgcacttacctgttagtgt

SEQ ID NO: 162299 - DNA, 1120 bp, Homo Sapiens
  misc_feature (154)..(154): n is a, c, g, or t
tctttcttgttttttatggcctctacgttgtagttggtctgcgtataaatagtccgctgtgtgacacacggtatgccacgggagccttggggcccaccgcctcgtggagggtggaaactgcagcttgttcctcccagtggttggcgcctgtcgncagtgtaagcaatgtcaattgaaaggttccttccaatgtttacgccggcattgtcccatcagggcggaaccgagggtttctaaccagcccaaatccagccctggaaaagccccggacaccagcacgtaacctcagtccacatcccagagctgaccaaagcatctgcacttcctgtggccaaagtacttcccccatgggttcaaacttgatacagatgcagttggaaggatgggcgttgatgggacctgcacaggcttcagttctgggtagctgaggatgttgatacaaccattgccatttgtcaggaagaacatattattgtcattgttccaggagatttcgttgacctcgaacttgaactgctcttctgctttggaacggtgtgtcttggcatcaataaaggtcaccacatcatccttgttgcctacagcaatggtctgcccatcaggactccagcagatattaatgttctcccctttagtgttcacagtggcaatgcattttgtagtcctcacatcccagatgcgaatggttttatctccggacgccgtaacaaataggtcaggattacttggatgccaacaaagctggtccacactatccccatgtccccgataattgttttctttgaccaaccggtccttctccagcaagaagacgctggccgtcttgtcgaaggaccccgaggctaggcgacgcccgtcgcaactccaggccaccgagtgcaccttggcgctgtgcgccaggaactcgcgcgtcttgctgtggccccggaacagctcctgcatcccaagcacgtagcgcgacgggccgctgctcactgagcaccacggggccatcgagccggggccgctctggcccaacgccgagggccccatggctgcagcggggaccgccatgccgagcatccccagcttccacctcgtgccgaattcaaacccagcctcgtacctagccgttaagttg

SEQ ID NO: 162300 - DNA, 593 bp, Homo Sapiens
  misc_feature (127)..(160): n is a, c, g, or t
  misc_feature (571)..(571): n is a, c, g, or t
tacataaatcgaggcttttatttacatcataggacaagaaaaggatacaaaagaagtctcttggtcaagcacatcaagcgaaagctctaaaactcaatactcagtaaggtgtgggcactgatattgnnnnnnnnnnnnnnnnnnnnnnnnnnnnnnnnnnggtaatctgtgacacaatccaaatgcttacactccagggattgagtaagagaaacccagggcagccctgccacagagaatgacggctcaggttgagtgacatctgagattcatcttctgtacccgtgaacctgactcccaggacaacccctaggaggttttgacttttgacattagtgagttaattcttaaccagattcttaagaatttcagggccaaacaggcttgaatgtacggtttttccaatttgggggatgggagtggggaagctcttcctgggacagattcccaggcaaggaaaggccccagcagctctgtcccctaccctgggctctgcctccatctccccacgagaaacttgtgggctgcctggggctcgtcagcagcctgcacaggctctcactctctttcncactcactatgctcctcgtgcc

SEQ ID NO: 162301 - DNA, 318 bp, Homo Sapiens
tgtttaaaaaggctttattcattttttgatcagggaaaaggacaatctcaatgtcaactcgtcacctaatcataaatttgaacttacaggattcactaccctagacaccgcacctactgacaacacaacttaaaaatgaacttacttccattccctaaagttgcatgttgaatgaacagaatcccttctaacagccaacattggtacttggcctaagtttaagaatagcaaaacagcagcaaaaaagaggccaagagcattataatgtgatagcccaggaagtagaatcattgttaagaaagttgcaggcaccaaatt

SEQ ID NO: 162302 - DNA, 582 bp, Homo Sapiens
  misc_feature (407)..(426): n is a, c, g, or t
tccccccaccggcaggttgtactgggccaatcttgctcccattcacctcgatgtgctgtagccactggatgtgcggctgcgggtcactgtacaccttacacatgaactccacgttgctacccagggccactgttttgttggcgggcaaccctgcttgcaggatgggccggtgaggggaccgctcttgtagcctccaattctgtggtcaggtttgaattctttgccatttttcaaccagcgcagtgtggggtttggggtcccactggaagggcatttgaacttcactgtcttggcagccggcactgcatgcaatttcttttccatcttttctggggatgtccaatatggagctacgggcatacggtttggtttggtgttatctgtttctttctcctctgaagaggagnnnnnnnnnnnnnnnnnnnnctccgaggaggggagagcatcttgttcaggcaaggtcggggacggcctagcggtgcagagtgtggctgtgaccagcacagcccagaagaggaggcacttccagctccacatcccagttctgcagttagaggttggtagtcaacctgccggtgggtc

SEQ ID NO: 162303 - DNA, 387 bp, Homo Sapiens
tttttaaaaacctattttattgggtttatctggacattgttgttgtcgttgttttaagttccaggcagccaagcagccatggatggattactcttaaaacctgatcataaaatattgtccacatgggcaaaggcactaatcaaaactgtgaaaggaaaggtttgaattaaggaaaaagttcaatgagacacaagggatttttcattgcaaagtttctctaattttgtatcccaggctgacccataaaggaacaaaatattctgccttgatgacaacatgtgatttagcgtagtctgtattacagaatggccacagcttgaagatggcagaatggtttccccagagtctggagcagaacttgtagttttgtctacacacaatgaccca

SEQ ID NO: 162304 - DNA, 481 bp, Homo Sapiens
gactttttaaataaatagtttatttattcaaaatagttttcttaccttattcacagtttcaagtttgaaatgaaaaaaaggggtagtacctgttcttgatcaacggctccgtgttgaaggcactgacagcgtgtctgggacacggctctgtgcagtcactgaacggcattgctgctcgctgcactgccggcggcaagctggcccagcaggtggacgataacgttgattctttccagaagagtcgcggttttatttgcagttgctctcaaaagctgggagtaaatgtgcttgttggttttgagaattgtgtcatcttcgatgttattgcttgttttctttttagttgaagatagcagtttaatggactgaaggagaagaaatgacaaccgagactcaaatatactgaggagtttcatcacttcttctcgattgagactaggagaagcatcagcagctgcagcggcgtcaccactcttaggct

SEQ ID NO: 162305 - DNA, 382 bp, Homo Sapiens
tattaaataaaccagtagaaaggctcctatttacatccaggttgtcagtttaagctcaagtaatatgcaaggcacaattcttcctttctccagctttagaaaaatcaaccacatggcccagccctgaaggactgaagggagcttgtgcgggatcccgtcatcctggactctccacacagcgtccacgcatggatggccatgggcatgagtctctggatctccctgagggtagcccagcctcggcctggagcacaggggcctgtgatctgagaatctcagatccagaatcaggagctgggaagagaggacttttccaagggtctcctcccccaggccctggggagtcccttctggatgggcaggccctgggctggcggccgca

SEQ ID NO: 162306 - DNA, 824 bp, Homo Sapiens
ggggttttccggccgtgcgtttgtggccgtccggcctccctgacatgcagccctctggaccccgaggttggaccctactgtgacacacctaccatgcggacactcttcaacctcctctggcttgccctggcctgcagccctgttcacactaccctgtcaaagtcagatgccaaaaaagccgcctcaaagacgctgctggagaagagtcagttttcagataagccggtgcaagaccggggtttggtggtgacggacctcaaagctgagagtgtggttcttgagcatcgcagctactgctcggcaaaggcccgggacagacactttgctggggatgtactgggctatgtcactccatggaacagccatggctacgatgtcaccaaggtctttgggagcaagttcacacagatctcacccgtctggctgcagctgaagagacgtggccgtgagatgtttgaggtcacgggcctccacgacgtggaccaagggtggatgcgagctgtcatgaagcatgccaagggcctgcacatagtgcctcggctcctgtttgaggactggacttacgatgatttccgggacgtcttagacagtgaggatgagatagaggagctgagcaagaccgtggtccaggtggcaaaggaccagcatttcgatggcttcgtggtggaggtctgtaaccagctgctaagccagagagcgcgtgaccgaccagctgggcatgttcacgcacagggagtatgagcagctggccccccgtgctggatggtttcagcctcatgacctacgactactctacagcacgtccgagtgacccgggggtcctc

SEQ ID NO: 162307 - DNA, 313 bp, Homo Sapiens
agaataacaaaaaatattttactaaaacataagatttacagaagtttccagacaagccatacaaaatggtcacaagctttttttgaaggggggaatctacacttgacagcaatgttattagtgagggctgtgatgtttgtttaatgttcccattttggttccaacaatcaagcttgtccatctacagcgtctaaataaagttagacttggctagagcatattctaaagacctggttagctgcttttaaccaatgcaattagatcaccaaaaaagggggaaaggagcccataaaattaaactacctcccccctc

SEQ ID NO: 162308 - DNA, 1108 bp, Homo Sapiens
cttacccctcacggtccttaagtctcggtcgccctcgcctcgcagctgccacccgcgctcagctgcccgcctcctcagccagccatgctggagcatctgagctcgctgcccacgcagatggtgagggcgcaacccggggacctctgcacgccgttcttgtgcctggcagcttcgaagcccatgttggagcaccgacccggtgctgcgctgttccgggcccggatggttaccgtccaccctctttcccgaattgcctcctgggtccccttctcttctactccgcgagaatctcctgtccattctccgtgagggtgtttcagttcctcccgggaagcccagaatttaatatcttgcccaggcccttaggagagcgggagaccctgatgttggggttaccctgtgccagagttgtgaggtcagggcaggaactgtatgttctcggcggtggaaccaattctttttttcctctgcttcaccccaggattacaagggccagaagctagctgaacagatgtttcagggaattattcttttttctgcaatagttggatttatctacgggtacgtggctgaacagttcgggtggactgtctatatagttatggccggatttgctttttcatgtttgctgacacttcctccatggcccatctatcgccggcatcctctcaagtggttacctgttcaagaatcaagcacagacgacaagaaaccaggggaaagaaaaattaagaggcatgctaaaaataattgaggttttcatgattcagcacctgcttttgtttctgtgagatgagctaaattgctttcataccccagataagagctaaaaccacctaatgctcttatggcacagctgtgtatagatttagttctctttatacttcatttctagcccagttgggttttgatttatataagtagtttagaccttctcttcataatcttgctctgagatggggaacagaacacacaagtatgaagtttctttcaggtgtaaataatgaaaaataaatgcctcataaatgatagtacaatgtaactatcaaagttttataattcattatgagttaaccattttaatgtttccaattaaacctcatagtgc

SEQ ID NO: 162309 - DNA, 996 bp, Homo Sapiens
aattcacacgccccgttctccaaacagtctgccgttactacctcccatatccaaaaagctccccaaatggcccgcctgaccaagaacttcccaatcccagatcatccgctgtatccatggccgataatgcttttcaggcattccccgctgtgaacgtgacatcgggaagaaaataatggcaagcctcccttcttgggatcttagtccagacagcctgcgaggaccagtcatgatggcacccagatgcaccaaagtgatggtccatatcttcctgtggcaactttacccacgtaactgaccaaattggaaataacacttgaggctggattcgatgtgaaaatatctgatcattgtccgctgcagagaaggtactctccataaacagaatacaaggacatttgcagctataatacctgtcacagtccgctggccatcacttaggttattccaccactcctgttaatctccttttctgaagtctccttctttttgtggtcttatggctatccaaccaatcagcttttataccatcccaataactctggaccctggatttcagtgattcatattgccaaatagcagcctgatccaaatgcacagcctgtaaagcccaacagtacataacatacaagtttttatgagactccttataggatagggagaaggataaaagactgtttcttccacaggaggtatcaagagcacttctcttgtatcgcttcagccacttgtccctgggtctgatcttcgaggttcaaccattcctgggtgacttttctgaactccgcaattatttctagttgaactaaagaacgttaataccatgcgtctcgaggatgctgcggcggggttaggaccgcagtgagctcctcgcatgctgctggccgcccaccgacgcaccccacgcctggccgcagccccagcctctctgcgcccagcctctccacgccatcttccccctcgtgccgattcacaacccagcctcgtacctagcca

SEQ ID NO: 162310 - DNA, 902 bp, Homo Sapiens
ggcacgaggcgatgccaaattagcatttagtattttgcacaaagtctaagggaccatggctgcctgccttggggaggaaccatatctccctctgggccgcttctggcctcttggagccatgggccaaaggccaaggggatgggcagaggtctgtgtttggtctggcccagttccccatcattaaactcagcctgactgctgcctacctctggttccctctcactgcccctgcttcccccatcacagcatggactactatgctaagggtaaggccaaattgcctgccattgccaattcagcatagacatggctttgttattgtttcctttattataaagcactgaaataagttaaataaacaggtgggaggctgggcagtcccccagccggtttgtccacagcccctgggggcagtggaggtgaatacagggcccttctcactgagctcgtgaagtgcctcagtcaaggcaaggtcccctggtccatatgggcccccccgcccatggggttgggctggtccttatagtgcctacgttagtctgtgtggagcccctggccagcggggggagaaaaaggtggcttctggtccgtcttctggtggcgcttgtagttgtcccagtggcccgtggtataggcgcaggtggcacagcggaagggcttctcgcctgtgtgccgcagcatgtgacgtttgaggttcatgctctggttgcagctgtagttgcaaaggctacaccgaaaaggtttgtcaccagagtggatgcgaccatgacgcttgaggttggccagattgccacaggcataagggcagagggggcacttgtagggcttctctcctgtatggacgcgctggtgccgtttcaggttatccagatgagcagaggcataaggacagcgggcgcagc

SEQ ID NO: 162311 - DNA, 321 bp, Homo Sapiens
  misc_feature (54)..(66): n is a, c, g, or t
  misc_feature (196)..(208): n is a, c, g, or t
ggcaggtcatgcacacagttttgataaagggcagtaacaagtattggggcctannnnnnnnnnnnnccacaaggcattctctaaagctatgtgaaattttctctgcacctctgtacagagaatacacctgcccctgtatatccttttttcccctcccctccctcccagtggtacttctactaaattgttgtcttgnnnnnnnnnnnnnaaataaactgacaaatgacaaaatggtgagcttatgatgtttacataaaagttctataagctgtgtatacagttttttatgtaaaatattaaaagactatgatgatgacattt

SEQ ID NO: 162312 - DNA, 636 bp, Homo Sapiens
  misc_feature (121)..(121): n is a, c, g, or t
  misc_feature (366)..(412): n is a, c, g, or t
gagtgtgcgttggtgcataaaaggcggatagtcaatcaatacgtgacggcgcacaatgtggagaggggtgtattctcgtgctatgactggcgggggggataaaaaatggcggcgaggggtntctttctggaaaaaggggtttaaacccgggaaataaatattattttgaaattcacactcgggggtaaaaatgtccaagagaaaccaaagtttagaccaccccatttccattaaaagcataaaaaaggcccctggtagttttcggtggaaaggaaaaacttccaggtcccacatttgtgggttaaagttttttcctcttcttcttcctcttcttcctcctccctgatggcaccttcagctttgatnnnnnnnnnnnnnnnnnnnnnnnnnnnnnnnnnnnnnnnnnnnnnnnccctgatttgattcaacaccgagtcggcacagacacaaccagagatggcctgggtccaggctggggctgcacgggctgtgttgaatcaaatcaggtgtgcgtcaggagccggctgtgtccttcctgccacactcggggattcattccttagaaactgcccaacgcacgcggagggtcctgagggcttcacccgcagccccaaaggggcagagctggggtcacgc

SEQ ID NO: 162313 - DNA, 494 bp, Homo Sapiens
  misc_feature (351)..(368): n is a, c, g, or t
tttcagaaacaaaacataaaaaaattatatactttattacaaatggtaaactcagagtgctccaaatctcttatttacaaacaacactgggcaggatacccaaacaaacaaacaagaaataacttacaaaggcatgaagctgtttattgacagtaatcagctttcatcaaattaaaaaatatatatatgtacatacacagttaacgaaggcaggccagaaagagttcatctgtaagctcagcctcgctctcacaaacctccctcctgccgcccctccccaaccctccccccgctttgtgttcttaaggagtactacagaagcaatctacagtctctattgcagtttgtaannnnnnnnnnnnnnnnnntttaatactgaatgagatcgaatgttaggtccatgcagttcttggtcaatgttaacgaaaagtccaacgttccgttcgcgcggggacagcccgtccgcaaagcggggcagcccgcaggcggccgca

SEQ ID NO: 162314 - DNA, 1040 bp, Homo Sapiens
  misc_feature (241)..(241): n is a, c, g, or t
  misc_feature (428)..(519): n is a, c, g, or t
ggacccaccagcgacttcatgcacagtaagaccgggctgtgccttatgggttctgtatttggtcttcttccttggtgtgaggctgggggttgctgccccttgaggggtgttctcacagctcccctttgcccccaaggccttcgatgcctccttgcccacgcctctggttctgttagccttcggccacccagggcggatcgaagtccgttggggtagcacgggtgcctgctgggctgccaancagagtctcatccacatatgacgtcctggccttgacccggtagccacctcggcagcggtgctgaaggccgagggtctgcatcccactgacggccagctccacgggggtcttcatgctgcctgtggtccctggtgacagcaggtgtgctctgccggccaggccctgcttccgaggctccctcctgcannnnnnnnnnnnnnnnnnnnnnnnnnnnnnnnnnnnnnnnnnnnnnnnnnnnnnnnnnnnnnnnnnnnnnnnnnnnnnnnnnnnnnnnnnnntgaagtcacatgtgtaggtcacacctataaagctgagcatcttggctcgtaggcatcgggatcctcagggacccgtccccgcaccttcttcccaccaggtctggacccgtcggtgagggcgcgggggcgcgcggtgcatccgggatccccgtcaatctgcagcccggaatgcctggggccccggacccccggcagcctaggccgtcccggggcaccgcgcgcggacggactcacccgaggagccggcacaggctacgtgtgaacggcccgcgaatccagaaacccagaacccagcactttgcacccagcaaccagggagcagccagcagcactgcggacgcggcccggaccattcgcgcccgcggatggggggagtccgcccaggggcgggcgccacgctcctgaggcccaggaggtccctaaacatggagagggtcctctggtgccactcactcaggtgcgtgtgtactaggccgccgcctcgtgccgaattcacaacccagcctcgcacctagcctata

SEQ ID NO: 162315 - DNA, 667 bp, Homo Sapiens
  misc_feature (144)..(162): n is a, c, g, or t
  misc_feature (358)..(383): n is a, c, g, or t
  misc_feature (420)..(420): n is a, c, g, or t
  misc_feature (424)..(465): n is a, c, g, or t
  misc_feature (538)..(538): n is a, c, g, or t
atgaatgaaattctttgtttttaatttcacacagtttaaaatacaatatgaaatcaggctacagtatataaaaaactctccagcaaaatgatgtgccagcatcagctactaaaataaacaaacaaaaaactccgccataagaannnnnnnnnnnnnnnnnnnaaaaaaacatcgacacttacatcgctacatctctaagctacctcagttctgatttttaaaaagcacctgcttttcctttttttcatcttgcttctaaattttcagcttttaaaaaatataaattatatgaaaatacaagttggaaaatagtcaaacacaatataacatctttttcatccctatacttctcagcttnnnnnnnnnnnnnnnnnnnnnnnnnngttcaataactgaggcagtattcctgataattttatnttannnnnnnnnnnnnnnnnnnnnnnnnnnnnnnnnnnnnnnnnngttccttgaaacttctttggaatgtaggtaagagttcaacaaatttatatagaccccaacagagtaagcgggntcacagcatgactagaagagagatggtgtatttctcaccatgaaggttaggcaggttaatgctgtaaaacccagagtgttcatctccaaagtgaggaaaagcacatctgatctttgaatgctacctcgg

SEQ ID NO: 162316 - DNA, 1151 bp, Homo Sapiens
cctaggatatgtcgcgccctagcagtttaatcaagtagtcttaactagacaagtttgttaatctgtaattactttacatgttgttattaaaaatttatcttttacatctgatggctcaataatgtctatctcaacctttactgtttcacacttacagtgaaaataaaacccagctatcatactgaaggtagattggactgttgtttcttcttgaagtatcttctgaaaataaacaccaccaaattttattagtacattaggagcttagcgtttaatgcaatattatatatgtgttaatatctctctttctggattttaatggcaaggatattggattccgactcgactcattacataccatcctgcaacaggaagtcctgttacaagaggatgtggagctgattgagctacttgatcccagatatcctgtctgcagggcaatctcaacaacaggaaaatggacaccttccaacactttgctccctggcaacccctaatatttgggatctctcaatgctatttgccttcattagcttgctcgttatgcttcccacttggtggattgtgtcttcctggctggtatggggagtgattctattgtgtatctggtcataagagcttgagattatggaggacagccaaactacaagtgaccctaaaaaaatacagcgttcattcggaagatatggccacaaacagccgagcttttactaacctcgtgagaaaagctttacgtctcattcaagaaaccgaagtgatttccagaggatttacactggtcagtgctgcttgccatttaataaagctggacagcatccaagtcagcatctcatcggtcttcggaaagctgtctaccgaactctaagagccaacttccaagcagcaggtagtaccctatatatggtgaaaaatacccctgaactctgagagtgaccagtaaccatacatctgtggggtggctttaagaagtgggctgggattagtgagagcgatccggaacaggagcctaattacagatggttagccggcgattgaggttgtccctctggggccaagagtcagtctcaaagggagcctatttacagcaatcctgggctttatcacttgcccggatatggggagggccacctttcgcggggagacacacaatg

SEQ ID NO: 162317 - DNA, 168 bp, Homo Sapiens
ctcttgtgtcaatactttattttggtgtaaagacaggaagctggaaaatacactgtatttaaaattttcttggttccccctcacattgtggaaaccccctccccccagagctaatctgttcaaactcaaatacttaaaaattacagcagccaaacaaaagcatggggg

SEQ ID NO: 162318 - DNA, 1323 bp, Homo Sapiens
  misc_feature (19)..(19): n is a, c, g, or t
atttattgtgttgttgggngtttaaaaatccaagccccttttttctaatgccccatggccatttcttcatccccggggattgccctttgccttaaagaattaacccttggccctgtgggcctgggggacccaagcctgcttttattttgcacagctaaaggagggttgatgggggggttcaacacccccacccattcctaataccagtccatcagtgttcacattttccaaatgagtggaagtgcctgattttgtccagtgcccccacccaccagtggtgagttttccccagggggtttggctttgtgggggttactgccttgctgctagagcagcaggactgtctgcgtagcgcctccagcctgggacctcactcagttcccagggtattcaaagacggcagcggctcccattccagtcccgatgcacatggacaccactccgtatgccctcttcccacggcgcttcagctcattgagcagcgtgatgacctgtcgtgccccagtgcagcccagtgggtgccctaaggccactgcaccccccagggggttcaccttctcaggggggagtcgtagctttttccacacagtaggcagcctggcttgcaaaggcctcattgattctcgaagatgtccacgtcactcactgtcagccctgctttttgcaaaagctactgggatggcataggcaggtccaatgcccatgatgtcaggtgggaccccaaccactgcataagacctcaggaccccaaggatgggaaggcccaactcttctgccttggacctcccgggccagcaggatggcagctgccccatcactcacctggctagagtttccagctgtggtagaaccatctttcttgaaggcaggcttcagtttggccaggccccccatggtggtgctgggccggataccctcatcctgggtcacagtgatgctcctcttggtgcccttgtcatcatggaccgtggtggtcacaggcacaatctcagcttggaaacagcccttgctctgggctcttgctgccttctgctgggaagccagggcaaaggtatcctgcttctcccgtgaaatgccaaaccgctcagccacattctccaaggttatcccacaggccatgccaatgtcataagacccatttctgatgccacctgctatgctggccactgcctgtagccccgacgaacactgtctattgacagtggacaaaggcacagtctccgggatgtcactcagaaactgggcgattcgggccatgattcccccggccccaggctgcagcacatttccgacacagatgtcccccacgctgttccggcctca

SEQ ID NO: 162319 - DNA, 893 bp, Homo Sapiens
gcctttggacctcggggcccagcaagattggcagttgcccccatcattccacctggtaagagtttccagctgtggtagaaccatctttctgaaggcaggcttcagtttggccaggccctccatggtggtgctggggcggataccctgcatcctgggtcacagtgatgctcctcttggtgcccgtgtcatcatggaccgtggtggtcacaggcactatctcagcttggaacagcccttgctctgggctcttgctgccttctgctgggaagccagggcaaaggtatcctgcttctcccgtgaaatgccaaaccgctcagccacattctcagaggttatccccataggaatcaggcaatctctggccttgtccttctccatcaagcgcgaagtaatatttccagggttccctctgtcagccagggacatggactccaccctgctatgctggccactgcctgtagccccgacgaacactgtctattgacagtggacaaaggcacagtctccgggatgtcactcagaaactgggcgattcgggccatgattgccccggccccaggctgcagcacatttccgacacagatgtcccccagctgttccggcctcagattcacgtccttgagaaccgcggtcatgactgccgagagaagctcgtcgggggtggtgtccttgaagccgccgcggcccgcccggcagatggccgtgcgccgcccgtgcaccaccaccacgtccgcggccgaggcctgcggggcaccgctcaggcaaggcgcggcctgcggcatccagccggaatcggccggacccctcaggtggcccagcactacctgcagcctctgcattgcgcaggtcaaccctgcagaccagccatcccgggaattccggacccggtacca

SEQ ID NO: 162320 - DNA, 186 bp, Homo Sapiens
actggctgcttggagtttattttccgcttggtgccaggtgcacagttccaggtgtcaggaaagctagcgagtgctggggccgggcggtagagagcggggctctcactggtttttggtgtctgctgtgttgatgcgaaggtctgcttgctgcagccgcctagtttacagggtggggggtgggaggtg

SEQ ID NO: 162321 - DNA, 635 bp, Homo Sapiens
tttttttgactgggctgttttgttaatttaaaggaaaccctgaatctctgcatcatgtaatttttaacttttaaaaaaccaaaacatgaaatccctcttaacatgctactgtatgttccatttaccgaagaaagcaaagtgaccaagtagaagtgtataggacaagatagtacctcagcctgggccaaggggagattcaagtaatttatttttttgcagcccagtggcagagagtctcttactcaggttgctaaagggagaatgtaacaagagaattgacatcactcccttcttcaaagcaacaaggcatcttgaaaactcaacttcctggtgaagctctgttgtgggctaaggcatcctgttcccagtatacgcattttgagatcagatagagttgctcttccaggagtcagcacccacgctcatgtccgtctttcagttaaatctccttggtttagtaactcttgtggatttactgcagttaagacagaaacttcatatgattgcctccctgactgcatggtcaccaggtgatgtgtcacatcaggcactgaagacagggaacgtggggatccttcagccagcacctcatcatcaactcccaggatagaattggtattgggaggttcaaggcc

SEQ ID NO: 162322 - DNA, 640 bp, Homo Sapiens
  misc_feature (109)..(123): n is a, c, g, or t
  misc_feature (199)..(221): n is a, c, g, or t
  misc_feature (549)..(565): n is a, c, g, or t
agggttcagttccagctgattttatttccttctcaaaaaaagttatttacagaaggtatatatcaacaatctgacaggcagtgaacttgacatgattagctggcatgannnnnnnnnnnnnnncccccaaacattgtttttgtggccttgaattttaagacaaatattctacacggcatattgcacaggatggatggcnnnnnnnnnnnnnnnnnnnnnnncccttaacggaactgccttaaaaaggcagacgtcctagtgcctgtcatgttatattaaacatacatacacacaatctttttgcttattataatacagacttaaatgtacaaagatgttttccacttttttcaatttttaaacacaacagctataaacctgaacacatatgctatcatcatgccataagactaaaacaattatatttagcgacaagtagaaaggattaaatagtcaaatacaagaatgaaaaacgcagtacatagtgtcgcgaactcaaatcggcatttagatagatccagtggtttaaacggcacgtttttgcttatnnnnnnnnnnnnnnnnngatgtggtttacaagttaaagctacagaatccctttttgctgtaattgcaccagttttaaagcctctggacagag

SEQ ID NO: 162323 - DNA, 396 bp, Homo Sapiens
aatgctttgatatttcaatgttagcctcaatttctgaacaccataggtagaatgtaaagcttgtctgatcgttcaaagcatgaaatggatacttatatggaaattctgctcagatagaatgacagtccgtcaaaacagattgtttgcaaaggggaggcatcagtgtccttggcaggctgatttctaggtaggaaatgtggtagcctcacttttaatgaacaaatggcctttattaaaaactgagtgactctatatagctgatcagttttttcacctggaagcatttgtttctactttgatatgactgtttttcggacagtttatttgttgagagtgtgaccaaaagttacatgtttgcacctttctagttgaaaataaagtgtatattttttctat

SEQ ID NO: 162324 - DNA, 470 bp, Homo Sapiens
  misc_feature (351)..(351): n is a, c, g, or t
  misc_feature (364)..(364): n is a, c, g, or t
  misc_feature (371)..(371): n is a, c, g, or t
  misc_feature (405)..(405): n is a, c, g, or t
  misc_feature (419)..(419): n is a, c, g, or t
  misc_feature (454)..(454): n is a, c, g, or t
tttttttaaggatacatgaaaagggttttatttatttaacaaacagaccaattgaacaaacaaacaatggaagcaagtcatttgccaaaaggaacacagagggtcatgatgatctacttcctccaaggatttcagggttcccagacgcctagttttctgtctagttctcggaagatgttattcttggggagcaataggtcctcgagtttggggctctttcaggttctctctccatttccccattctgctacaatagataaacaaacaaaaacaattctcacttccagaagatccccattaaataaatccttggaaaaagaagcagccgctattttccaccccacccccttnggaaggcttcagntttccgnaaaaaatccagttaaaatggaaacccttggggcnaaggaagggggtgnaagcccccggtggccggaattttttgggccccgangggccaaaattcccca

SEQ ID NO: 162325 - DNA, 972 bp, Homo Sapiens
ggaaatgcaacattcaattttccttttcttggcccaattccttgcttatttcagtggggcgtttccttaacccaggaccacatatttctgtgctcttcgataggatcagtcatagtaagtggatgacattccaaagtagcccgaaattctttaatcattcgggcaatttcccagtttggaaaactactgtcatactcctgagctctcttcattctcatttcagagttctgggccttcttctcttctcgcttgttcttcattttttccacttccttcacaagacatgatttcctccgaactgagttcacagggtttgcagaagagctgcctcggatggaatggacttgctcttccatctcctcgctgaccatcctcaatggtatttcagccactgcagggcaggaaggcctagtgggggcaggaggaactgaaaactgcttgcgggagtttgcagctgcaggcagctccacctccatgtcattctcctgagccgtgatgcgaagctctgagacagtggacatgcgagtggagcggctttcgaagactttcttttggagcaggaaattttggagttgacggatctccgtttttgtttctggattgttacattttcctgcaagggcagattgtccttcggatgtaagggaagaagctgtaagagttctgggtttattgcagccacatcatcaaaatcaatctctttgccctttgtggcacctccttctgcccattccactgaaacacaggatttctccaagttcacagtccttacattggcactgtgaattaaaccgctcacgagtccccttgacctagggaccccgctcctcaccattactgcgttggatcttgatagcgagaccgggaaacaggcgggcctgaagcgacgagtccatggccattcggagagtcagcaaggaagagaaacgcgcaataccaagaaaccctcgtgccgaattcgccacccaggcc

SEQ ID NO: 162326 - DNA, 842 bp, Homo Sapiens
gctttcttcttttattcggaagcagacacagggtgggaggcagtgcgacacctcctggtgagaaccaggataacagcagtcagagtcagggacaccaccacagccaggcctacgcccagcagcaccactgacggtgtcagaaggcaaagcccactgctctacttcatggtcaccactcctgatccaggaagatcagtggcccccacggtgacatctgcttcttctgtcacactgtttctggagtcattagcaacatgtggaatgacactccactgtgaactggagtgtatctggcccgggtcgaggaactttgaatgcagaagaggcatcagctgagaccgtcgacaagacagcttcttttattttcctggccatcaaggaatatttggtcttcttcctccactgtccttttcttcttcttctctttgagggcactcagtacagtctcctttgcacatgggtctggggcattacttgcatggtgaggacagtgttgagctgattatctgctctggtatcgcagaacgcgaaaatcttctgtcagcgaggggcgatcctcagagtcactgggctacacaccatcctggagttgcgaggggacagcacagccttcttgtgataaccattccagcacactgtgggaagtacccccagacaggaatactgggcctgatggatcggatagcgtctctgacgtgtattacaaaccgatctggtaaagtccacgatccgtggggaagcctccggagggtcgagagaggagtggggacagacggtcgcagtgtgacccaagggcgcgggaggcggttgaacccgcccgggggcgtggccccgcgccaacc

SEQ ID NO: 162327 - DNA, 314 bp, Homo Sapiens
  misc_feature (60)..(60): n is a, c, g, or t
gaggaaaagaggcaagtttatccaaaagtgttatggaaatccccagaagaaggacaatgngaaaggtccggtggatttgctgacgtggggacgagggtatgcttgtgtttttacaggagatggacaaactcttttttgtgcccttccaggtgtttttgggggtggaacgggagaccggagggatccatggtattcaaccgtgggcctgttaccttccagtacgagccatgagccagcggaatctcttggcacaaacttcactggcactggtggtggaccttcaacacctcttcatcacatcacactgggattca

SEQ ID NO: 162328 - DNA, 880 bp, Homo Sapiens
  misc_feature (19)..(19): n is a, c, g, or t
  misc_feature (89)..(89): n is a, c, g, or t
  misc_feature (99)..(99): n is a, c, g, or t
  misc_feature (106)..(106): n is a, c, g, or t
  misc_feature (175)..(193): n is a, c, g, or t
  misc_feature (751)..(785): n is a, c, g, or t
gtgctccaggccgaaaccnaggtgtggacctccaggagaacaacccagccagccggagccagtgctgcagcaactaagccccccttgcntgcccgctgnccccgcntcctccgcctgattgacccgactggaatccactctaaccaatcgcacttaacgactcgggccaccactnnnnnnnnnnnnnnnnnnntccaccatgatttctccatataattttgatcataggccggagtgagtcattccacctgcacctttctgtacaaatactaattcaattttaagtcttaagtcacttttttaatatatatgatcttctgctcttcccacttcctcccctttctactgctctcccattttcccttgctgggagtagccacatgctcttgccccccaacccttgtatatggggacagtggggtcagtgcagctaccctttctttccctcctgcggaacagcggacccagcaagagcatccacatcctcactttgttcggagtggtctttggtttgggcggtggggcagaccttgggaaggggcttaggaagggagaggcagctcttccttcagctggctctcatcaggctgcagccccctccccgctcccacctccctgctgggaaaccacagcattatcacagcattattgtgacagccacgaacccattgcccacaacccctccaccctcggtcaccccaacctctggctctgagccctgttctgaccaaatcatgatgatgagtatttnnnnnnnnnnnnnnnnnnnnnnnnnnnnnnnnnnncggaaccaactttttctgtattttgtattgtatgttttcttcaacatgtaaccaatcagtatcttgtcaatatagtcagccgatcgatcgacctc

SEQ ID NO: 162329 - DNA, 127 bp, Homo Sapiens
cctgccgggtgttgtatgtgtggtgacttgcggatttatgtttcagtgtactggaaactttccattttattcaagaaatctgttcatgttaaaagccttgattaaagaggaagtttttataatctaa

SEQ ID NO: 162330 - DNA, 885 bp, Homo Sapiens
gtaaaaaaggcagataatctcgtagtacaggtacattatgacatgcacggaagagtttatcatggcatggaaagagctcattcttcatgtgagtgataccagaagttggagaacagcatgaagaagatggtgccatatatccagatgaggtgaataatgactgggtactggtagttacagctggacataaagtagtactgggagatgtgcagtgagaccaggacaaactggatcagctgaatggctgtcatgtgctttttccaccaaaggtagggttgtgccacagggccaaaggcagataatccgtagtacaggtacattatgacatgcacggaagagtttatcatggcatggaaagagcccattcctcctgcccgtctttctttcggagaataaagatcactgtgtccatcagctcaatgaacttggagaagaggaagagccaggccacccgaaccatcctaagtgcctcagggctgttggaatagtccacagggtcacagcgccaggtataggtgctcagccagcccgacatcaggaactcatagacaatgtagagggagagtgccaccagtgagaagttgtagacaatcatgaagccacggagctggaagggcttccgattagccatgatgcgaggcccaagtgagagaacgaagtacacgtaggtcaggagaatggaggtcattagcaagggggaccccatcagagggtagccctggatccggggatctgcgtgcttcatcacctcttggtacaagttcacaacagcctccatcctggctaaggactccgtaggggccaggcgggcaacggcggagcgctcggagggagcagggccagagagaagtccccggggccagcctgcctgcctgccacttcctc

SEQ ID NO: 162331 - DNA, 1053 bp, Homo Sapiens
  misc_feature (509)..(536): n is a, c, g, or t
  misc_feature (779)..(794): n is a, c, g, or t
gaaaaatataaaattttaataaaggctacatctcttaattacaataattattgtaccaagtaattttccttaaatgaactctttataatgcataatttacagtataagtagaacaaaatgtcatgacaaaagtcattgagtacaagacttgtaataaaaaggcataaaatatatttatacataaacccctttcaaaaaacaagggaaagcttgagccctcaatatagggcgacacacggagcgggtgaccgtgcaggtacaggtactgtactgatttaaagtcaagcactagagatagtggattaatactcttttgccgtacactatatacagatgtatagtacaagtaacaatggcaaacagaatgtacagattaacttaacacaaaaacccgaacttcaaaatgaaggtgtgtggaggaaaggtgctgctgggtctccctacaactgttcatttctttgtggggcagggggtagttcctgaatggctgtggtccaatgactaatgtnnnnnnnnnnnnnnnnnnnnnnnnnnnnggaactgtcatttccacgaaagcacagcggcagtgattctagcaggcctcagggccctgggcctggggaggctacatgagggggagcctcagtcacaggatcaacctggggcccgaaggagcagggttccctgcctctccctctgcaacagatcatcccatccaacacaacccccaaaatgttgatgatgacgcaacatggtcaaccctcaagacctttaagacaaaacagagcagcataggnnnnnnnnnnnnnnnncgcaccaatttctgcatgtgtcaatggtagggcaccattttaaaaagtctgtctaaaacagtctgtcttcacttggagggacgtagtgcaaagcataattcctctgttagtgaagaaaccatgaacgcactcctagctcaactcctaagtttagtcagaacaattaaaacttcctgtctcccccttccaagtttaaagcagcatatccataaactggggatgggggaaatcaactgttctataaatatcagtaaggacc

SEQ ID NO: 162332 - DNA, 654 bp, Homo Sapiens
  misc_feature (82)..(134): n is a, c, g, or t
  misc_feature (305)..(327): n is a, c, g, or t
  misc_feature (539)..(539): n is a, c, g, or t
  misc_feature (621)..(622): n is a, c, g, or t
aaaatttattttaaaacatgaaacccaagctgaatagaaaccacagaaattacattgacgagatttttagtatttgccaagnnnnnnnnnnnnnnnnnnnnnnnnnnnnnnnnnnnnnnnnnnnnnnnnnnnnnacaaagaaacacagcgacagtacatacagccatggccctacagaggctggaggagggggaaatgcaaaatggttcaggcctcagttcctggatgttaaatcacactggggtgggggaggtcagatgcccaggccgggggggtaaaccaggaggctgagtcttaaggagatnnnnnnnnnnnnnnnnnnnnnnnacaaatatgaagtggttcagtacacaaccattatggttaaacacaaaacaaagatcccacaggagaggccctggtcccccgcctgcccccttgtctggggttctggggtccagggggctgcttcaccacccctctcagggctggggcagagctggccccagggcaggagcaaatgttgcttggaactcgaattgcatagtgagatgggtggngtgggcaatgggccaggggctgctcccaaccaggcccattcactaccaaccttgccatgacatgtggggggccctggggtanntggatgcctgctggggagcactctcagtgagg

SEQ ID NO: 162333 - DNA, 985 bp, Homo Sapiens
cgacagcgccggccccccgggggggtgcggccgccccgccccccagggaaccgcccaggcccgggcattccggcccaccccccggcccctcgagacggccaccacaggcccctcgcgcggggagaacatccccgaccaggccccggtggctgccaccgttctggtgatgtcctgtaccgctcagtagagcgggaggcgtagaggctgaacctgcgggacttgatctgaactccagataccatccagtgagatgcacgtatatcttgccctgcccctgccagggctgaaaacacatcctgctctagcggatggtacctgcccctgggccacaagcctggtgagtcctccaaattgcccatcctgctgattacgctggaagacatcccgaagaggcttcaaggcttcaggagaaaagaggtagatgccgcagttgatgatgtcactgataaatgtgctgggtttctccacatagtgcaatacctgggcacaggcttcaatatggtgttggatcatagggacccctgccacaggaaacaatggtttgggcacctcaaaagacaaaggtctgaagcgagttcccttttgagggcctccaatcaggatcaccgctttgagcataatggtgactgctacctctgtatgttgaaccccaaatcaaaagacaggttcccttggcatctcaaacactgaacctattgacccccctccagtcctaatacggacgactgggtctaaatctctggattcggaggattgattgattgctgaccctctgaaccccacaactgactctgtccaataaacctggcctctcattgccagggattgtgggaccaacacaggggcgggcgcaccgagggccagccaggacctcggagcccgctctccgtctacgagggtgtcccctgccccttacccctgccgccacccctccaccagctccctttaccactagctcccttcactccagctctccttgtgccga

SEQ ID NO: 162334 - DNA, 499 bp, Homo Sapiens
tttttactggctagaaatttttattatttgcgaggcagtaagtgctcttgagagcaggcacagtgctgggaacactaggccccttcgggacaaaccagggccttaaggaaaggggcttcggctttggcttgagggaaggcacataactgggacaggccctggccgggagtattcagaagccaagtgggttgctggtgaccacaccaccccgctccaccaaggccttggagatgcttttgaagttgcggtagagctcttgctgccaggggtcagactgcagggcggccatgccctctcggatccgagctgcagcctcgatacaccaggtgtcacagagcattttctcatgctgggccgtggggtggccctcactcagggatcttgaggccctcgagagaaccaccaccatggcatagaggtcgatggccccgtctgccagccgctgcagcagaaactgttcattgacaatccccttctgtcgtcttctcgcagccgtata

SEQ ID NO: 162335 - DNA, 1054 bp, Homo Sapiens
  misc_feature (834)..(894): n is a, c, g, or t
ccaggagaaataactttatttgaataggacccgagacagcatattgggctaaggaggagaggtaaggttccaaaaccgcagtcaaagctcatcaaccaaatggactctacttcccagcaaccttgcagttagtgcaaccaacaaaaggcctgctggggaatgtatttgccactaaattccccaagtatgccaacattacaaaaaagataggtttttcatcataattgaatttccacaaacctccccaatcacaagtattataagtggaagtaaaaaatcacattttacagatctcaaacttgtcttcaacatttagttcatcatcttcaaaaaatagctatatgatctaaccaagcagcaacaagatggccaggccatggcaatcctcttcccatttcccctagccactcagggctcaacagcagggtgaggctcaggtggaggtagggggtggggagcacaagggctacattcccccagtacaacatggcatctgaagcttgatgggagagcagaactggtgagacttgagggaagggtccagggcctgtattcagtcagaatcactgctggaagaggaggaggaagaggaggaatgcttgccatgcttgtggtacttgtggtgcttttggtgcttgtgcatctttttatgagctttcttcattttcttctgcatcttcttgtctactatcactgctggtccaaccatgccaggagccaagggattcacaggagggattccaggggcaggcggtgggtatggaggagggtagggacccaacggttggcatcctggataccctggctgtggcacaggatgagggggcccacctnnnnnnnnnnnnnnnnnnnnnnnnnnnnnnnnnnnnnnnnnnnnnnnnnnnnnnnnnnnnnagggtggattaataggtggtgggtgggcaggattggaacctccagggcacccaatattggggggatatggatttggccctggctgcccggcattgggattccacatgtttaggtgtgtcctccagcctttccaccgccgcctgggcttgctgcgttcccc

SEQ ID NO: 162336 - DNA, 743 bp, Homo Sapiens
  misc_feature (317)..(478): n is a, c, g, or t
aacaagacttttatttgtacaaagcattacaatcttctcagcattcttcactcacaaacttttcactgtatttaacaagttaacagtgtcaaactacacgtcactacctgtcaaaccccaagcactcaacttagaaacaaaaagcgcttggagcactgaatggaaacagaaaaaggctaagaaaggccaacagagatattttagaagcagttaaagaggatggtttagggagagttagattcctgagcaccatcagatttcccttaaggttttttgtgaaggggcttcacaaaataatttttagaagacatgagacnnnnnnnnnnnnnnnnnnnnnnnnnnnnnnnnnnnnnnnnnnnnnnnnnnnnnnnnnnnnnnnnnnnnnnnnnnnnnnnnnnnnnnnnnnnnnnnnnnnnnnnnnnnnnnnnnnnnnnnnnnnnnnnnnnnnnnnnnnnnnnnnnnnnnnnnnnnnnnnnnncaaaacgtgagattagaactaaggaatcaagagatcagaggaactaacactttggagtattaagcaggttatcaaagcttacagactgacagaagtgagaaaaggaggcagatgagaaagtgggatggggagcagaggagaggcaggagagagaaaggaagcaggaggcacagagggagaaagctgtgcctagagaaatcaagtttggcactcgtcatgaattgaagaatgaaaagccatagtcacaagtctgggagatggacta

SEQ ID NO: 162337 - DNA, 686 bp, Homo Sapiens
  misc_feature (364)..(390): n is a, c, g, or t
ttcactttattttaaagacaatgattggcatacagaaggtatgcactcgcataaaataaactttcatgaaaagcattaaaatccattataaattaatttattaaataggtatttggtatatgtgatggttttattagatattacttttgtgtattgccaacccctcccccaaagtcaaaacaaatcagaaaatcccataactccaatttacactaaataatttattttcccaaaatgtgtatgtgttctgaggcgtgacacatgatacagttccattggtcattctctatcaatcataatatgacaggacacaagaggctaaaaatggctcatcataatttattttatgttaaaatgtacagcnnnnnnnnnnnnnnnnnnnnnnnnnnngaagtgactgactaaaaagagaacagataaatacaagagtgtcgctggatcctattttatacaaggattacgcctctcctgcttggcccttactgtcaccctgtacaggtacaaaggctacaaaaaaggaagcaatataaacagacacaaataacttttttgcttttttacatgcgatttgtaagcttagtttgagctattcacaagctacttttctatttttccttaaaaaataactccaatattttataaagatagaaaaatctacagatggaatgaaaatgtaaagttagagg

SEQ ID NO: 162338 - DNA, 1009 bp, Homo Sapiens
tttttatttttagaaaaacagagcaaagtttattgaaatttcaagctacatttggaaaatcaaaatccaaatcctggaaccatacatcaggataaggtgtcaaaaagtggaaagtgttcactctcacaaaacccgctacagacaagctttctgggcacacctcccaggctccattggatcaaagccatccccttgttcatccctcatccacagtaggacaccatccttctgttcacttgaaagttttccacaataattacaaaacaaaacaaaaaacgttttcaaatgacactgtgaagcccaaactgatcttctctcaaccccattctatgtagtcagcaccagtgaatggtgggtttggcattcaaaacaggacttcacgtttcagtggacagctggggaaagggttgcagcagcaaggcatccgtggccgcattcagaggctggcccccctccttgcctttactctcgagtcttacttaacctaaaagacaaactgggtcaacttggtaaatgaacacagtcaaagacttagccataagaggtaagggaccagtcaatactcccaaggctggttaggcccttcaacatgtaggtggatgtgtatatgtatacatcgctacactaagatacagatctagccctatgggtatatatacgcatttatggctatatagaaaaactatgccaatactaaccaaacagaactttgtaagcggtcatcccaaagctgtaatcccacactgggctgtgcacaaagccatgcattataccatattaaccaacagaaggctgacttggctcaatctctcccatctgtgtcccctgccttcacgaaacagaggagaagagagaggttgcctctgcttaaaacacaagtggcttcttcataggaacagtcgttgtcaggtgaagctgttgaagatgtccatggagatgagaaacagaccccttaaactttctggagcaaactggtgtcacacctcaaactacccttctccttgggcag

SEQ ID NO: 162339 - DNA, 462 bp, Homo Sapiens
ctgggattgaatgtctttattaaataaacgagtaaatggtagcacaaatcaccatcaatatttttggaaggattggggacaagatgtcgagtcagaatataattgttcatttcagggtctcaatgtagctgaagaactgtgcccactgatcagtattacgtattgcaaatgcaggaggtaaggctaaaataggacttatgccgttcagaagattgaattgaaaccttaaaaactatcataatagtaggaatgcatgttaagatttgataactttctttagctagagttttcaacccacagttaggagcaaagttgtaaagtgagtaggtgtgaagaagggacactcttttgagaaaagaaattagctacttctaaaatgattcaattattttccctattttcattttccataatatttcctcctgttttatacctctaactaccctcctgatttctctgagg

SEQ ID NO: 162340 - DNA, 834 bp, Homo Sapiens
gctcttcttgttgtttgacattttattcttgatgtagctgaatgtacgactgacttttgttccactcttccattcagaatctttcttggaggggctatgtggcaggaaattatagttctcttctgttatactctcagtcagattagcactggtattgtggaaggtactgtggaagggccgtgaattgtccaatccaggatggctgattgtcattaatgagatggattttgtcaatggagaggaaatggctgatgtacagtaattaaatccctgctgcttagatctgtgacatatctgctgatcaaacatcctatgttctctctggtctgactccagatcctcttctgaaagtgacaccaaagagtcaacccgttcctcaccactgaatgggtgtctgagctcttcggcatttgcagagcttacttctagagatgaggatggcttgtttccgacaccagctcctcctgtcaagccttctagactgaaactccggtggttcatttctgcatcgctggctgcagttttcccaggcccccagctgtgcctccggaagggagaaagagagcgcatggagctccttaggacagagcagtttgcatgcacttcagtgatactgtccatctcctcctcctccacgtcgcctgggtcagcaggctcactctcactttctcgaccctcagcttccatcccatggctgtagaatccatcaaggctttgcgactcgcttgaactgtttggctttaaaaactgggagagagacacatcactgccatgagaagaatgttggtccagtgaagccgtgttatcggtgggaggactggatacggtgaattc

SEQ ID NO: 162341 - DNA, 1008 bp, Homo Sapiens
ggtaagtccaggctgtagcttctttgcgctcctatgtcccaagaaactgcagcgggcacccggcggctctggctgcgccagggcagggcgcgctccgctccgggccgtcgggtctgaggtatgggtcgttgctgagtctctcccgccccggccgcgcgttaccggcagtctgctgtcccggcggccggcaggaagggcgggctgggcagctgcttgaagaactgccggaggccggccaggtcccgcgtgagctgctccacgcgctggtgcaagcttctcgttctcagccgacagctccaccaacttctgctgcatctcctggttgcgccgcttggccttgtcgcggctcttgcgcacggcgatgttgttgcgctcgcgccgctgccggtactcggggctgccgcggtccgggcccctcttgccggcgctcttctcccgggcggggccgggcgcgggggtctgcctggggctgctgcgcggcggctccggcgacgtgggcggggtgggctgccctgcggccgccaagctcaccacggtctgtgcgcacgcggccacctgcgcgggcaacagcgagccgggcgcgtcgccgtcgccccagtcgggctcgcgcttgagcaggcggggagcggcagggcccgggcccaaggggcgcgcggggccgccgggaagaagctccaggggccccgcgccgcccgccttgtgattgctgttgaagaggtcggcgaagagctcgtcgtggcacagctccagggtgggcacggcggccatggagtcgatgtaggcgctgaagtcgatggcgctctcgtcgtcgtacatggcgggggcggcggcgcctggctcgcctagggcccctggctcggccccgcggcccggcttgcccgcccggcccggttcgtagaagggcgcaggctccgcaggccagggcgcgccgcgcgccgggccgtccaggctgaagagcgcggcgctcatggcggcgtcgggccgggctctgcgtccaagcgaggctgt

SEQ ID NO: 162342 - DNA, 970 bp, Homo Sapiens
  misc_feature (756)..(795): n is a, c, g, or t
cgtcgaactgttgttcacacctgggttttcgacctctaatggccctggccccgggtttacagtgtctgggctgtctaacgtttctcatccagggggtggggccccatgtccctaatgggcaccgtgtgccccgcactggtatggcctagcctgaacggctttggttaagcacgttttttcccggccctctccgcgcagctttggagttctgcctctctggaggattggaactgcgtgtacccctcagagaaggtatttacacctgatgaggcaagcggtacaagcacaatccaggcaccagccctgaccccttagctctgctctgaatgactctcctgtggttctggctgcctatattctagagaagttttccaccctggacccatacggaattccgatacctggaggatggagccctggaaaggaagttctccctggacgacctgctgaccaacgtcatgctctactggaccacaggcaccatcatttcctcccagcgcttttacaaggagaacctgggacagggctggatgaccccagacgcatgaccggatgaaggtctaagtgccccctggctttttctgccttcccttttgagctattgcacacgcctgaaaagtgggtgaggttcaagtaccccaagctcatctcctattcctaacatggtttctgggggccactttgcggcctttgaggagccggagctgctcgcccacggacatccgcagttcccgtcggtgctggagcggccatgannnnnnnnnnnnnnnnnnnnnnnnnnnnnnnnnnnnnnnnagtgccctccaggcttttcttggggaagataccccttttctgaggaatgagtttgcctccgtcccctgcccatgctgggagcccacgctcaccccctcacccctccaagctcactccccaacccccaactccgtgtggtaagcaacatggctttgatgataaacgactttactct

SEQ ID NO: 162343 - DNA, 454 bp, Homo Sapiens
cagggcccggtctcgagcgatgactgcctcctcgaacttgatcatgagcgtggtgcccttgtgccagtgcgccgtgaccttggcagggaagccgctgtgtgtgagcaccgcctccacgatgcccgccgtgaagctggcgcagttgagcgtgctgttctccttgggcacggagatgtaggtgttgatgagcggctcgcgctcgatgatgtagaaggtgcgcgcgtcatcgttggcctgctccagcttgtccgcctccttgccgaagagcgccttccacacggcgcccttgacgaagagcaacgcgcctagcaccttggtctcacgccgggcacccttttcgcgcgccaccagcgcatccagcacgcgcgcgcccacctggcggcccagcgcggccaggcgcgcctgcagctcggccacggagaagacgcggctctggcagtgctgtaccagctcg

SEQ ID NO: 162344 - DNA, 1031 bp, Homo Sapiens
catctccaaaaaagtttattagcatgattaaaaacattttcttgaataataacagaaagaatttctaaacatgaaagaatatcagtggctataccttaaaaccagtatttggaattgaatggacagctttattgccagtcttcaaaaaacaatccattgattggttccatgaagtcgtgactattgctttgtctgggaatgagtccctactgcaattaagtataaaaaatatcttccatcataattggagtgtgacctgcattggagagtggctctgagtaaagagttgataaaaatccacaaagagttgggtttttgtcttttaaaaacattcctttacacactacaaagaaataattagtattttggctttttaaattcctacatgatatttagaatggcggtccccaagggtcctcccttcacgtaattgtgaacacagaccctcttccaagggcacatcccggagggtgcggactctgaagacttcgacctccacgtgtttatactggtttgagaacaaagacagcgtcatccagaacgtagtagtccattatacatgtcgccttcacacaggtatggtagtctggtgaaagcttcgataacaaaaccagcttttctgaaaacttcaggcagactattcacttgttcttcccagttctgtcctttgatttccaaaatttctgatggtttctcccacttgccacctacgttttccacatagggatgaaaggggaggacaagggcaaggatgaccctgcctctagttggctccaagacacttctgatatcttttaacaaagtcaggggctgatcacagcggtccagcaagttcaggcagctgatgacatcatactggaaccccgtattctgccattcatttataccaaggactccattgatagatgttctagacataaacaggctaaaaacagatgacacaaaagaatgatataattggataaatagccagcccgatttctcaatgctgttgtttaagaagatctgtgttccttgatcaaggtaactct

SEQ ID NO: 162345 - DNA, 288 bp, Homo Sapiens
caatggcttttggcgggggcgttccccaaccctgccctctctcatgaccccgctccgggattatggccgggactgggctgctggcgctgcggacgctgccagggcccagctgggtgcgaggctcgggcccttccgtgctgagccgcctgcaggacgcggccgtggtgcggcctggcttcctgagcacggcagaggaggagacgctgagccgagaactggagcccgagctgcgccgccgccgctacgaatacgatcactgggacgcggccatccacggcttccgagaga

SEQ ID NO: 162346 - DNA, 448 bp, Homo Sapiens
gcaaagggggtgatgggagggcagcatgggcacagtgcagccccagctcgctgactgccggtggaggtgcaacccactggggctcagcacaggctcatggattgcccggggatgggggccctcttggcacagggacctccaggtacggcacagggtccgagaaggggcctggtcgggcccagtagtccagggctcgaactcggtaggagccagagacagcacctgtgtctgggctgaacacaaagaggttgaaggtcgatggcttcctgctgaccggggtgtacgccttaccgtcctgagagaactggatctcgtatgtccacaggcacttggagcccacgtgttcatccgaccagaccagaaccagctgcccttgggtcaggggcagggcgcggagccgcgtgacctgcccgggcggcttctcggggcgcgcacacacgtgcaccag

SEQ ID NO: 162347 - DNA, 632 bp, Homo Sapiens
  misc_feature (237)..(268): n is a, c, g, or t
cctttttgtttctacatgaagagaaaaaatagacaaggtgaacgcaaatgcattttcacattcaaaaataactgcaggcctcctagtggctctctacatgatcataaatgaaacaagttttaaaagaaagattaatgctgacttgtgaaggtgtcaaacaagaagcggtgagatggagatggaatgttagaaagattgcacgtcgatgacaaagaagcacttacggcttccatcacnnnnnnnnnnnnnnnnnnnnnnnnnnnnnnnnaaatcttaaggatgctattgaagggttttttgataaagtagccaacagcaccaaaaaataacagaatggatttcctaatgaaatcaggcacaggtctccctcatgtgacccctccaaggcaggcagtcttttccgtcttcctcgctcgcttttcttctttcctggaacagatgcatagtgatgtgctggtggagagccactcgctcccgtctcctcgttccacctatggttaggaaacaacgtccgccttcagctgccacaaccgcccagagaaacaaaacgggggtgccccggcttcccagatcacaagctcatctggcacacggcagaagacgacagccaaagcaaagccatttcaagtttc

SEQ ID NO: 162348 - DNA, 1037 bp, Homo Sapiens
agccgtccaggtctcagtgctgtgccccccccagagcctagaggatgtttcatgggatcccagccacgccgggcataggagcccctgggaacaagccggagctgtatgaggaagtgaagttgtacaagaacgcccgtggagagggagaagtaagtgcaggcgcccaggtctcagtgctgtgccccccccatgcgcctagtggctgtttcctggggcatcccctccaggccgacggcatactgagcgggtgggaggacgccgggtctgtctggggaagtgaagttgttgaggcactcccggatggaggcgagaggtacgacaacatggcagagctgtttgcggtggtgaagacaatgcaagccctggagaaggcctacatcaaggactgtgtctcccccagcgagtacagctgcagcctgctcccggctcctggtccaatacaaagctgccttcaggcaggtccagggctcagaaatcagctctattgacgaattctgccgcaagttccgcctggactgcccgctggccatggagcggatcaaggaggaccggcccatcaccatcaaggacgacaagggcaacctcaaccgctgcatcgctagacgtggtctcgctcttgatcacggtcatggacatagctgcgcctggatgatccgcggccatggatgagatccagcccgatctgcgagagctgatggagatcatgcacctgcatgagccacctcgcacccgactttgagggccgccggacggtcagccagtggtgggtggtccctcccagcaggcaagagccccgcagtgccgagaacctctcaagccaggcgggaggcccgcaggtgcccctgaagggccttcaggccccaacatgccctgtgctgactcccaggtgagaccctgagccggatgtggcgtcagatgagctggacgactcacaggtgcgtcagatgttgtgtgaacctggattaggctaaaagccttaacgctctggtttgcttgggccggggtagcctgcacagaggaattgagggaggcctgcc

SEQ ID NO: 162349 - DNA, 423 bp, Homo Sapiens
gagattttaaaaacactttatttaataaaagttaaacatacaaaactgaaataatacacatcctaaaaattaccttcttccattaataggaagacccttttctatgcatgtatttggcttaaactcaactcaggataactgtgatgatgttcacttacaccaacaaatgcagacaacctgatctaattaacaaaaattacaaacagctaaatgaacataatatacagggaaattatcgtcagattaatgcacaagaaatacaagaaatttttaatgatgaaatattcagtattcttgttcattaatttagccttgtgtttttacaaaaatagtatctacactgtatacagggctatacatcagctttttgttctcccatataaacatcacacatccaaaacatggtaccactgccgtaaatgg

SEQ ID NO: 162350 - DNA, 1051 bp, Homo Sapiens
cttttggtgtttcccccggtgcggtgttctttgtgtggccccccactcacgccccatcaagtgtgaatttgcgttctcccccgcctgagagaccacccgcggactctgtttcttgcttttcttagaacaaagggcgaagttccgtgccaactataacaggttaagggcgtgcttcttcagagaatcatcgcctgtcctgcttgaagagcagaaggcaagacggtggatccggagctcggcaggaagggggaggtagggacacgtcaccgtgtccttcagccacccggttacccgggatgttggttagcagccagtggaggtactcaagcatctggctccagcaggtgcccatccaagctagtgagtagcaacgtccacaaggagccctcttctgcctcataggtcacctctggcgcttgggcagcctcggttggagtcacctcattgccacagtacacaggcatcaggtcatcctcacccacagcgtaggccacgtgcagggggactcggggcacaaaggtggcaccgtggaacaggtctcggtagaggccgtaatactcagccagacgctgcttgtggtaggggccacaggtcctctcccactcggcccgcacggcatccagcgggacactggctgtgcggaggcgggcagcccgctcctcttccacattggcccgaagctcctggatggcctgtttccgttccagtagctgttgggtccgggagactttgggtggaggcagcccaatatcaatcttctctttgggatctgtcttctccccgaaatactctcggtaggtccgccaccagtgcggggcctgcgcctcctgctctgcccggcgccggtagcggtcgaagctccggtacttctccagccgctccaggttgctcaagtcgatgtcactgttgggcatcggccccagcgggggtgtccgcggcccaggacggccgaggtgctgaagccccgccatctccgacactcgcacagcgcggctcgccaccaggcgccgccctcgtgccgattccaacccagcctcgtacctagacctaa

SEQ ID NO: 162351 - DNA, 132 bp, Homo Sapiens
ttttctaattgagcaactttattcacataatttctacaccaagaactcgaggttatctctgatggaaccaatttcactaatatttactttaagggcagagaagtcaaccaagtcctcacagtctcaagaatc

SEQ ID NO: 162352 - DNA, 692 bp, Homo Sapiens
  misc_feature (430)..(467): n is a, c, g, or t
  misc_feature (554)..(554): n is a, c, g, or t
  misc_feature (575)..(575): n is a, c, g, or t
aaacaagacaatgttttaattgtaaaactaactcgaggcaggggtgggcgggctggggctgcgctgaccgggcaggaacctggttcttcaggcagtggttctgccagggccaccccgcaggacagggaccatctgtcccccaataagggcaggggctagagtgttataaaatgacaatataaatagacttctagaaaagaggaggctgtccaggtgcagtagtcatttgctgcaggggctggagagggtggggggccctgacctgtctccccatccagccacagaaagggggcgcagggctacgggaaaaggccactcttcggacattcatgatcgacccccacaatggctcagggggagagggggctgggtgtcaggcaaggcgccagacaccccttgcaggctggaggacggggtggctggacctttnnnnnnnnnnnnnnnnnnnnnnnnnnnnnnnnnnnnnntcatacatgttcacctcttagtgttctctccacccccagcgacccccactgcagacttccagtgatgggagggccgctgcccttccntggagacagaagaacatgggnggagggcctgtcccagagggtgggggtcctgggagcctcgcttgctcccacgagtccctgtgtttttcttaaagtcacgagatcaaaactggagttcagtagtagggtctcatctac

SEQ ID NO: 162353 - DNA, 1063 bp, Homo Sapiens
taactggtgaagtttttattaaatccacagaagtaaaaaccatatcgtgaggaactgggggatggggccaccagggagtgggagtcagctgatgcagggggcggcagggttcgtgacagaatagggccagcagtacacgctcacatttccgctggttggctggtgagagcttggccaccacgccagtgctgtctgcaccatccaggctgaggctgccatcctcctccttcaggtcagggagcacatggcagagtgagcagctccactcctcccctggtacatcctgcagggccggcaggtgacagtccaggtggaaacaaaactccacactggttgcacataaccagatcgcctggcttctggcagacacggcaaatggtggcactgtcatccagggttcccgggccaccacctggggctgaggtaccctcaggagccaccacctccagccctgagctggtgctgccactaggtgaggccaggcggggaccctcagcaccaggaccctccgcaagagccataagcacaggtttggtctcagggccctcagtggcagtaggaggggctccaatggcagcctccgtctcctcctccttgacaatggccatgccagccaggggtggggcaccaggggttcctgcaggcgcagtcctggctggccggtagctgcagcggcagcgccacgttcaataacaataaggttgtagtcctcagtggtactgcctgggaagaccttgaagacgggtggctggctgtcagctgtgaggtccaggtccaggcgttcaaggctcactcgtggcaccttgcgcataaggccgctcacctcgccctcacctgagcgggaccgtttcacacctgacacatggggctctgcacttgagtagggatcatctcctgacccaaagccatagccttcctgcacctccatgggctggctgctgccagagccctgcttggctcaggggcctggggctcttggaggggccatgggtgcagggcctgttgagttagtgccagacgccctcgtgccgaattgacaccaggcctcgtactggcctattgt

SEQ ID NO: 162354 - DNA, 1429 bp, Homo Sapiens
  misc_feature (23)..(23): n is a, c, g, or t
  misc_feature (203)..(203): n is a, c, g, or t
  misc_feature (270)..(270): n is a, c, g, or t
  misc_feature (679)..(772): n is a, c, g, or t
  misc_feature (929)..(938): n is a, c, g, or t
  misc_feature (1241)..(1241): n is a, c, g, or t
ccaaattttccggccccaggggntgaccccaaccccctttgtttatgctcttgaaaaggttcctggatgtaaagggtccccggcttggccttcacctaattggcagaccaaattttaggctgaagttggttgctcttaaggggtacttaaacaaccccacagtgtggcccggaaacctttggaatgacagtccccaccatttntcagtgttgccaagagcccaagcgatttggggttatgtgcaaccaggttgtgagttttgtttccacnttggactggtcacctggccggccctgcaggatgtaccagggggaggagtggagctgctcactctttgcacatgtgctccttgacctgaaggaggaggatggcagcctcatgcctggatggtgcagacagccactggcgtggtggccaagctctcacccagccaaccagcggaaatatgagcctgcctggtgctggcttgagttcccaggagctgtctggtggccctggtgatggcccctgaggctggagcccccatggccagcccagcctggctctgttctctgtcctgtcaccccatccccactcccctggtggcctgactcccactccctggtggccccatcccccagttcctcacgatatggtttttacttctgtggatttaataaaaacttcacccgttgaaagnnnnnnnnnnnnnnnnnnnnnnnnnnnnnnnnnnnnnnnnnnnnnnnnnnnnnnnnnnnnnnnnnnnnnnnnnnnnnnnnnnnnnnnnnnnnnntctttttcggccccctcagccccttcaaaaactttttaaaaacctttttttggggccgggggcgcccctcgaggaacctgaaccccgggcccaaaccttttgttccccaaaaaaaacctttggcacacaaaacaaggggtttggaattccccccacnnnnnnnnnncgcccccgcgggggaacacccaagcgcgtcttctaaaaaaaatctccccaagtgggttcccttaggggcgcctttctcggggggaccccttccaaaaggggggagttcccccccggaggaccttcaatattttaaaatatatagccccccccgccctgttgcacatttttattcgaagaaaaagggcgggaaaattcctttataagacttttttcccgcccaaaacgcgggacaccccccctccacaaaaaggcccttcgcctataaacccgcgcgaattgcccccccgggggccataccccnaccctttgtggccggcccccttcgcggtaataaaaatatcttcccgccccccgcgggagaaaaacccggggggcgcgaaaaacaaatagcggttccaccattgtctcgcgccaccgcgcatataatatcaacacactggggtgtgcaaaacactcccccccacacggcattttgggcgctgcaaacac

SEQ ID NO: 162355 - DNA, 350 bp, Homo Sapiens
acctcacacccaaagcattttgcctacctgggtcagagagaggagtcctttttgtcatgcccttaagttcagcaactgtttaacctgttttcagtcttatttacgtcgtcaaaaatgatttagtacttgttccctctgttgggatgccagttgtggcagggggaggggaacctgtccagtttgtacgatttctttgtatgtatttctgatgtgttctctgatctgcccccactgtcctgtgaggacagctgaggccaaggagtgaaaaacctattactactaagagaaggggtgcagagtgtttacctggtgctctcaacaggacttaacatcaacaggacttaacacag

SEQ ID NO: 162356 - DNA, 899 bp, Homo Sapiens
  misc_feature (658)..(702): n is a, c, g, or t
aggggatttgggacgagggaaaaggggcccccggccccccaatgccaaggttccaagaccagggtggatgtttcaacgcaggccgctccaaaaggggatgtcttcaaagcgtctgtggggtgggggcccagaaagccccgccccacctggggccctggaggaggctggagtgtgagagcctctgtgacgcgcatctgccgggctactcatacagccagtgcccagcgctgtcctcccagcagaggagctcgtctgcgcggaaccagagagcgatctcgcggcgggcactctccaccgagtcgctgccgtgaatcaggttcttgccaacctcgatgcagaaatccccgcggatggtgccgggcggggcgtcggccgggttcgtggctccgatgagcgcccgcgaggtgcgcaccacgtccagcccctgccatacctgtgcggaggaacgggcgcggtatcacgcgggggtgggggtcccggagccgcccgcccgcttcccggatactcaccatggccaccaccggcccggaggccatatacttgacaaggcggccgtagaacgggcgttcacgcagctcggcgtagtgctcacgcagcagctcctcggaggcctgcggaagggtcagggcgcctgcgcccgcacccggcacctaggcgnnnnnnnnnnnnnnnnnnnnnnnnnnnnnnnnnnnnnnnnnnnnngctcaccgcgcccccacctgcaccagcttcagcgccaccaacttgaagcccttcctctcgaagcgccgcacaatctcgcccaccagccgccgctgcacgccgtccggcttcacggccaggaaggtgcgttcgtgtgcgccggtgcaggccgcggggaagaggttagcgaagatggtcagcaccaggcagatcatgat

SEQ ID NO: 162357 - DNA, 907 bp, Homo Sapiens
ctggaccggtccggaatttccgggatcgcaggttggagcgtggcgaacaggggctctgggcctggcgctgctgctgctgctcggcctcggactaggcctggaggccgccgcgagcccgctttccaccccgacctctgcccaggccgcaggccccagctcaggctcgtgcccacccaccaagttccagtgccgcaccagtggcttatgcgtgcccctcacctggcgctgcgacagggacttggactgcagcgatggcagcgatgaggaggagtgcaccgcctggcctgcctagcaggcgagctccgttgcacgctgagcgatgactgcattccactcacgtggcgctgcgacggccacccagactgtcccgactccagcgacgagctcggctgtggaaccaatgagatcctcccggaaggggatgccacaaccatggggccccctgtgaccctggagagtgtcacctctctcaggaatgccacaaccatggggccccctgtgaccctggagagtgtcccctctgtcgggaatgccacatcctcctctgccggagaccagtctggaagcccaactgcctatggggttcttgcagctgctgcggtgctcagtgcaagcctggtcaccgccaccctcctccttttgtcctggctccgagcccaggagcgcctccgcccactggggttactggtggccactgaaggagtctctgctgctgtcagaacagaagacctcgctgccctgaggacaagcacttgccaccaccgtcactcagccctgggcgtagccggacaggaggagagcacgtgatgcggatgggtaccgggcaccaccaggcctccatagacctgagctctccctggcaggtgaactcgacaccgagctcctgcaaagtgggcctgagattgag

SEQ ID NO: 162358 - DNA, 545 bp, Homo Sapiens
tttttcacgttatgaagatattttcctttaatttatcaaacatttcacattcatgaagtcatttacttcagagcaaatgtaagcttataatattaaaaattaaagtattacaatatttacaagatggttggcaggggacacttactagtataaaaataatacaaatattgtattttcctcttatctgccagtaaaaatggcaaacagttttgtctttctgaagtttctagtcaataaccaaagatgaggagcccctaataaagtgccttgccctgtatgctccactgtctatagctttagaccctcaacattcttcttcaagttcagcagctctttttcttgccttcttttctccagtttaaatgctaatttgttagctttcttctccactcttcgttccttgcgctcttcttttatagcttgctttcttgctcttttatcttctttgctttcatttttagaacgtggctgagttgatactttaggaagatcactgccattaatcatctgtattctttcagtttgctttgctgtgagtcctttct

SEQ ID NO: 162359 - DNA, 598 bp, Homo Sapiens
gagggtgatcaaaaacctttattctggtcctcatcattcaggaagccacttatgcagaacactttcttcatctctgctctaagcagcagcagctgcatccaggcttgatatggaagacagacagaaatagtggaagaccttgcagagaagagctaattgatgagatctctgcttatcccggcataggtgaaggcagaacaggaagagtgtgtgtaagtgcaaagactccgttcttcaaagctgaggcctgtgcagaggggtgaactgaaggcttcagatgaaggctcacaaaactgccccgctcggcaatcaatctaaagtaccttccagaaaagcaaattcatccacagcttctattgcattatccaagtctctcctctgaagggttttcctttttccctgctgagcgcaacagtaggcatcttttgcaatggtctccacaaacagttccgcggctcgtgccagaatgaagatggcttcctgtcccgctagcgtcacgtcgggatctgccttcaccaaggccttcactcgcgccagaggcaacctcgagagacgagcccaggcaactcgttggggcctggggctgcgaggccgctgc

SEQ ID NO: 162360 - DNA, 860 bp, Homo Sapiens
ggggtacaggatgacacctcacacggaccacccctagcaagagggtttgtttcagttctagctgtgagaggaatgtctgcagttcccacattgtgtgccatgctgtgaagcccatggcccctgctcctctctctgcctcccacacacttaacagtacacacagactttgctggcaagtgctgtttgttcctgcactgctatactatacgactgcaggacaatgccatccgctccatggttcattcagcgccttgtcccaaggtagttggtggagagcaggaccacgttgtgcagcaagagagacagctcagcttctttcaggctgcaggaaatctgcagccattctcccagccaagttcgacacctatcttcaccaatatgcgtagaattcaggccacggagataacaagccgattttacttcctgagcagtcagctggccaatccccagctttgccaaagccttgtccagttggtgaatcacagttgtatgagtcttcaaacgatgtctcaacaagggaggaggcaggtaagatgtgagaagcatggcccggctcaaggctttctttcatgaagattgtgtacaggatatagaagcgggggaaatgacgacccaagaaacgatggtatttcccattaatcgcttttgtcttggttaccacataagacatcaagttcttcacatctgcctttggagaaaggtgaagctttgaagaccgaggggccccccaagccaggccagagcgaccaagttgcagcctccgggtgacaaaatgtccaggggtgactgccgagccccacacagccgaccgagcccagcacaccctggagagcgcatccatacactccgaccggaccagc

SEQ ID NO: 162361 - DNA, 339 bp, Homo Sapiens
gctttgccaaagccttgtccagttggtgaatcacagttgtatgaagtcttcaaacgatgtctcaacaagggaggaggcaggtaagatgtgagaagcatggcccggctcaaggctttctgtctcaaatgctccatctcccggtatggaagttgatgaaactttatattgtgcttccacatatttgtctttattcttctagcctttttggcatcagcccataacatctgcaatcctttcatgaagattgtgtacaggatatagaagcgggggaaatgacgacccaagaaacgatggtatttcccattaatcgcttttgtcttggttaccacataagacatc

SEQ ID NO: 162362 - DNA, 324 bp, Homo Sapiens
cttaacaatcaaattttattgctttattcatgtggtgttttttgcaaggcactgtggtatggactagaaaacttggaatgactcatgaagaaaccttggaatgacacatgaagcatgataggaaagtcattctgaggcaggatgctttactgaattgttttcaaccagggtatcaaacatcaggaatgagttcaagttaaaattcacaggagaatggaaacatctttaggtcagtcacttcacatgcccatccagattattcaaagtatcaggatgggcatgtgaagtgactgacctgatactttgaataatctggaaaattgc

SEQ ID NO: 162363 - DNA, 110 bp, Homo Sapiens
taatgctgcatttcttggttttatttgaaacagtgcatatttttagcattttatggtaggattttacacttgtcatttacacaaattacaaggttctgcttcaagttttt

SEQ ID NO: 162364 - DNA, 581 bp, Homo Sapiens
  misc_feature (499)..(499): n is a, c, g, or t
  misc_feature (525)..(525): n is a, c, g, or t
ttttatgtattctttaacgctttaaaaataaacttcaaagccaaaggtttagggcagaacagttttaagctgaacttttatttcctctcttttgaaatattctgattcaggttttgatttccaagacggccccatttaggggtctgagggtccacagaattagtccagttctgctggaacagtatggattctaaaatgcctaataaggttgcaatgatgactgaaggctttcccaaactcatcacccttatggtctctctccagtgtggattttctgatgtttcttaagaagtgtccgcttactaaagagtttactgcactgactgcactgatagggtttctcaccagtgtggactcggagatgctggaaaagccctgcattctgaatgaaggctttgccacactcacgacactgatagcgcttctctccagtgtgtatcctctgatgctgaacaaggcatgagctgaggaggaaagccttcccacacactttgcattncatatggtttttcccctgtgtggatntcttctgtgccgagtgaggccattgctggcactgaaggctttcccacactccttac

SEQ ID NO: 162365 - DNA, 296 bp, Homo Sapiens
aaccatgaggtttaatttatttttgtgataggagggatatttacatattttagtggaccacattttaagttggatggtgtgctctaaaatactgaaaaacaatagcccatatacctatgtatttgtttttgatgggttgtttactctgaaataaaatgtatggttttcttaaaaggaagttttaaagtacctattttgtgtcatcctgtattgaaaagaatgtcaagcttgttaaaatgacatgtaacaaaaatgtattttgatttgtatttcagaaactaaaaaataaaatgttg

SEQ ID NO: 162366 - DNA, 1683 bp, Homo Sapiens
  misc_feature (33)..(33): n is a, c, g, or t
  misc_feature (81)..(81): n is a, c, g, or t
  misc_feature (83)..(83): n is a, c, g, or t
  misc_feature (102)..(102): n is a, c, g, or t
  misc_feature (239)..(239): n is a, c, g, or t
  misc_feature (308)..(308): n is a, c, g, or t
  misc_feature (342)..(342): n is a, c, g, or t
ctggcatcttaatccccaggcagcctgatcccntagtcaaaaagtgccccctaaatggtctttaggggggtaaggatggangnaaaagggaacccagtttantttgggaagaatggggggaaaaatgatcaattttgagggccacaaacatcaaaaccaaagccaatctagtctctttctggggaaagaggttctgaaaactttcaagctccctgccagaaaaacattttcagggaggntaaggggtaagggttgcaccaatcagggtagggccctcctgccccccagccacaaaaccttcccatacntgccagcctcctttggacagattttgtggaaatnttgtgaattctgagccaaagggaactgaggtgtgggggtctcacagaagtgtgataaattctagaaaactagctgcaagggaccagatctgggcccaacccctgtgatgggcaggtgggcatgggctgcatgtagtggttctcctggtggcaatggcggctggacggaggatgtggtggagcagagaagggggtgggagggtagagtggatggtcagtgtctggtcatttccgactgaagagtgagcccagcagaaccacgccggccacagtcatgcccgtcaggaaccagcggttgaagcgttcctggccctttcggctctcggctgctgcattgttcccatagagttccacaaaagtatcccagccgccgttctcctggatccaaggctctaggtggtcattcaggtaagtggccatccaagctgcgatccgactcaccaatacctgcatctccttgtctacgctttccacgcacagtgccccgccgaaggagaaaaaggccaccaatgcgaccccagtttaccccatcccggaagagttcattcactacctgttcaaagctctgatatgctgtccctggggtgatgtggagctgggatgtcaggtcactgaatgcccgccggtaccgcagttcaaactcgtcgcctgcctccctcagcgcttgctttactgctgccatggggatcacctacccgggcatcctatactgcttgctgtggccacgtggctccacttcacgcgcggggctgtctcgaccacggtgccatggagtgggttgccattgactggcacctgtggggtctccatctccgattcagtcccttctgggtcctcagtcctgttctcttccacatcactaaactgactccagctgtatcctttctgggaaagcttgtaggagagaaagtcaaccaccagctcccggcttgctctgagacatttttataatagggatgggctcaaccagtccacttgtccaaaacacctgctcactcactgagtctcgtctctggttagtgattctcttctaagatccaaagccaagataagattctgaagggagagaaagagattcaaatccgccttaggcaaaggcaggcaggtgcagcccccggaagatcttttgtatcacaggtcgggagaggaggtggctgcggggatgccggtaactcagccggcctcgcggtggctggcaaaaaaaccagctccggccggagggatcatgcgacccggcaggctgggagcccagaaggcgacacaggaattgcgaagctcaggaaccagccccctcgctcggacgcgtgggtcgacgatatcccgggaattccggaccggtacc

SEQ ID NO: 162367 - DNA, 1048 bp, Homo Sapiens
  misc_feature (790)..(790): n is a, c, g, or t
  misc_feature (927)..(927): n is a, c, g, or t
gagtatccaaagggactgatcggagatggagaccccagtgcatcaatggcaacccatcctggcgacctggcagacagccccgcggtgaatggagccactggccacagcagcagtttggatgcccgggaggtgatccccatggcagcagtaaagcaagcgctgagggaggcaggcgacgagtttgaactgcggtaccggcgggcattcagtgaggtgacatcccagctccacatcaccccagggacagcatatcagagctttgaacaggatactttttggtggaactctaatgggaaacaatgcagcagccgagagcccgaaagggccaggaacgcttcaaacccgctggttccctgacgggcatgactgtggccggcgtggttctgctgggctcactcttcagtcggaaatgaccagacactgaccatccactctaccctcccacccccttctctgctccaccgcatcctccgtccagccgccattgccaccaggagaaccactacatgcagcccatgcccacctgcccatcacagggttgggcccagatctggtcccttgcagctagttttctagaatttatcacacttctgtgagacccccacacctcagttcccttggcctcagaattcacaaaatttccacaaaatctgtccaaaggaggctggcaggtatggaagggtttgtggctgggggcaggagggccctacctgattggtgcaacccttaccccttagcctccctgaaaatgtttttctgccagggagcttgaaagttttcagaacctctntcccagaaaggagactagattgccttttgtttttgatggttggtggcctcagaaattgatcatttttccccccaactctcccccacacttaaacctggggttccccttttcctttcccatcccctaacccccttaanaaggccatttttaggggggcccacttttttgaacttaagaggatttccagggcttggctttgggggaaataaaggaatgccaaaggggacccagggaaattcccccttccctttaaccttt

SEQ ID NO: 162368 - DNA, 412 bp, Homo Sapiens
  misc_feature (105)..(142): n is a, c, g, or t
ttaacattttattagtattttatttgtatttttggagaagatatagagtttcatgagaaacactgatttttctcaaacaatagaaaaagtgttttttgtgtgtgnnnnnnnnnnnnnnnnnnnnnnnnnnnnnnnnnnnnnnccactgtcttagaagaagaaaacaagtctcttcagcaagcatgtggccaattcagatgggaggaaccagtgaagttagaagttacacacaggaagtgagttcagatttatccacaaatgtcttctggtctagttctgtaaggctccaaatgggccatctcagcttaaaactggcaacaccctctcaaagctctcaggatcccatctggtttgaacctggggcctcattctccaggaggctgcatctgtttacagaactcatcaaactgct

SEQ ID NO: 162369 - DNA, 907 bp, Homo Sapiens
  misc_feature (170)..(208): n is a, c, g, or t
gcccgccccatttagggcgggtttaaattgcccgggttacggcagcccgattcattaaatgcaggttaaactgggcttattgaaaattaataccgactccctatagggaggccggccagatctcccactttgttcaagaaagctgggtcaggaaacagctatgaccatgnnnnnnnnnnnnnnnnnnnnnnnnnnnnnnnnnnnnnnngcccaagaatcactcggagggcggcggagtgatcgtcaataacaccgagagcatcctaatgtcctatgatcacgtggaactcacattcaatgacatgaagaacgtgccagaagccttcaagagggaccaagaaaggcactgtctaccttaccccttaccgggtcatctttctgtccaagggcaaggatgccatgcagtccttcatgatgccattttatctcatgaaagactgtgagatcaagcagcccgtatttggtgcaaactacatcaagggaacagtgaaggcggaagcgggaggtggctgggaaggctctgcttcctacaagttgactttcacggcaggtggcgccattgagttcggacagcggatgctccaggtggcatctcaagagttctatccaggaccccccatgatggacggggccatgggatacgtgcagcccccacgagcgccctaccctgggcccatggaacctccggtcagcggccccgatgtccccgtcccagtcctgcagccgaaggcaaggccgcaggaagcagccgcccagcgcctattacaacccaggcaatcctcacaacgtctacatgcccacgagccagccgccgccacctccctactacccaccggaagataagaagacccagtaggccctcctgcctccctcgtgcggaattcgccacccaggcctcgctaccttg

SEQ ID NO: 162370 - DNA, 1221 bp, Homo Sapiens
  misc_feature (51)..(51): n is a, c, g, or t
  misc_feature (272)..(272): n is a, c, g, or t
  misc_feature (304)..(304): n is a, c, g, or t
  misc_feature (366)..(366): n is a, c, g, or t
gcacatgcacgcggtgcaggcctttccaggcccatcgctgtccccctcatntaaccctgaccaatgccccaggtcccatgtgaccgcccacctgagtgtagatgagaagatcgagagcaacacaggtgaccttccccgccccagggcacatggatagctaagggatgggggtggggccagaatctagctccgctccaccaggccacagccctgctgggcccctggggtagtccaggggtcatccatcatctgcggctctcagcagtctgtgnccattctgaggctctctgtgcgacatcggganggagagggctggtcccgaagggctcccagcacccaagggccctcacctgcaggagtggaggngacatcggggccgctgaccggaggttccatgggcccagggtagggcggtggtgggggctgcacgtatcccatggccccgtccatcatggggggtcctggatagaactctgctcggtgagagagtaacaaggacatggtgagcacccggctgcggccccctcccgggtgaggggggcctctccagctccttcgttggtcctgaagcagctcaaggaataaagtctccctggcctggggggagcctgggtaggtgggctcatgaggggagtgggggcagcaaaggacacactcaccaggtgggggcggtggataggggtagccaggaggcgcaggcggtacattccattggcgactggcgggggatagacataggccccgctgggcatgtaagagtagccataggctccactggggacttcacctctggaggcttgagatgccacctggagcatccgctgtccgaactcaatggcgccccctgccgtgaaagtcaacttgtaggaagcagagccttcccagccacctcccgcttccgccttcactgttcccttgatgtagtttgcaccaaatacgggctgcttgatctcacagtctttcatgagataaaatggcatcatgaaggactgcatggcatccttgcccttggacagaaagatgacccggtaaggggtaaggtagacagtgcctttcttggtccctttgaaggcttctggcacgttcttcatgtcattgaatgtgagttccacgtgatcataggacattaggatgctctcggtgttattgacgatcactccgccgccctccgagtgattcttgttgagcgccatagtctctccaacagggtcccgagactca

SEQ ID NO: 162371 - DNA, 156 bp, Homo Sapiens
ccctaagacctattgccggggaggattccacacttccgctccttggggataaacctattaattattgctactatcaagagggctggggcatcttagagaagggccctaaatcaggtgctcagtgtcctgaacgcaggtctatcccacccaccagcc

SEQ ID NO: 162372 - DNA, 1219 bp, Homo Sapiens
cctgccgcatgagattattttattaaaaaactcaaaggaagcagagtgtggagcggtatctgtcctgcgtgacgtctcacatcggagttggctcagaccctggctgtgcatccatcagaaagtgcaaggcccaggccatgagctggggaggaagcctggcagcttggacccgagcacagagggacgtgcagggtggctcatactcatactggaaggcagaaccatcacgatgcctctttgggggttcccagacagagcagggctcctgggctcccctggtagctccggtcctgaggaactgggtgaggaaggaggagaggctatgagggtcagagataggtcctgcagagccgggtctggtgggggcagctcagggccctgtgtcctctgacaggggcctagagagctcagaattagctggtcattctcagagatgcacagcattgagctggggacagtgtacacagcttctcccgtggccttgcatcgtgaggcagcccagtgggtgacagggggtgctgtgccaagggccctccagtgtgcagggcagctttcagccaggcaccaggagtgccccctgatgctcttggtcctcccgcatttcatccagaaggtgggacagtgataggcctgcattggacgaggtggactctgaaaggtgctcctcaaggcagtcagggagctttttctgaacatgtaagtcttggttgcaaccagggcaccggtagccggggctgctccgtgggcagcaggctgaagcggtccacctggagatagaactctacgggctggacatgaaccccgcagtcctgcagcagcagcagccggccctctgtcccgcggaagccgaactccttctcctcccagtccgaggtgtccagggcctcccgcgtcaccaggcatcggacactgtgggtcccgtcagacacaagcagcgtggccccgacgtcggacgtatcaggggcgtgggatgggcccgcgaccgcggcctcggcgtcctgtagtacctcaagcagctgcccggctcgtggactggagggtgtctctgaccccagaatcagctcccgaatccagggccgtaggaccagcctccccgaacctgccatccccacggctacacccagcggatgcaacgggcccgggtttcccgcgggccccacgcgtccgcggacgcgtgggtcgacgatatcccgggaatccggaccggaccagcttcttt

SEQ ID NO: 162373 - DNA, 348 bp, Homo Sapiens
gcagttatcagccacagtgatttattgagtgctttaataatacaagtgtacatcaactgatccacagtcaaaagtggcaggtccctaagaaatttacaagcactttaagtaaatcaaaatacatattattttgttcaatccaacagtcttctgcgggagggacagaaggctagtgataaacagagtctcagtaatgcacagtgattctgattgaagcttttgtacaaaaacttgttcccagtagcatgcacccaccaataaagacttcagtacaaaaaattaaccctaagcactacatttaagtagaaacgagatataattctgaatgtgttttcccaaagatcacat

SEQ ID NO: 162374 - DNA, 541 bp, Homo Sapiens
  misc_feature (183)..(183): n is a, c, g, or t
  misc_feature (281)..(281): n is a, c, g, or t
gaggtggcaacgactccccggcgtaggtcgcccccagtcagggtcatactgctcactgtcccgggtcgcttagggagttcgtggagcgggaggtgatcgacttcgcccgacggaatccaggggtccgtaatatatgtaaactcgcgtccgtgctgcgtgccccagagtagtggccgaataccngatgcggctgagttcctcggcgaaggagcagggccctgctggtactccattggttgctctgcctcagaagcacatagctattgccattcatccttcgnaagccggttggcagtgccaccaagccattggacactggcctgagactgtctgcagttgcaccgcagatcctcctgcccggctggcccgacccaatatcagttcagtcatccgatcttccttggggaaatacccattaccgtcctgaacccttgtcatccactacttggctataagctccagaagtgacaagacacttcacatcttaaatatgtttcctagtttataattcatttgggcagtaaatgtttgttgagcactt

SEQ ID NO: 162375 - DNA, 588 bp, Homo Sapiens
  misc_feature (358)..(358): n is a, c, g, or t
ttttgtgaccttggataagtttattaacctgttttataaatctgtattcacacagatataaagtgcctagcccatcacagcagagctctccgtagctcagtggttgttccaataagacatcagggattcttcagaagccagccttcagacctctcactgtgttttcgagatcattattatcaatttggatttaaaaaacaagggccctgtaaaacccttgaagtcttcctcatctcaggttttagggatgccacttgcataaaaatgagtggttcacaaggtcactgcccccagaagcaggcacggagtaacagtcccaaagcctggggctggcagttggtgggggaactcttcactngtgcttggacctgggctgggggcagggatccttgaacctctcgggggcgtagcccgcggaacgtggtcggcttggttggtgaagggtgccactggccctggatgctagggttgtcgtgtggaagggcttgcggatgcggatcacgtccaagcccgactggtcgccagcttctgcaccagcgtcgaatctcctcgaccgacttgcagtggatgctctgctcgcgcacagcc

SEQ ID NO: 162376 - DNA, 153 bp, Homo Sapiens
gcagttttaataaaaattttattacacagccataatgtaatcaacacttctccaaatccaaatgatactaaatacagatctacatggtggatcagaatgactccagcgaattatctggattctataattttatgttttttaaaaccagaaatc

SEQ ID NO: 162377 - DNA, 1185 bp, Homo Sapiens
cggggtaccgcccccggaaaagttctcacacgggtgttctcgtctcaccagcgcatatctgacggtgggcctaaggacaccacgtggttgttcaatcgcggtcccaggcccaccacacagctctgcacggttcctaccggacacagttcggagggcccctccagaagccgggcccattcaaggcccgcccagcccagggggctcaatggggccaagccaagggtggctaaactacagcagcagccatgggcctggagaccctcctgatgccagtgccaggcttgggccggggtttcccaggcagcttacaggagcccctggcgccagcgcgcgagccgtagtgggccgatgcccgcaaacctaaattgatcgatatgtccaccggataactcgcggaaggtgcttgagactgtatgtgaaggccagagggacttaaaaatgtgatgctggctggaaccccctgctgggaatagtagctgttcaggttcccttggatttcctgggtgtgcaactgtctgatacacagttatgctttccatggcaatcctggaacaaatatattctgcaagcttttcctgcatttccacaggtttctccttgctgtatccaggccaattttactcactagagaagcagtagcatttccaaccacatacactgacttggcattccatttttctttcagagacctttgcccagacttcagttttattgttttgctccaaacataactctgctgcttccactgctctggggctggtaaaaatgagtcccccgtaatcttcaggatgagaaagcttctcagagaaactgggaagagacaaaaactcaaacgataaaacagggatcaaagtggcttcaagtccatataatcctaattccctgatatacggatcctggccacagtcatcttccttcgcatccttcagtaaaagaaccttcattattgcctggcagtccttatagggcactcgcgggaccgtgcccagcacccggcactggcacacagcgggcacccggtcggggggcggtgtcgcgcagtcccagcgaaaaggctgcaggagcaatgacaacaggggcggaagccccctccccacgcagcccgaggggccgcggcggccacccgcgccgggccccaggaccccgcacctcagactgggtcgcgtgggtgctgcgcgcagctag

SEQ ID NO: 162378 - DNA, 547 bp, Homo Sapiens
aagaacatttgacagttatgaaatgcatgtttattctgaaacttctaactagttgtacaactaatccgtgacaaattaccagaattaattttactttatttcttcagggcctggggtttttcgatgacttcaaatttggggatccttcaaatttgaaggtgggaaatgtattcatgtctgcattaccaaacatttgcttgagcttaaaaagctccctctccagctcttgctgatactctgaactagcatcaacaggtcctccagatgtctgtcgcttagatttgtattctctaatcttgtccacaaagagtttctgtataggatcaagttccttattaaatgccactgctgtaacaccaatgttcctccgcaaatggactgagacggctgaccgaatgacagaggagaacctgaagagcctctgaagaatcatgctgattccggagagacgcttcacgtggagcccttgccggttgccgttttcagccggctctggattgcgggcgggggcgacagggccgattccggagtgggtgagtgcggccgc

SEQ ID NO: 162379 - DNA, 284 bp, Homo Sapiens
  misc_feature (123)..(134): n is a, c, g, or t
tttttttaacatgttgccaattatctccatgtttatttaaatattttgctctaaaggaagcaatcattcctttatacttctttaaatttagtattgacatttttattttgggaaaggaggtcnnnnnnnnnnnnaacatggatacaggaaaagaaaactctccaataaaaatattgtctaaaaagtttgttttgtctgcatgatttactaaatatgtacaatttcaattcacagcgaaggtaacaaagatttaaacagccaacatcacaaatgtctcaagttct

SEQ ID NO: 162380 - DNA, 896 bp, Homo Sapiens
  misc_feature (879)..(879): n is a, c, g, or t
caggtttcaaccgttttattgggaggttttgttttctgtgaaatacactagagggtggggaaggggacacattcactttgcaagataagggtttcccaccactaaaggaaaggcatggggcagggcacactggggtttgggtccgttttcccacctccttctgcttggctcacttttcttttctctcagcaagtaccacagaacacaaagacaagaaacaaaacagcaaatcaacctccaacgggggtaagagcggtgggggcagaagtcaccttttcctccacgtcttcccaaacagagcagaagaattaggggtggggggaagagacacacacaaggagaggaaccctcttttcctaggataaggaagggccaagaaagaggatgctatccaaccccccatctcccaagccttcgctagggttaaggatttggtcagtggatcaatgaggtgggtgatgggaacgtggtgggggaagcagaggatgctggagccctcgaggagaacagacacaggctggggcatcaggggctgggggcggccacaatcactgctcagcttctccaaagacgtcgttctgtttgcgcttcatgttctcaaagtcaaaggccgtgccagccatgcgtttgtagatgtctttgatgtcgttgcaggttgtctcaaagtgtgtggtggcatcgtaggagcaggaacagaacacctggctctcacaaccatcatcaatgggctcatacaagtcactgatagccacaaacttctggtcagtgggctccaacagctccagagccggctccacctccttttcagggtccgtggtctccacagtagtgctggcaatagctatgtacttgccctgggccgccacgttgtgtgcatangagatcatgcacacgta

SEQ ID NO: 162381 - DNA, 563 bp, Homo Sapiens
cgaccagatacctgagatgatggattggaagatggttagatggagcgggaaagctagatggcgcaatagccagatggataggtggagagatcggccgggtgggtgagatgagcggatggtgggagacgtgaactgtataaattgcccagggaatggatttctagtgtctacttgaagcaaagcttcttaacttggctttcctggatgggcatcaagccgttcacacacccgcccagttatagtgggtccattttcccataattctcaaaggagtctgagatttcccaagctttcagaaccgctgatttgttctgtgtcagaccttcccattcattgtcttgtcatctcccaccgcctccagaatgggaaaatacacatcattgcatgaaagaatcagtattcaccacaccttaatgacatgaggcttccctgaagcaaggatttcagccagatgccatagaccctcagaacttgacctggaagtccagacactgaacgcaggcctcaaactgttgcggccttcccactcctggtatctgctcgcgaccgggatcctctaatca

SEQ ID NO: 162382 - DNA, 878 bp, Homo Sapiens
ccggactccgggatcacagtgtcagggtctcatttcaaccatgtgacacctttcgaccacaacatagtcaatttgcttaccacctgtagcaccttcctggccattttctatccaagatgtggtacaacctcttaccctgcaagttcagagacccctggtctctgtgacggtgtcagatgcctcctgggtctcagaactgctgtggtcacttttcgtccctttcacggtgtatcaagtaaggtggcttcgtcctgttcatcgccaactaggggaagcgaatgaggagtttgcactccgtgtacaacagctggtggccaaggaattgggccagacagggacaaagcagagcacatgaagcgacaaagacaccccagattgcgcccccagtcagcccagtcttctttccctccctcccctggtccttctcctgatgtgcaactggcaactctggctcagagagtcaaggaagttttgccccatgtgccattgggtgtcatccagagagacctggccaagactggctgtgtagacttgactatcactaatctgcttgagggggccgtagctttcatgcctgaagacatcaccaagggaactcagtcgctacccacagcctctgcctccaggtttcccggcaggagagcctgcaggagcgcaagcaagcactatatgaatacgcaagaaggagattcacagagagacgagcccaggaggcttactgagctcaaaggaacaggattgcacccagagccgcaggacggagacttggggcagcccttaaccaaattacaacaggcttgatgggttggttgttaaaagggaaaggttgaggctccccaaagtcacatttaaatcacaggtttcaattaaaggcaaaa

SEQ ID NO: 162383 - DNA, 185 bp, Homo Sapiens
ttttggtaaaatagctttatcctctgtcagaacacaaacaaacaaactttgagaggggaggaaggaaaccgtctagctcagggctcacttaggagagggatgagattagaaagttcaacacactgcttgtgcagcggagataaagtcaagaccctagcacccacttataaatatctcgttatatt

SEQ ID NO: 162384 - DNA, 849 bp, Homo Sapiens
  misc_feature (175)..(190): n is a, c, g, or t
  misc_feature (204)..(204): n is a, c, g, or t
  misc_feature (223)..(223): n is a, c, g, or t
  misc_feature (234)..(234): n is a, c, g, or t
ttttcccccgggagtatttttttaatggcttaaacccccagccccgggaggctcgccatgtaaccggcctcattttctgtgctctgtgctttgggagggacagggacacccatttcccacctcgggctgagttaaaacctgtcttgtaaattaataaataatttctaaccacgcnnnnnnnnnnnnnnnntcccaaacgagacntagtttccatccagggacnaggatatttcntggacacccccggtttcactgctcctcttaaggggcctggccgtggctactgcagggaggatgcagtgagaatggcttccctgctgctgtttgctgctgtctacgctggccaagaacctgctcccgtctgcctgggctgatggagtctcgctcttgacaaaaatcttgctggggcaggtcctctggcagcccccagcccctttaccctgagtcacgggaacctgagactttgtccaaacctcggctggaaggctggtcttggcactcgacgtcttagctagtggatttatcgcattaagactgtacttgggcctttttcatgatgacttgggtctcaatccttggagcagctgaaagaacagctcgggccacctgtggatgcacccacaatgaaatcagaggccactgcaaggcagagtggcctgcagttttaactcgggcactatggcaatgcagacccaaaccaattgtgccagttctttgctgggtggcaaagtgttttcaggctttgtggtcactcctgatttctgtttggaagcacagttctctctctaaggagaatggaaacttggaaaggcctgtaaaatccctcgtgccgaattcgccacccaggcc

SEQ ID NO: 162385 - DNA, 121 bp, Homo Sapiens
tgagacgggagtctcactgtcacccaggctggtaggtgggaatcttaacatgttactttcttaggagggaaaagtgacaattgtcggcaacttactcctttcctagacttgatgataaatt

SEQ ID NO: 162386 - DNA, 778 bp, Homo Sapiens
  misc_feature (428)..(488): n is a, c, g, or t
ttccatttaaattattttattgaagggagataagttcctcagatattaactggttgtagggcaaagggaataaacatggtgaaagtcaggtttgctggtaaaggggagacagtactaaacgccctgcccaacaaatactcagaatccagggttttcatatttctccatggttcaatctctcacaggtcactttccattcaaaggattatggagaccaaataagacaggattctttcaggtatcaacccagagtctttaggtcttctctcagccaaggcatcgagtgaaaatacaatttatttttcggattcctctggaggattaaaaagtttctttcgcattgcaatgccatgctccctgctcttggtcctgttttctacgtactgtcgtcctagctactcaggaggttgaggtgggaggatcacttnnnnnnnnnnnnnnnnnnnnnnnnnnnnnnnnnnnnnnnnnnnnnnnnnnnnnnnnnnnnnagaacctcattcttcaggcattttctcaactcccgatcaacatcattacaataaccaaaaaatttcagaatgttgtgatttttgtgacattccttaagcaagttaatcaagacgttgcattcttcagtgtgcaagtgtggagataagtcaggatgcatctttaggagatgaggatggatcacagcagtgcaacccgactcgtggccacaccgggagaactgaagcggcagtagccggcggagacgcccgacccgaaggccggctgctagggagcagacagctgaaccccc

SEQ ID NO: 162387 - DNA, 230 bp, Homo Sapiens
cgggagacttaactggtttaattgcttagccctggtgcctcagccacctctcatctgtagggtgagactcaagtccaggcaccaagacacaccagcacccccaacaccatgcggggatcattggcctgaaacttggccagagaaagctccagtcctgggcctgtaagagtgggcgctgggagtgtctgaagccggcacggtgtccccttctgtcgtcttctcgcagccgt

SEQ ID NO: 162388 - DNA, 463 bp, Homo Sapiens
tttacaaagctaacgatcagcttttattctgtgagtcattttacatctgtggctttgatgaacaacttgacattgctgtttttcaggttttatgagaaagctgaggagagtaagcttcctgagatattgaaggagtgcatgaagttatttcgctctgaggcactattcttgctgctctccaacttcacaggcctgaagcttcatttcttggcccctaggaagaagctgtccccactcgcatgattttgaacagtgtgttgatgttattgcttcgaattgcatcccgacaagcagtgatcacctggttctttggttttccaacccgcagacgacctgctctttgaattgcttgatttactgctttgaggtttcccaacagctctgtgtgattgttacagcgaattttatatccatttagcaagtctctattaaggtcatagagttccatataacgactcttcat

SEQ ID NO: 162389 - DNA, 723 bp, Homo Sapiens
catcataaattttattcccgatgcgggacagattccttccatccccaaatgaatcacatgctgccctggaaagacctaggaaactctcctaccatctccagagaagtagtgagaaaggcaggtgctggggactgggaaggctttgaagtttcccagcctacttatcctccccttctcaagagaggatagctgttccctattactcctctcatccactcatcccttaaaagaaaacccacaaaccatcattagtaaaaaaacaaaccccttcaagtattgggggttaggggttctgggctgggacttggggttatgggtcaccaatgaaagagggaggggaagaggaggaggagccatcactgtttctgctgcagggcttccttccttgccgcatcctgtagcaactgtgtgtcgacctcatctgctggcagctgcacgtatcggaccactgagccccgaatgaagcagttcttcactgataacatgtgagggtatttctcagggtctgtgacactgatgtcagttagtttgatgttgagatactgatccacagaatggagggttccacagatgctcaggtcattctttagttccacgaccacatccttgcccacagggacttgaaaaaagaatagaagagcatggtgctggcgccgcgggcagcgggccggaccgggaagacagcagggcctctgccgattcaacaccggcctcgtactagct

SEQ ID NO: 162390 - DNA, 769 bp, Homo Sapiens
cagtcttggcaccattccgcttgggagtccaggtgaccacgggccccgggtggcgtctgagtatgagctagggtccatcgggtctaactcttgatcctttcggctgaccttcttgctcttgggatagggagccagctccctcccgacgatggtggcgccgttctttggccctcttcccggtctgccttgtcatacccgcggtcccgatcccgttccctgtctcgctctctctctctgtctaccttgtcatagccacgctctcgatccctgtcagacttgtcgtggccccggtctgacttgtcgtggcccctgtctagtttctcatggctgcggtccgacttgtcatggcccctgtccgacttgtcatggctccggtccaacttttcttcagcatctgcattactgcttctgagcttcttggccgatttggtaaccacggagttggggtcatgtggggagagccaggatacaaggtctgtgtctgcattccagtagtaagggagcccgcaggaagggtcgaacaccttgtaccagcttggtggtaggccctccaacctggtggcctcgtagtccacaggatcatcgtcatagtcctcggcaatgatctcttcctctggttcaggctccagatgtttgaggatgcctctcttggccaagcgggtctgcagcgcaacgggcagcggcatagctgatagcagacagacctgggcccacacgactctcttcccaaaacaccgaatgagaccttctctcaaggaggccttcactc

SEQ ID NO: 162391 - DNA, 438 bp, Homo Sapiens
tttacaggtgcaaaacagaggctttaatctgaacagcaatgagggtgcaaggggctgggagcccatagggggatgggggagccaggaaggggtgtctggccctgggagagaggtggacgctgggcctcttctgagaaactgtcactgacctttgggactcctgacccagcctctgcccagaccatcaccggatacaatgggccccaagcccctccctgagtttttgccatcccctccctgccagggaaagttctggaaagacatgcctcaccccatcatctgggccctcccaggagcccagcacctacccaaagggcagcttccattggctaggttacccttagggagcgggagagatgtggctacagtcaggaaacccagcaaagccaagggctagagaactgaagagccagggggaggcttggacacagggggcct

SEQ ID NO: 162392 - DNA, 636 bp, Homo Sapiens
  misc_feature (468)..(531): n is a, c, g, or t
aactttaaaactgccgtcttctgctttattgacaggtaaattgttcaaaaatgttctcacaattcaataattaattacaaagactgagacttacattaaaaaagtaaaaaccagaaccccccaggtgcccatccagcagaaggcccaggagggcagtggggtggcagggctaggcggtgctgggccactcagtgccgacttggggaagtgcacgtcctgaacagccttgccaagcagccgaccggtgggaggacaggggaagcctggcccaagctgtggacaagctgtgtctgccgccacagttaatcacaagcctctgacgacacagggccacagagctggtcactcaacatctggtacaaagggtgaggtgaaatccacgcgcaggggattgctgtgccgtgggccggggccagtgtgcaggagtgtgttgggtgggtctacgtgatcatacgggctactaatcannnnnnnnnnnnnnnnnnnnnnnnnnnnnnnnnnnnnnnnnnnnnnnnnnnnnnnnnnnnnnnntatcccagtggctgcttcgtggcgccctggggctctgacttccctcagcccagcaggccacagggcctgcctgcaccacgacactcgctggttttatggcaggag

SEQ ID NO: 162393 - DNA, 371 bp, Homo Sapiens
cacttaaaagaaagtttttattaacaaaagttttccttaattcacatttcaactttattaaatagtccaagggtttcatttatgaacacttattccagtttagttctcttaaattcatttgcttgttgtgcatttatgtttaaaaaggtaactaactgcactggaaaatgaaaatttatagttttatcaataggtcagtttttaaaaaatcaaaggataaggatttaaaaatattagggcattacacctttttcagaacaaggataatttacagaaattatacaaagcagattttcatcaaatatcaattatttagcgatgttttatttagctgaaatgttatttcacttgtaaaaactatctccggttac

SEQ ID NO: 162394 - DNA, 924 bp, Homo Sapiens
  misc_feature (50)..(62): n is a, c, g, or t
  misc_feature (153)..(201): n is a, c, g, or t
attgatttcatgatttatttatatatctccccaccccttccaatacttgnnnnnnnnnnnnngaatggcagtaccagaaggcattggttaagtgtcccaggaaccacacaagcagtgactcctaaagaagttcagaggaaggagagaacccannnnnnnnnnnnnnnnnnnnnnnnnnnnnnnnnnnnnnnnnnnnnnnnnagaatggtctaggcaaggatgcagactggccagtaaggtgggtccatgcaggaagctgagggaggtggaaggcccgtgggtctcgagcgcatctgcccgccctagtcggggaagagcaggaagccggagaagacgctgtcagagccctggatgcccaccatgtcgtagtagtcattgacagccagccacacctcctcgcccacctgcaacctcagcagcacaccgcccgagttgacctgattggttttggacgtgtggccacagaaggtgaccactttgacgccgctgcggtacagcagcacgcacaggttggctgtatgcgacgcgtggtagacaaagtagtagaggccggggactttgcaggtgaacttgccagtgctcgtgtcataatctccctgcgggttggtgaggaccgcgttgaatctgatcaggctgttgggtgcagggggctggtgggtctgccgagtgaccgtgaacactgactggaatttctgcttgtatctgccctcctcacctggctctccagggatgcccatggggccgggcacccctggcatcccagggggtcccatggggccatttttcccaggatggccgggtaagccgggttctcccttctgccctttgggtcctcggatcccgggaatggctgggattcctgcaggtgggcggtttctggcctggcacagagatgtcctcagatctgcttcccctctcccaggc

SEQ ID NO: 162395 - DNA, 1378 bp, Homo Sapiens
  misc_feature (936)..(992): n is a, c, g, or t
atttgggtcccccgggggtagattttttgtcccagaaaccgggcaaacagaccgttggggggcccctccctgggagaaggtgagggcagaattttgttctccgggaaagcctttccaccagccatttgcctggtactttatggtcccttagaccctcagccaactggtgaatcaggctttcctcgcttaaaaaagtagcttggaaacccaggggcccatggatgtcacctcctcccattcagaccatagagaacccatcgaccatcaagagccaggcagttgacgttcttctcccagtaggatccgcctatgcagtctagaataagattaactccagcacctttgtgaatttcagcgttgctttcagagaaatcttcttttttgtaattgaatccagcagctgctccaagcttttctgccatttgaagcttcttctgggagccagctgtgaccagaggaatagctccagccatccgggtgagttggatagcagctgtgcccacaccactcagtcccacaagatgtaacagctggaaggcggtgagccaggcctctgggatggctgcagcctgggtcagggtcaatccctctgggataggcatgaggagcccttcggggacagtgacgtactgagcctggcccccaccggggagcagagccatggctgtgtccccgatcttccagtgtccctggcagccaggccccagctctgccaacatgtccagatgcctcaagtcccaaaatgttgctggctcctggaggtgggtcatactggccttgtctctgcattaagtccgcccggttcagggcgctggccgccaccttcaggaggacttcaccctcccccgggctcggcttggccacctccttcacgtagaggttttccggtcctcccggcttgtcaaagtgcacggctaacatattgtctgaggacannnnnnnnnnnnnnnnnnnnnnnnnnnnnnnnnnnnnnnnnnnnnnnnnnnnnnnnncgctgtatcctcgcggagcagcccagcctcaggctggcaccgcagcgccccctgccggccagcgcctcgctgccctggtctgccgcggacccggcctccgccccgagctcctgcctgggaagtcctcggccgcctccagaccgatcccacccggaacacagatgggaacggcgggaagtgggatggcggtacagggctggatgcggcagagcaggacaacgccgaagaggatcaggcaaatcacactccctctgagttggaagcccccagcccgacccgggtccccggcgcccgtatgagttacttactcctggcccggctcccctcccatgcaccaggcggcgccgagtggttctggctcctgcgggtcccggtgacaaagcccg

SEQ ID NO: 162396 - DNA, 396 bp, Homo Sapiens
ctcctcttacagggaagggcggtctgtaagatggctcagcaataaggagtctctggatcagatccattgttggccaccccagggcctcagcagtgaccctattgctctttggggttctccaggacaaggacctcttctctgtcttcgctgatcccaatatgcttgatacgtcggtgcctgctcacccagccctcgtcaatgccattgtcctggttctgcactccgtagcaggcagtgccccaatgctctgggactgactcctcttcccggagcatgccctccagctcatagccgggatatgccaggtggcttcctgtttgaagggctctcagatgatgaggatgactttcacccaaacaccataccacaccgctctagcagttctctctgcaataa

SEQ ID NO: 162397 - DNA, 651 bp, Homo Sapiens
acctgggagcccatagcgtcgtagtcgcgggcgcgtgtgaaggagcggcccaacttggagatcttgcccgtcgccttgtcgatggtgatcacgtccccggcctggaccttgtccttggtcagggactcaatcatcttggtgcccaggtcgtagatggtctccatctctgtggtcttgagggtcagtttgcccaccttggagccttgatgcgaacgccgatggaccgccggaaggcctgcgtcagcgcctcggtcttgctcatctccagggagaagatttcactgccggcgatggctgtgaatggcgtgtcagggcccagggcctgcgccatgcccatggcgatggccgtcttccccgtgcccggctggccagcaataaggactgcccgaccggcaatcttcccttcccggatcatctccagcaccacgccagccgcccgccgtgccgccagctgacccaccatgccttgcgaagcctgccgaggctccaaggcatcgtccagccccagtccccggatgtgggagtgggcaccgattcgctcaatccttgttacatcacggatcatccgggactttggttgtggctgtaacggttgccatgatgccctcgtgccgattcgcaacacccagtcctcgtacctagccgttaatg

SEQ ID NO: 162398 - DNA, 632 bp, Homo Sapiens
  misc_feature (512)..(568): n is a, c, g, or t
agcctggtgggagtagaaaaatctcattcccagagtcagaggagaagagacatgtaccttgaccatcgtccttcctctcaagctagccagagggtgggagcctaaggaagcgtggggtagcagatggagtaatggtcacgaggtccagacccactcccaaagctcagacttgccaggctccctttctcttcttccccaggtccttcctttaggtctggttgttgcaccatctgcttggttggctggcagctgagagccctgctgtgggagagcgaagggggtcaaaggaagacttgaagcacagagggctagggaggtggggtacatttctctgagcagtcagggtgggaagaaagaatgcaagagtggactgaatgtgcctaatggagaagacccacgtgctaggggatgaggggcttcctgggtcctgttccctaccccatttgtggtcacagccatgaagtcaccgggatgaacctatccttccagtggctcgctccctgtagctctgnnnnnnnnnnnnnnnnnnnnnnnnnnnnnnnnnnnnnnnnnnnnnnnnnnnnnnnnntgggcatcttctggcttgactggatggaaggagacttaggaacctaccagttggccatgatgtc

SEQ ID NO: 162399 - DNA, 710 bp, Homo Sapiens
  misc_feature (484)..(484): n is a, c, g, or t
tcggttacatttcaaatttatttccactcgttctgagctggatcaatggcagacaaaggtacctcttagctctggcacccgctgttccccccaaatgtcaaggactgacatttgatgccattatccccagtcagcatacagatgacttatttccttgcttccccagcccccgggtaccccagcaccccctcaccctcaacaaggactttcctgatgcagatgggggaggcattcagggaagtgaagtctgttgtccttcaaatacagtactcctttctgctgctatcaccagcatcttggagggcagggtcgccctggaggtctgcatctgcactctcagcaaactccgtgcccttgggctcattggtgtggtacgtgcccttgtgccggtacatgtagcgcagcatgacgaagaggagggagactaggacgatggccacagcagcgatcacacctgcaatgacgacaatgtccattatggtgnggggtggaggtctccattctgccatccggccatccagacatccctggatcaggctctgcaatggtggtagtatgcattgtggtggaggcagaggccatccccggatcaggctcgaggctgagaggccacgccgtgctgttggggcttctcgtcgaccacattcctgggcgtcagcccgggcagagaccgcggggactggccaggccgggccaggccgggccggggg

SEQ ID NO: 162400 - DNA, 1290 bp, Homo Sapiens
  misc_feature (257)..(309): n is a, c, g, or t
  misc_feature (598)..(1011): n is a, c, g, or t
  misc_feature (1025)..(1026): n is a, c, g, or t
  misc_feature (1030)..(1124): n is a, c, g, or t
  misc_feature (1201)..(1201): n is a, c, g, or t
ttttggcttttcacttcttttatttgttaaaatagtcacatccatatacatgaaaagatttgaccataatgcattcattgattgtggctcttgccatctcgtggcatccaggatcctggctgaaaggttttaccagtgctgctgggagccactgagggttcttcctttccaaagtatggagcagaggcatggcctttaatttgagtttgaactggtggaggcaggagttcctcactggtctctttactaaggagttnnnnnnnnnnnnnnnnnnnnnnnnnnnnnnnnnnnnnnnnnnnnnnnnnnnnntcattctttagtatttcctccatagtaggtggagtctttcttgttcttctaatccaagcttcccattctgttggaatatcccctgcttcatagtctacttcttttttatttgctgcttctacaattcttttctctcgaatagtttgtcctctccagttcttgtactgcgggatgtagtagtatttggtctcaggatttgttccgcgccttgtggagatcgctgtcaagggaagtgaaagagcacgtgggcacggaccaattcgggaacaaacctcgtgccgaattcttnnnnnnnnnnnnnnnnnnnnnnnnnnnnnnnnnnnnnnnnnnnnnnnnnnnnnnnnnnnnnnnnnnnnnnnnnnnnnnnnnnnnnnnnnnnnnnnnnnnnnnnnnnnnnnnnnnnnnnnnnnnnnnnnnnnnnnnnnnnnnnnnnnnnnnnnnnnnnnnnnnnnnnnnnnnnnnnnnnnnnnnnnnnnnnnnnnnnnnnnnnnnnnnnnnnnnnnnnnnnnnnnnnnnnnnnnnnnnnnnnnnnnnnnnnnnnnnnnnnnnnnnnnnnnnnnnnnnnnnnnnnnnnnnnnnnnnnnnnnnnnnnnnnnnnnnnnnnnnnnnnnnnnnnnnnnnnnnnnnnnnnnnnnnnnnnnnnnnnnnnnnnnnnnnnnnnnnnnnnnnnnnnnnnnnnnnnnnnnnnnnnnnnnnnnnnnnggggcagaacgtannaagnnnnnnnnnnnnnnnnnnnnnnnnnnnnnnnnnnnnnnnnnnnnnnnnnnnnnnnnnnnnnnnnnnnnnnnnnnnnnnnnnnnnnnnnnnnnnnnaagcgttccccctggactcctcgtggctctctgttcgacctgcgctacggaactgtcgcttctcctcgggagcgtgngttctcaactagcttagtactattcgttagtcgtgtcagctggtggtgagacccgttagcgacgtggctacggtatacgctgatcaccg

SEQ ID NO: 162401 - DNA, 264 bp, Homo Sapiens
aaaataatgaatcataaattttatttcaaaatgtaaacgtcactaaacatgcatacacgttaaaacaataaaatttacaatttcgttaatttttctttttgcataggacatcattacaatatagaatctatgccatacaaaatacatacaaagttttatccgagcaagccaaggccagactgggaactgtacaactgtaatacttcactgtagtgatccaggaaagatgaaacgtggccttcggaattatggtgggtgctggtt

SEQ ID NO: 162402 - DNA, 405 bp, Homo Sapiens
aaaatagctaaataaatctttaatatttctaattgcaaatgtacagaaattgcacagccacacagagtcttagaacaccaacagcttcctctgtacattattacatagttaaaagtcgcagctggagggaggagctccagcccaaactccaacgtttgcattttttccttttcacatacttacaaaagaggggagctgggacgcggtgtgggagctggggggctttgtggctgagtgtgtagaaaagagagaggctgtttccctggacagtctggctcccgcagtcgtgcggggcgcagggggaggtgtacctggggcagatgctctgggggaccggggcgtgtggagctgtgcaatttctgtacatttgcaattagaaatattaaagatttatttagctatttt

SEQ ID NO: 162403 - DNA, 749 bp, Homo Sapiens
tgggaagaagaagcttgtttattgtgttacatacacagcacggggctctggcctgccagccatggggacctactcaaactcaggaacaggccggtctcctgaacctcagtttcacttgggggctcagcccagtcgccagggccttctgctcgttgttcctccctccaaggtcctgccctggaggctccaggagaaatccaaggagtgggagggtggagtcaggatgaggagtggacactggtcagctgccccttctgctggaagtagaactggaaccgagactgggcatagtccaagtaaccaaattctatggtggacatggatgcctggaggatggaccacagaccccagaagaaatgggatgccagagcataccgactgacttctaccagcaaatcttcttccagttttctctgctcctcttgggagagggtctcacctttctttgcctctgccaggtaatgacgaataaaatgcaactgctgttccttgagtggggtagtctgtgggccttgctttgtagaaaggcattcctcgtgagtataatcataaacccactcacaaaaatggttcccaatgtcaaagcccctatagttataactgctgtactcgaagtccaccagcatgaggctgtcagcattttctggctctgagagcagcaagatgttcccttcctggatgtcattgtggcagaagagactggcgatggggtagactctagtaactcctgaggttgccatctcatcttc

SEQ ID NO: 162404 - DNA, 441 bp, Homo Sapiens
  misc_feature (39)..(39): n is a, c, g, or t
  misc_feature (53)..(53): n is a, c, g, or t
  misc_feature (240)..(240): n is a, c, g, or t
  misc_feature (431)..(431): n is a, c, g, or t
ggcattttaaaatttatttaaagtcttggttgttcaggnctaggggttcaagncccagtcaccttgaggactcaagacatcaggaattcagtccccagcccagagatcaacgaaagaaagacaacttttcttggagccaggcctcagtgaggtcatcagtggtgcggatttcgaacacctttgtgagctctgctgtctgcaccagcctgtttttactccctgcatacatcatctgttgtntccggcttgcagcctgggctgtctctccggcaactccattttgagctcctctggggaaatgttctgaaattcttcctccagcaccaccatctgccggtctttgtccaccttcattatgatggctgcattgtctgtctcttttcggaagcggaatttcctcagcttttctgttagctctgggtctacctcgnacaccaccaa

SEQ ID NO: 162405 - DNA, 839 bp, Homo Sapiens
  misc_feature (305)..(351): n is a, c, g, or t
  misc_feature (357)..(369): n is a, c, g, or t
ataggctaggtacgatggctgggtgttgaattcggcacgaggcattctctctcccctcactggtatgggttcagagcaatgcctagggcccctctctgctcccctgcctagtggggtggtagtggctacctctcagccccaatagtccctgctcctcttagaatcttcaccaagtggcaggccacctctgggcaggaccacctgcgtctggcacccaggaggtgaggcagacaccatggttaggtgatagggtctgaacccagttggggagacagaggggttcagacttgggaagaatctgtcannnnnnnnnnnnnnnnnnnnnnnnnnnnnnnnnnnnnnnnnnnnnnncatgcnnnnnnnnnnnnngccgtgaggacagttgaatttggggcatttttctacaagaagcagtcagccttctctcccccataaggactggctgtaaccttaagcccatcaaagttacttccagcctggagagaacctcaccaaacagctggtgtggcctgagggtggccatggtgggaaatgggcatgagaataaatacctccccaaattcaatctgagcccagcaggagaggatggtagggttgccagggctcagaagtgcaagctgattactcaccccaccctgcctcgccgcacctttcctttgtttccttgggtgaatgcaggagcagcagtggctgcccttcccacctggacagtggtgtgtgtagaaagccagctggatgtttgtggtggggcctcatggtgcctaggaggagataaagatgaggaggtttttccttattgtataaatgaatatttgtatgattaaattaacacacacacc

SEQ ID NO: 162406 - DNA, 1056 bp, Homo Sapiens
atttagagccgggtaggggagcgcagcggccagatacctcagcgctacctggcggaactggatttctctcccgcctgccggcctgcctgccacagccggactccgccactccggtagcctcatggctgcaacctgtgagattagcaacatttttagcaactacttcagtgcgatgtacagctcggaggactccaccctggcctctgttccccctgctgccacctttggggccgatgacttggtactgaccctgagcaacccccagatgtcattggagggtacagagaaggccagctggttgggggaacagccccagttctggtcgaagacgcaggttctggactggatcagctaccaagtggagaagaacaagtacgacgcaagcgccattgacttctcacgatgtgacatggatggggccaccctctgcaattgtgcccttgaggagctgcgtctggtctttgggcctctgggggaccaactccatgcccagctgcgagacctcagtgagtccaggcccctggaggctggggagcagctccacatgttgagcccagtcgagttcagtgtggccgtaggcaggccctggagctctgggccagctgcacagccagagagagcccttgagggagggattaggggagtgtgacccttccttccttccttgtcagcttccagctcttctgatgagctcagttggatcattgagctgctggagaaggatggcatgtgcttccaggaggccctagacccaggccctttgaccaggcagccccttgcccaggagctgctggacgacggtcagcaagccagccctaccacccggcagctgtggcgcaggagccccctcccctggcagctctgacagtctccagcgcagggactggtgcttctcggagctcccactcctcagactccggtggaagtgacgtggacctggatcccaactgatggcaagctcttccccagcgatggtatacgtgactgcaagaagggggatcccaagcacgggaagcggaaaccaggcgggccgaaagctgagcacagagtactggg

SEQ ID NO: 162407 - DNA, 367 bp, Homo Sapiens
  misc_feature (49)..(50): n is a, c, g, or t
  misc_feature (57)..(58): n is a, c, g, or t
  misc_feature (66)..(67): n is a, c, g, or t
  misc_feature (73)..(73): n is a, c, g, or t
  misc_feature (112)..(113): n is a, c, g, or t
tagacaggtccacgccatgtgagggcatgcacagaggcaggcagctcgnngccagcnnagtcggtnntcactntctgatgtgaccttactgttgtctccactgaggaccacnnaagtctcatcgaccttggtaagtggggcagcgattttggcagcaatctaggaggtaagagtgggaggacagcctggttggcgctgactttgttctcagcccggtccagcatctctccctgccttccttaactcatctccaaccccaaagcagcctgggtggcccttagtctcgagccatggtaagaaacgtccactgtgggccagggatggcttaggcctttagtagggttcgctccgacatgcgtgggttgca

SEQ ID NO: 162408 - DNA, 588 bp, Homo Sapiens
  misc_feature (506)..(526): n is a, c, g, or t
cctgaaatgtaaattgtttttaatatatttaagagcacacagaagtcttgatttataaaaaaataaatatataacatgacaaatttactgatgatcctggagctctgaggtcaaactctttaaatgatcagtgaaaacataaaacatccatgatctgttaacacacacaggagcatattccagttgtaaaaaacaaattccttgaaggctcagaacgaacaaaaatcagtctttatggcagaaagcacatccaaagctaggcaatgaagttcagcctgggccacgtgaacctttcaccagccagcctataacctatggagccaggacaggaaagcatgatccttcagctcatgacgccacccaggcttccagacaactgcagaatgaaagagtccctcagaggctcccggatcatcagtaaatttgtcatgttatatatttatttttttataaatcaagacttctgtgtgctcttaaatatattaaaaacaatttacatttcaggnnnnnnnnnnnnnnnnnnnnntggccttatcgcggccgctccaacatcataatggtaacacggcgcgccgtcgagtttaatta

SEQ ID NO: 162409 - DNA, 853 bp, Homo Sapiens
  misc_feature (619)..(728): n is a, c, g, or t
cgggaggaggctattcaggccggggcgctcactcccgcttccgtaggtggatgtagatgatgccgctgaccaggcgagggggaaggccacccaggccaggcgaagcagtatccgaagctgccccctcgcgggtgcttctccaggatctcctcggcgtgaatggcatagatcaaggcgccagtaaacaccgccacgctggtgcaaagctggcagaggccggtggcatagaagagacctcctcgtcgcatggtgtagagctggaacatgaacaggatgaaggagagacagcagagaatgagggagagcaccatgaggacctgcaccgccttcagccagccattctcgctgacattactgcaggcccagtgttttggtgtcgttgttccacgtgcagtcgtaccagagattcagggactctttcccagggagagtccaccaggacttgtccaaagtggccacgaaaagcagtataagaatgaggatgtgaagggctgagaccaccagcaagaggagtgacatggctgcagtggaagccgagagccgcgaaaaaaagtcagagctggagtcggagtcttgtccctcgcccacgcgtccgcggacgcgtgggcggacgcgtggnnnnnnnnnnnnnnnnnnnnnnnnnnnnnnnnnnnnnnnnnnnnnnnnnnnnnnnnnnnnnnnnnnnnnnnnnnnnnnnnnnnnnnnnnnnnnnnnnnnnnnnnnnnnnncacatgtgatccgtccggggctaggctaactcggaggcctgcacggccccgtgtctctatggaggtccaccccgcgcgcatggcgtctccaggcaacggaggccctaacgagtccgcaattaacc

SEQ ID NO: 162410 - DNA, 360 bp, Homo Sapiens
cgagggaatgtagtgatgtggggtgggcactgtttccagggaccccggcaggggattctccctgtctcccagttccagggcagccgggcctgccgtcccctcaatttcccagacccggaggccggggcgaggaggagcctgggttagtgcagccaggtcgaagccccagcgcgcccctccgcagccctgcgggactcagctgccctcacactccgggcaacgctcggtggcagtggcggccgtggcgccagggggcagcttgaagtccctgccgcagccggcgcaaatatacaggcggcgccgcatgtgcgcgcgtcggtggcgaatgaagtgcgagcttaggcggaagcggcggccgca

SEQ ID NO: 162411 - DNA, 967 bp, Homo Sapiens
  misc_feature (89)..(89): n is a, c, g, or t
  misc_feature (116)..(128): n is a, c, g, or t
  misc_feature (132)..(132): n is a, c, g, or t
  misc_feature (134)..(134): n is a, c, g, or t
tagggaagcccggcagatttaccccctttgtccaagaaagctgggtccggaaaccagctatgcccctgtgccatttcattcctcttttntccgcaccgaccatagatgcctcgagnnnnnnnnnnnnntttntnttttccatggcaaaccagcctttatcaagagttgcaggataaaaatagtctttgcagccagacatccctccaggcatgtcttctgacctgagaggggccagtgtcctgtacagtagaagccggggtttccgtgctgcacccgcagcaccagggcacgcaccgtggggaggcagccttgggctgtgcccgcgacagggcccctgcatgctgagcaacagcctcacatgagcaggcagcacggcctcctctccacgggagcctccaccgccggggctgtgagcttgagcaggggtgggtccccgcctgccctgaagccacagtcaggctggggggtcaccgtgtcaccaggcaggccaggctcagctgtctcagggctctcgggcccctcaggtgggggtcgctgcagcttggcagcagctcgctggcgcttcaggtcagccagggtgtggtgggccttgtcgtggaccagggtgtggggggtggtgctgtccagggggctcagctggtaggagacactccggtctagtcgcttggagtatagatgccgcactggggagccccctactcggccattgtgcggcctgaccacttcggggttgtcctcctccgggggcggcggcctgagctctgcgcctgtctggcggtcatcgttgtcctcgggcggctccgggctggtgggcggcggctgttgccacacgatggcctcctgggcgtggtccaggggggcatggaggtctgccccggcctgcagccggctccggatgtcgtccagcatgcgcagttctggcacggcccggcctcgtgccgaaatcgccacccaggcctcgcttcct

SEQ ID NO: 162412 - DNA, 709 bp, Homo Sapiens
  misc_feature (434)..(461): n is a, c, g, or t
  misc_feature (574)..(575): n is a, c, g, or t
  misc_feature (585)..(586): n is a, c, g, or t
  misc_feature (597)..(597): n is a, c, g, or t
  misc_feature (601)..(601): n is a, c, g, or t
  misc_feature (603)..(620): n is a, c, g, or t
  misc_feature (655)..(656): n is a, c, g, or t
  misc_feature (671)..(671): n is a, c, g, or t
  misc_feature (689)..(689): n is a, c, g, or t
tggagtctataatttttaataattttaaactagctacaaaatgtcaatcacttcacaaactgacagaggagacaggaggaatttaatattacatgctataatgatatttatctcacagtttatatttcattcatttatattatttttttaaaaggtttctttatcagctactaaacatctcagcaatttggtgtgcatagctctagattaagcaacaaagaattgtactgataacaaaccacaggggaaatggtggttagtaagagtcagccttataaaatttacatccacactgtttcacagcaagattgctctctccaaaacatagccatcaaaagcagcaaacaaaccctatattacatccatttgacataatttcagccaaacatatattttgctggaaatgattaaatggtgagtgtgtcaaatccatnnnnnnnnnnnnnnnnnnnnnnnnnnnnggatgattatgatttagaagtctctatatattgacaggaacaaaagtgacactactgcacttttgctggtataacttaatcttgacagtgtctcaatactgagcatgctttgnngttgttctgnngatgttgctgntgtntnnnnnnnnnnnnnnnnnnctcatcagtatgctactgtcatggaaagtttttgnntaagtaggaatctanaaatctatctagttctcnatcataaatgcataaatcac

SEQ ID NO: 162413 - DNA, 429 bp, Homo Sapiens
  misc_feature (61)..(77): n is a, c, g, or t
catgagccaccgctctgggccaacttttatttttttaagaaccaactttttattgattgcnnnnnnnnnnnnnnnnnattctgctgttctcctggcttcaattttattgatttcttctctatttccttctttctgcttgctttgggtttatttgctctttatattttctaggttcttgagcttggaagttggattattaatttgaatcatttccttttctctgatgtaacaatttggtgctataaatttacatttcagcactactttagctgtgtctcacatacttttgtatttgtattttcattttgattcagttctgtgcattttaaaatttctttgatccatggagtatttagtagtgtgttaggtttctaagtatttggagggttttctgttttctttctattattacttgcatttttttgtgtg

SEQ ID NO: 162414 - DNA, 195 bp, Homo Sapiens
ttttactgtgaaaatctttcttttattactgtctcatgtggcaaaataacattttatacaaataagtcacctagtttactttggacacaaagacaataaaaactggaatgtgattttgggggaagcgggaaggaggaggaaggacagatcaggtcattgatgtttcttatattctgtaaaaaatagatttacagg

SEQ ID NO: 162415 - DNA, 389 bp, Homo Sapiens
tactttaatcccacactttgggtggtggtggagggcaggtcatttccctccaatccccccaggtcagaccccaccagcaggccgtggggcctcctcccaggcctgggttatcctgtgatgtctgtccagctctgggccctggaatctgccctggaattagcggaaaacaaggcccagtggtggcgaatctatcaccaagagccggccacccagccggggtaatatttgaggaagatcttcttggccaggtccacagtgtctcctcgcggctggctggggtacctctgcttgctgagaacgaaggcctgctccagttggaagacatttttgtcaaactggtgctgttggaaagggatgccctgggccacactgtcaaccagcgcctccag

SEQ ID NO: 162416 - DNA, 518 bp, Homo Sapiens
  misc_feature (166)..(174): n is a, c, g, or t
cagtgctttattgagttgtcatgagcctcgggcgggagcagcagcactgcctctccacgctccgggaaaccgcagctggcgtgtgccacatcggtcccacctcgctttacaaaacagtcctgaagcttaatcaaataaaactattgtacacaacatttacattagnnnnnnnnngttggctccacagttggggcatcgtcgcttcctcaaggcaaaacagcaaatgaacccaaaggggaagaggatgatggccaggaagatgcccaggaaggtgaagcagtcctccagcaccccaaccctgcagacaggacagcctcctacgaccacgatagagttggcaggatagcgggtgacggtccggctgtggatgttgtagaccctgggatggtgggtgggtatccctgtgacgaggtaggggtagggcggcggcgggggcgcggcggggatggcgccgtagccgtgcgggccgcacgcgtagtcgccctggccggcctccaggttgtaggcgggcggccgca

SEQ ID NO: 162417 - DNA, 562 bp, Homo Sapiens
gcagtgctttattgagttgtcatgagcctcgggcgggagcagcagcactgcctctccacgctccgggaaaccgcagctggcgtgtgccacatcggtcccacctcgctttacaaaacagtcctgaagcttaatcaaataaaactattgtacacaacatttacattagaaaaagagagctgggtgtaggaaagccgggcctggtgttccctttaagcgaaggtggctccacagttggggcatcgtcgcttcctcaaggcaaaacagcaaatgaacccaaaggggaagaggatgatggccaggaagatgcccaggaaggtgaagcagtcctccagcaccccaaccctgcagacaggacagcctcctacgaccacgatagagttggcaggatagcgggtgacggtccggctgtggatgttgtagaccctgggatggtgggtgggtatccctgtgacgaggtaggggtagggcggcggcgggggcgcggcggggatggcgccgtagccgtgcgggccgcacgcgtagtcgccctggccggcctccaggttgtaggcgggcggccgca

SEQ ID NO: 162418 - DNA, 396 bp, Homo Sapiens
gtattgaaagtagcaattttatttgagttaaaattatttacaaaaacccaaagacatacttcatgaaactggtacaaactattttttcctgccgttggcttttgctccaaagatcacagctgagaaatactgtataaaataaaaataggattggattcagaaaagtactctactgttctaatttccaattggtagtatttacagaaatatttacaatggaaaaaaggttactttaaaacttttagttaagtcagcctcaagtaccctaaaatgcagagttctctgagggttaaaaacacacaaatgcactgcagttggtgaagtgattatctcccccaccacctccccccaccaaaatctgcatctctatcagtgctcgacaattagttattattt

SEQ ID NO: 162419 - DNA, 1007 bp, Homo Sapiens
  misc_feature (132)..(188): n is a, c, g, or t
  misc_feature (374)..(774): n is a, c, g, or t
  misc_feature (785)..(785): n is a, c, g, or t
  misc_feature (800)..(800): n is a, c, g, or t
cattgctttaacattttgaaatttattttggtttctgttcaacaaaaccaaaccacattgggatggcatttacagaagctcagaaaaacattatgcactgaaaaatacttctcattagaccacaacaagctnnnnnnnnnnnnnnnnnnnnnnnnnnnnnnnnnnnnnnnnnnnnnnnnnnnnnnnnncattgtggaaacagtgaccatctattaactgggaaaacacaaaagaagagaaacaatttcaaccattaatcatttatcaaacatgaagtctggtgcattaaaggaatatctatcagagggtgaggagctgtatagtatgtcaaactgccagtaagccagcccctcacccctcgtgccgaattcttnnnnnnnnnnnnnnnnnnnnnnnnnnnnnnnnnnnnnnnnnnnnnnnnnnnnnnnnnnnnnnnnnnnnnnnnnnnnnnnnnnnnnnnnnnnnnnnnnnnnnnnnnnnnnnnnnnnnnnnnnnnnnnnnnnnnnnnnnnnnnnnnnnnnnnnnnnnnnnnnnnnnnnnnnnnnnnnnnnnnnnnnnnnnnnnnnnnnnnnnnnnnnnnnnnnnnnnnnnnnnnnnnnnnnnnnnnnnnnnnnnnnnnnnnnnnnnnnnnnnnnnnnnnnnnnnnnnnnnnnnnnnnnnnnnnnnnnnnnnnnnnnnnnnnnnnnnnnnnnnnnnnnnnnnnnnnnnnnnnnnnnnnnnnnnnnnnnnnnnnnnnnnnnnnnnnnnnnnnnnnnnnnnnnnnnnnnnnnnnnntaatgcatcanatggcacgaacgtanaaggcgcgttgctgggttttcatatgctcgccccctgacgagatcacataatcacgctcagtcagtagtgcgaaaccgacagactataaatacagggtttcccctgaaggcctcggggtctctgtctcactgcgctacggatccgtcgcttctcttcggaggggggttcccaagcacgggggattactcgcggaggcttctcaatgg

SEQ ID NO: 162420 - DNA, 139 bp, Homo Sapiens
gataagatgcctctttattggtgctggagctgttcctgagggagcaggccatgggaccctcatcgggacccttgccctcagctacttccgcctgcgggggatactctgtcccaagggtaccccttctgtcgtcttctcg

SEQ ID NO: 162421 - DNA, 803 bp, Homo Sapiens
  misc_feature (193)..(228): n is a, c, g, or t
  misc_feature (774)..(774): n is a, c, g, or t
gcggccgcggctgtaggcttttttgaatgttgacatatcatcaaaaacatatgccatttctaaaaagtctagattcagagcaggatgccattttaggtgaactatgtcttcactaatgaaataggacgcagagagaaatactatgtttattaagaactttttgcttagagaagacaataaaacatatttaagnnnnnnnnnnnnnnnnnnnnnnnnnnnnnnnnnnnncaatgccttctgtagtcttatttcactacagattgaactagggagataattttcttcttcacagacaaagatctttaagtttcttttctctgattatttgatcaaggaacaaactatattacaaacatggcacaaaatccaggctttcatttctagccaaccctcaaacaccaccaactacaaagaaaatttaaaagtctaatttgtaaccttcagataagtataaattagttttttctaggctttcattatttggcttcttatacaatctatcttgtaaagtacattcctctaaatttacattatctaaaattaaggctaagcattatttaaatcaattaatcatacaatattttatgacaatatgcacatatttataaaataacttttccaaaagcagtaatacctcaaattaaaaaagaaatcttttattgctttgaactatctgctaaaataaaaacacacagaaagggaagaggtttaacaggtaggaagaacatagaaaacccttaaaagttttaaagtagtccagttcacttcttccanacaaaagaattcacagtgtctcttcaggt

SEQ ID NO: 162422 - DNA, 275 bp, Homo Sapiens
gtacattttggctgcagtattggtggtagaatatactataatatggatcatctctacttctgtatttatttatttattactagacctcaaccacagtcttctttttccccttccacctctctttgcctgtaggatgtactgtatgtagtcatgcactttgtattaatatattagaaatctacagatctgttttgtactttttatactgttggatacttataatcaaaacttttactagggtattgaataaatctagtcttactagaaaataaaaa

SEQ ID NO: 162423 - DNA, 476 bp, Homo Sapiens
gtgccctttgacttgtttaagtggttgcagctgaccatgtttgcatgaggcagggactcggtcccacttgccgtgctcctctcgctcctcgtctgccaagcctcgcctcctcccactccacgttaggccaccccagctgcaagtgccttccttggagcagagaggcagcctcgtcctcctgtcgcctctcctgccagccaccatcgttcatctgctccgggcagaactgtgtggcccctgcctgtgtcagccatgggctcgggatggactccctgggccccacccattgccaagccaggaaggcagctttcgcttgttcctgcctcgggacagccccgggtttccccagcatcctgatgtgtcccctctccccacttcagaggccacccactcagcacccccggcctggccttgcctgcagactataatctatagccgctagcacgacatatagctatgggggatcaactagagtc

SEQ ID NO: 162424 - DNA, 303 bp, Homo Sapiens
tttacatatatataatattttattttaaaatgtcattgaacatatacatttctttagctttttccaggggacattgcacctaagtttcaaaacacacaaaatagatcccctttactaaacagttttcattttggggttacaaaaaagtcaatgtttcacaatcacaaagcataaaggtacatggttctgaaacaatttccaggcagatttctctcattcactgtactagggtagttttggaaacccagaccatgatccattccttacaaatgatctccaccatgggcctccctgggtctccag

SEQ ID NO: 162425 - DNA, 1051 bp, Homo Sapiens
  misc_feature (136)..(145): n is a, c, g, or t
  misc_feature (237)..(268): n is a, c, g, or t
  misc_feature (303)..(333): n is a, c, g, or t
  misc_feature (418)..(437): n is a, c, g, or t
  misc_feature (457)..(927): n is a, c, g, or t
  misc_feature (934)..(934): n is a, c, g, or t
  misc_feature (974)..(974): n is a, c, g, or t
  misc_feature (992)..(992): n is a, c, g, or t
ctcttccacaggaaaagaattattttattaagtattttaaaacaactacttaacatttactcatagataaaaatatttacaattttacaccttcaggaaggctccaaaatataaacactgtacctctccctagagnnnnnnnnnnttattcttctcttcaaaaacaggaatacattcatttttttctcactgtgtgaatcaagtaattatacaaataaacatctgaaacattttccnnnnnnnnnnnnnnnnnnnnnnnnnnnnnnnnacagctttacaaataaaggcaacgacttaataccnnnnnnnnnnnnnnnnnnnnnnnnnnnnnnncacgatcagcaatcaggcatagtgcattttgaaaagctgctgcggagctggctggacacatcgggaaaacaagtactctggaccnnnnnnnnnnnnnnnnnnnngccctcttgccgaattcttnnnnnnnnnnnnnnnnnnnnnnnnnnnnnnnnnnnnnnnnnnnnnnnnnnnnnnnnnnnnnnnnnnnnnnnnnnnnnnnnnnnnnnnnnnnnnnnnnnnnnnnnnnnnnnnnnnnnnnnnnnnnnnnnnnnnnnnnnnnnnnnnnnnnnnnnnnnnnnnnnnnnnnnnnnnnnnnnnnnnnnnnnnnnnnnnnnnnnnnnnnnnnnnnnnnnnnnnnnnnnnnnnnnnnnnnnnnnnnnnnnnnnnnnnnnnnnnnnnnnnnnnnnnnnnnnnnnnnnnnnnnnnnnnnnnnnnnnnnnnnnnnnnnnnnnnnnnnnnnnnnnnnnnnnnnnnnnnnnnnnnnnnnnnnnnnnnnnnnnnnnnnnnnnnnnnnnnnnnnnnnnnnnnnnnnnnnnnnnnnnnnnnnnnnnnnnnnnnnnnnnnnnnnnnnnnnnnnnnnnnnnnnnnnnnnnnnnnnnnnnnnnnnnnnnnatcacanatcgacgtcagtcagaggtggcgaacccgacagactatanatacaggcgttcccctgnagtcctcgtggtctctgggtcgactgcgctacggaactgtcgctttcccttcggaaggg

SEQ ID NO: 162426 - DNA, 849 bp, Homo Sapiens
ctccagcgcagatccaggtgtccgcagaaattctgcagcattacaatctgcttagaagcagaacctggccatggtgtcggcccagcaagtgtaaggaagtacgtgcccccggcagcgcagaggctgggagtgctcacacaggagatcagtgcttgagagggagcgtagggtaagcgctctgagccacaggccaggtgtagtttctggaacttgatggtgacagtctgttccttgctgcccaggatgagccaggtgcagttggcaggggaggtgcggctgtcccggaccaggggcctctgtaaggtgccctgcacttctaagagcactgctggggggtcctcacaagcatgatttggaaaaataatccggtctggatgggccagagcgcctccaaggaggaggaggaggagggtggccaacagcatcctgggctgtccagaggtgccggaagggtcccggagcttctgtggtctacccgatggggtcgcggcggagccccgggcgcccaggctccctggtgccgcctccccaggggggctccatggcccgggctcgacccgtactctggatgccagggctgggggcggggaggcggcggcagcccgggagtaggggcggtgcctttcgccaactttggagttgttttctccgtccgccgccgcactcttctctcccggggccggctcctgaagccccgggtctcggcactggggcgcgccctcgcctacagcccgcccgcaggcagcgagcgcccctggtctggcctggtcgccacctgccggggtttgagaccacttcctcttcggcctcgtgccgaattcggcgcgccgtcgacttcatactctctcc

SEQ ID NO: 162427 - DNA, 349 bp, Homo Sapiens
aaacacagagagccaaagacggatggagatgacaccgagacagtgccctcagagcagtctcatgcaagtggctgggggtctgaaccgcaaccagggcctgaacaggctgatgctggctgtgcgcgacatgatggccaacttccacctcaacgacctggaggcgccgcacgaggacgacgctgagggggagggggagtgggactgagcgtccgcagaggtgaccgaaaagccgtatgatgatgttcccgatttctctgttggtcggagtcggccagttgcctgaagtagggaagctgagtgtgtcgctccctggtccactgtttctcctataaatgtaaatgggtcacgc

SEQ ID NO: 162428 - DNA, 1184 bp, Homo Sapiens
  misc_feature (952)..(965): n is a, c, g, or t
acagcggacgcaccagttttgtgtttcgcgtaccacgttggggcttctacacagggttcacacgacggtctgtcttctaggcgtcgttgatcctctcccttttggccctcgtccacaggttcacatggtgcccatgtcctgtgaaccgattcgttccgttcgctcccttattcttccggtctcttcggaatgctcctccaccccgggtcaacgtgggtgccccctcggtcctcgttctgcagcccggcctgccacccttgccgatggccttcagagttccattcggcgccaccgagcccagggatccggaggccgttctctccgctccccgggtcatgtgggcgagagccgctgcctctgccgtccagctgttcttggtcatgcgagggctgctccaggccaggctgggagggaggtgtacaggtgctgccgtgcaggctcatgtgggggcccacagcgcgctcgatgggctgcggctccgctcccgggggtctctgcggcagtctccattggccgtcttgttcagatggggcttgaagatgcgactcattttggagacgtggtcgttgtccacacgtcctaggtcctcgtcacctggctccatgctgaacttcctcttgctggggctgattgggggagggccggtgcggtgactgctgagggcagaggccacccggcagggtctgcaattctgggttctcccctgagagcagcttcgccttcgtagcacagaatgccgatattgttgttcatcttgtcccagtactgatagttcaacaggtccatcttcataaatagcatttattgggctagccaagaaaccagctctttgcttttgcccccaaagagttaagtttccaaaatccattgttgctgagtagctcctggctcttcaacttcaccaaggcagaggcccagcctcagactatccaaaccaagtatgccaaagttnnnnnnnnnnnnnntcaggcacaaaaaaatcgagctcacacgaaacccttcaagggcttactggtagacggtgtatgtactgtatccccgatcgagtatgaaaacagcgtttcagaagtccttacaagtccttcctggaaatggaaaagagtgaaaaagagaaacgcgcagcccgtttcctaggacaagcggcgccggcccctctcacagcccgctgcaagccggcagcgctg

SEQ ID NO: 162429 - DNA, 860 bp, Homo Sapiens
gttcgtgccgcccacttgttgtgaaggagcagaacctccaaaccacaaggaagtccagagactcggggagaccgggtgaagcgtcagttccatggaaaggaggggccttcccaggactctgggagggacgcgggcaggtaggcaagggacctcccgggggagcctccacactatggaggggaggacttggaagccgggccgggagccaacctccaaagtcccccacactcgggccttggcagggtgggccacagcagacagcctaggggacaaaaggggcagaggcaaagcccatctgctcgggtgtgctgcaggtccactcagcttctagctaccccaggcagggctggtgccattcaagcacggaaaaacactagctgaaaaccctttcctaaaaatgccctggaggagtgagctgctccctgcccctcccagagaggccgagaccctcccagctgcggaaccctagagttaatgcctcccccaagatcaaatggaggtgccacaggcagatacctgagaagagcaggtcaccaatgaccaggtacttgcggtcagtggcgttgctgatctgggggaaatacgcgtcgaccaccaagaagaaggccgaggccaggaaggccagcaccccgatggcactgccatagcggcaggcatcctcgttgcggttgaacacgcagtacatctgcttagactcgtgggcattgctgtagccctcaccatagatgcaggagaacacgatcaaggcgaagaccaagcacacggcgcgcgccaccacctgcggctgcgtcaggaagcgccgcaggtcgaaggagccgcccgccttggccgcgccgtaggccccgctctccatgtcgccg

SEQ ID NO: 162430 - DNA, 249 bp, Homo Sapiens
agttttgtaacaggattttaccgtagcaaatgtggaataaagaaaaggtttaggtttaggaacacccattagggttttttcgttacttcaacataaagtaccctttaatacacgaagtacatcctttaaacagccaagagaaaggaggttgtacaatagagacgtcatgtttgctttctaaacatttgtttgactcctgacacaatggttttgctttggggtaacatgaaggttgccaaacttcaaagt

SEQ ID NO: 162431 - DNA, 1065 bp, Homo Sapiens
  misc_feature (162)..(198): n is a, c, g, or t
  misc_feature (678)..(678): n is a, c, g, or t
  misc_feature (760)..(760): n is a, c, g, or t
  misc_feature (806)..(806): n is a, c, g, or t
  misc_feature (816)..(816): n is a, c, g, or t
  misc_feature (849)..(849): n is a, c, g, or t
  misc_feature (853)..(853): n is a, c, g, or t
  misc_feature (858)..(859): n is a, c, g, or t
  misc_feature (864)..(864): n is a, c, g, or t
  misc_feature (871)..(871): n is a, c, g, or t
  misc_feature (873)..(873): n is a, c, g, or t
  misc_feature (900)..(900): n is a, c, g, or t
  misc_feature (903)..(904): n is a, c, g, or t
  misc_feature (925)..(925): n is a, c, g, or t
  misc_feature (968)..(968): n is a, c, g, or t
  misc_feature (983)..(983): n is a, c, g, or t
atctttctgaatattttattaggggcaaaacaagatatttgcatggggatgcttcttaagtcatctcaagtagttccccttcagttcttaacatgcactctcaaaatcaacacacctaccccaacccaatactcatcgcttcacagtcatccagtaaagtannnnnnnnnnnnnnnnnnnnnnnnnnnnnnnnnnnnngggaaacagggtaagagagagtgacattttaacacattactaaaatgtttaagcttttatttacacatccccttctctcagtttcccaggttatatgaacattacagcaatagaaaggggttatcatcacagcatccccttgcaaattccagtttacaggtaacttggtcaggggaaaaatatgggtcaacgaagtaagatctcagctctcccataagctattgctctcttcttctctttcccccttctcttaatgttagctgcctgttacagagagggatcatcaagactgtgtggacatgctagctgaattgacagggtgggttccagtgtcctgtgaagaaccagcaaggatgctttttataattccaaccattggcttcacatcactgaggtaacaagacttaatgttaagggtaaagacaccacgccaccctagtcagtgacatgtactccactttccaggaagacctgggccanaatgaccaagctttgcaaaagaaacctgggaagagcgttggaaaaagcagactctgagttggcttgagtctcctcgtgcatnagaagcaatcactcatccatgcagatggcaacaggcaggacactcnagaagcatangatcaaggtactgctcttatctgcacctttcantcangctcnnctcangtgctcnanaagacagagctttggggtatgcttcantanngaccacagtactgcagtttanacgcattgcattcttagggtcagtttatatactttatctacanaaagatcacagttanggcatttacatgtcactatgtagtaacaaacctgtcccagtcacaagcatccagggtgacgtgatgtgacttcaaccacaca

SEQ ID NO: 162432 - DNA, 444 bp, Homo Sapiens
ctacttttccttttagaaaaggttgttacaggagatttactggcgactgttcttttcccatcaaaaatcagtgaatgtttgctgagtataaatgctgcttccttaaaccacttgtcgctttaggatcaactttacctgtaccttttctcctttcctcccttgccacctcaggtgcaaatctgaactcagtgtatgttttgccatttggtgtattccctcctccccccctaaaaaggagtgaattatttgaagtgggaggagactttttgtgcagaaatatatctcagaatgagggtttttgtggacgaagaggtgaaggagttcagtctggggtgttgacggagtgaccgaggtgagggtagctttgaaaagcagtcagagttgctatatagatatatgtggctcctttaaaatgctttgtgtatgtgtggtgtttaaaggagt

SEQ ID NO: 162433 - DNA, 1015 bp, Homo Sapiens
  misc_feature (58)..(58): n is a, c, g, or t
  misc_feature (74)..(75): n is a, c, g, or t
  misc_feature (78)..(78): n is a, c, g, or t
  misc_feature (87)..(87): n is a, c, g, or t
  misc_feature (126)..(126): n is a, c, g, or t
  misc_feature (139)..(139): n is a, c, g, or t
  misc_feature (151)..(152): n is a, c, g, or t
  misc_feature (170)..(170): n is a, c, g, or t
  misc_feature (173)..(173): n is a, c, g, or t
  misc_feature (181)..(182): n is a, c, g, or t
  misc_feature (187)..(187): n is a, c, g, or t
  misc_feature (197)..(197): n is a, c, g, or t
  misc_feature (200)..(200): n is a, c, g, or t
  misc_feature (207)..(207): n is a, c, g, or t
  misc_feature (259)..(259): n is a, c, g, or t
  misc_feature (282)..(282): n is a, c, g, or t
gcacttgtatagattggagtgtctgtattgaggtactcacagttgagcccacagcacngagtcaggaccatagnntcntcagagccntagatgatgagtggacgcgcattgagagagcctcgcacncactgttactgcnccgctcaactcnntggggcagtgcccgtaanccntagttgcnntgagnccctatgtcnccntatgttncttgtactgggagcttgagctcttgcctgaaacgctgcagctgcacccaccntgcttgatcccacctgggagccnaggacactgaggagctctgaacccagcccacagggaagcagaggaaggatccacctgtttcatgaaccctccctcactgctctctgcacatcacggccacacagcacctgcagggaggctgtggggaggtgtggagcaggtgcaacaggcagctactctcctgggggccacacggcggagagaggattcgatgcagcatgacgatcccttcctcccaggcatgacctcttctcagaacacgggaactgacaacactgcgagtggcaactcagcagatctggggctgcctagtgagccgttaaacgcctgggttccgcccagggctgccttccaccgggacgccgggcctgctgtggctggaccctacaggagacaagggaaggagaattaacatcaaagctggttgaaaatgaagcagtgggctcatgcccatctgcacaaggccccccaggcagagctggcagagctgggatccagctccaggtccgtgcacctccatgacatggatgcagtttagacaaggatgcctccctccagtggagaacacaaatgcctcacacatcagccagcctgcacatgcaggctaacaagggcactgactctggaaacacaggctctcctgcgacagtccacacggggcagctgagtggggccacccagcctgactgtccttgggaggatttcctaagtctttttcttcttaaagtaaatatatatgctgtccatcctacat

SEQ ID NO: 162434 - DNA, 1041 bp, Homo Sapiens
cctggaggaggaaggccattttcgggaaggttgcccccccctcttccccaaggagcccaaccccacttcactgttcgggggcagcccagctagattgtctccctgggcctttaggggttccattctcattttcttgcgggggccccccaggcactcccaaatagtcttccccaaccagaggccccctgcctggtgccatctcatctgtgggcaggggtctctcctgtgcaccttcttcagctgcagtcccatgacgcccccggtgcccatcgggaaagaggaaagccctcagtgcccccagaggcatagacccgggaggcctgggtcaactgctcccaccagctccctgcatcttcctggagactggaaaaccacagctccaactgcttggtgttgaggaggcccaggataaaggcatgggaagcggctacggctgctgctcagcggggctagacggctgacctggctatacagggttccaagggagcgggtgctggagcctggcttcaccgacgcctccaccacgctccaggggctgctcctgcgctgcccggtgatgaggtccttccggaaaggcttcagcccgtccgccaccagggcgtggagggccgggcagagggtggtcagcaccaggtgccccacatccgggctcagccggctatcacccaactgggccttctgcaccaagttccgggcggccccgaaatgcgagatgattttatcaacggagacgctgacggctatcagaagaccaagtgttattccgaggactccgggctcccgcacaagttgtctccggcgggtctgcagtgctgtgtccccgaagggtcttggggagaggaggcgcaggactgcctgaagcacggggtagctcgacccgagccccggagtgaaatctcgcacacttcccagcactcgctgtcccccagccccatcccggttccctgtgccctccctacagggcacagcccccacctccaggatcccggaactccgggagcgggatggccgcgctcacctcccgcctgcctgctagggcct

SEQ ID NO: 162435 - DNA, 427 bp, Homo Sapiens
gttaacatttgatttatttaaagtccttaactgcaaatgatcaagaacattttccacggcttaaaatctggtattatttttgttatttaaatcaaaatatttttaattacaatcacattgataaaaattaacaatttaatttgtaattttaaccatcatttaaagcaatttcagctgtaaagaaaaagaataaaccatgcaataaattaacattgagaaagcaaagagaaataataatgaaacccgtctggctatactaacaccatgtccaactgtggaaagtgcataacactggatgaaacaagcacacgatggcaatgattaaaatggccactatcaataggatttttgaatcttggaccacgttttgaaatccagctccctataacttatctctcctccaacattgtaatattcccttttactg

SEQ ID NO: 162436 - DNA, 437 bp, Homo Sapiens
  misc_feature (151)..(175): n is a, c, g, or t
aagtcgatctctagcacgatccccagagacgaagtaccagtagacacgcacaagcacacacacaaattcaaaaacttctacatagaaaaataaaggataaacattatccatctattttgtactgtgtaatgcaacttttatatacaaaaannnnnnnnnnnnnnnnnnnnnnnnngttaacgggtttcagtcactgcaaattttcttccctcctctgggatctaaggatccagggaggaggctgccacagtgaagcataaaagctacattctgcccagggaggaagagaaaaagcaatttctcgctccccttcccaagtccttcctgtccaccaccacctcggatgtccccgcacacagccttccggtgagcggccgtgccgtcccctcctctctctaaggcattggggagcagagggcccataggcagcaccctgc

SEQ ID NO: 162437 - DNA, 527 bp, Homo Sapiens
tttttagccaaacagattggtcattattgtacacatagctggaagggaggggtggtcccggggtaaggacagggctgcccaatattggggggaggaagggactcttcttccaaatgggcttgtccgggaaccggggtcccggggagctgggcgcctggtccacatggaccccctccacctccccacatacgacttgctccatctgaacatcctcctcgtcctcctggggcagctgcaggtacgggttgttccctgtgggctggaacttgtagcccgtgagcacgaagaaggccagggtggagccctccaccaagagctggtacagccactgccactgaaagggcacagccacctgcagcaggatggcgatgatgcgggtgaagtagacgtagcagatgaccatgacatagtaatgccggaacagcttcagcttggccaggttcactgccaccttcccgtctgtgccagacgcatcctggagattgccggatggaccagacctacgggaacaggattgcaccacaaca

SEQ ID NO: 162438 - DNA, 1123 bp, Homo Sapiens
  misc_feature (955)..(1002): n is a, c, g, or t
gaaagtcacgaggaaattagaagggataagaggaaacgtgtggacacagattgtaacgtcggcccatcccgccgtagggttgcggattgcactgggaaaacgcggtcagaggctccgtaagtaacgtggagctcgaatgttaaaacagaagtcgctgcgccgtaggatatggtggtgcgatgtggagtcgggcgagaggagcggccgagtagacggcggatctgattgggggcacgatagaaaagaagccagcgtggtcgggacagtgtggagggctgcgtagcgagacaataggacgtagacggagtgccggggaggagagcaggactgaaagatccaacacggaaggatcgcagaaatgtaatagattgtcgtctacgggggcgtgcattgagcagaaggggcgcaggagaagcacagtaccctttcggggctggcgaccttccagggccacggagctggccccagaaggttattgggacaagcaagtctttccttacccaccttggaacaggtccgtggagtttaaacccccggcggtgaccaccaccggccacctgagtgtccggaagcgggccgaggcgctcatcaggtccagcctgggatcctccaccagctccaccctgagcttcctcttcggcaagaggagcttttccagcgcgctcgtcatttccggactctttgctgcggaggggggcaataccagtgacacccagtcatccagcagggtcaacatcgtgatgggcccctcagccagggctgccagccaggccactcggcacctctccgagccatgtgagccccctgatgccaccgagcaggggcagcttcatgaccgatgtctggctgaggctgtggcggacactctcggggttgtctgcaggagagcaagccaggaggacatgggcctggacgacacggcctcgcagcaaagtgtgtcagacgagcagtgacnnnnnnnnnnnnnnnnnnnnnnnnnnnnnnnnnnnnnnnnnnnnnnnncattgctctccctcgtgctccccaaatcaccacaaccaaccaataccgcaatccatgagggactcctcctgtggaaaaggagagctgttccagaacacagaactgatctcaggtttttgaa

SEQ ID NO: 162439 - DNA, 653 bp, Homo Sapiens
  misc_feature (15)..(15): n is a, c, g, or t
  misc_feature (144)..(144): n is a, c, g, or t
  misc_feature (159)..(173): n is a, c, g, or t
  misc_feature (251)..(251): n is a, c, g, or t
  misc_feature (398)..(398): n is a, c, g, or t
  misc_feature (486)..(533): n is a, c, g, or t
aattaaaacggcccnccataaaggattggcctccggggcaaggaatgcgggccgaggcctgaaccgatatatcccagcaggcctgaaaaaggagtccccggaaatcaaggtctgcagaactgtgggcatctgcccctacacggnggcagacgaagaatnnnnnnnnnnnnnnnatcccagcagactctttttcccatgtttggcctaggaaaggaaaaggacaccctggtcatgtggagttagagcttcanctgcttctcagccaatcgatttgactttaaagctgctgagatggcccactgcttttagcacctcttcgagccatgtgagccccctgatgccaccgagcaggggcagcttcatgaccgatgtctggctgaggctgtggcggacactcntcggggttgtctgcaggagagcaagccaggaggacatgggcctggacgacacggcctcgcagcaaagtgtgtcagacgagcagtgacnnnnnnnnnnnnnnnnnnnnnnnnnnnnnnnnnnnnnnnnnnnnnnnncattgctctccctcgtgctccccaaatcaccacaaccaaccaataccgcaatccatgagggactcctcctgtggaaaaggagagctgttccagaacacagaactgatctcaggtttttga

SEQ ID NO: 162440 - DNA, 1231 bp, Homo Sapiens
  misc_feature (44)..(44): n is a, c, g, or t
  misc_feature (508)..(554): n is a, c, g, or t
  misc_feature (684)..(696): n is a, c, g, or t
  misc_feature (1083)..(1092): n is a, c, g, or t
gtcccctttccagtcctccaccccacccctggagcccagcctgngagcgcaaaacccaagaagcggccagaacgcacctccggctccggcggacgcgcgaccgttgtgcaccaccagggaccgccgcgcctactctgcacgggagcagggacagcgctagatttcgtgtacaaaacctgtgtacccctctatatatatgttacatagaatgtatatatgttgggaacatgctcgcttctcccgtgtgtcgccgccgtgcgtcgtgcgcccgcaacagagccccaaccgggcctttgccgggtaaggggctaccgcgacgccacttgtccacgcagccaccaccggcccgggccagtccctgccagtccgtccgcctgtccgtccgtgtcctcagctctgtccacgcttcgataggcctgacgcagcccccagcccagggccgccctagcaacttcctgtacatatgactgtaaaatggtaaacgtgtgtattatatctggcctcgttnnnnnnnnnnnnnnnnnnnnnnnnnnnnnnnnnnnnnnnnnnnnnnnaagactgtaaatgttaagacgactagtgttcttattagtatattgcttcacactgaagattgtgtgtatcgagctgtttctaaaagatgtttattttccttaagagtaaaaaacagtcattgcattcagnnnnnnnnnnnnngtcaataaagatacaacgattgttttggaaaatctgcagcccgtggattccgaccagattcagctgggagccgggccaggctttaggttggggaatgggaatgaagggaggggctgggaagcccccgggcccccagcaaggaggccaaggggttgcaggacaggcagaggaagacgagcgtgcacagggccaggcgggagcggtccaacatgccccggctgtgcaaaaacggccgctgctctggctttgccttgctgtcctcaaagactgggctgtcaggccactgggggcagcagccactgggcccagccagggccatctctgctctcggtgcccagcacgttgcgcccagggctatggtaaacgctggtggtatctgaggggctnnnnnnnnnncatgaatggagtcagggagtcggcctttcacaaaacaggaaacctcccccgcccctgtgccccctctccagtgtggcggcaggtcgggagggaggaggcttctttgctgtgagatgaccaggggccgggatgggggaag

SEQ ID NO: 162441 - DNA, 1117 bp, Homo Sapiens
  misc_feature (461)..(507): n is a, c, g, or t
  misc_feature (638)..(656): n is a, c, g, or t
  misc_feature (772)..(782): n is a, c, g, or t
gcgcaaaacccaagaagcggccagaacgcacctccggctccggcggacgcgcgaccgttgtgcaccaccagggaccgccgcgcctactctgcacgggagcagggacagcgctagatttcgtgtacaaaacctgtgtacccctctatatatatgttacatagaatgtatatatgttgggaacatgctcgcttctcccgtgtgtcgccgccgtgcgtcgtgcgcccgcaacagagccccaaccgggcctttgccgggtaaggggctaccgcgacgccacttgtccacgcagccaccaccggcccgggccagtccctgccagtccgtccgcctgtccgtccgtgtcctcagctctgtccacgcttcgataggcctgacgcagcccccagcccagggccgccctagcaacttcctgtacatatgactgtaaaatggtaaacgtgtgtattatatctggcctcgtnnnnnnnnnnnnnnnnnnnnnnnnnnnnnnnnnnnnnnnnnnnnnnngaagactgtaaatgttaagacgactagtgttcttattagtatattgcttcacactgaagattgtgtgtatcgagctgtttctaaaagatgtttattttccttaagagtaaaaaacagtcattgcattcagnnnnnnnnnnnnnnnnnnngtcaataaagatacaacgattgttttggaaaatctgcagcccgtggattccgaccagattcagctgggagccgggccaggctttaggttggggaatgggaatgaagggaggggctnnnnnnnnnnncatgaatggagtcagggagtcggcctttcacagaacaggaaacctcccccgcccctgtgccccctctccagtgtggcggcaggtcgggagggaggaggcttctttgctgtgagatgaccaggggccgggatgggggaggtgagacgtgccagacttcttgcagggagacccaagctgtagctcctgtcacacaacaggtcctggaagtcagtccatcctcccgtgccacccagggacctgatggggacagagctgggaggtgagaagggacaactgaccccatggaggccctaagggttgacacagcccaaccatgtgccctgggagcaggggga

SEQ ID NO: 162442 - DNA, 234 bp, Homo Sapiens
gcgatgtggcagagaagttgcttgtggggagaccttgcttttaacaggcttctggaaaagctagggaaaagtggttgcccgctttccccctttccctccccttcaagcaccgcttgagatttgggctttattattaagagctgctataaaaacagcttgcttaaatgttaagagaagcccaggggtacttcaagcattccttcggatgcttcactccagaaagagggagttaag

SEQ ID NO: 162443 - DNA, 988 bp, Homo Sapiens
ggccggattggtttccccaggtttcccccaaagggtatcccattggggggattactgtgggccccccggaacctggggcttttccattattttaacccagggccaaggaaagcctgtgcctgttccaggtattgatcccgttttcctcggtccaccatccgacccacagaccctcaggctgatagttgttccactaactcatagagctctggcaatgtcttagaaactggaaattgcccgcttatggaatgaactggattcatcctcaaggaagagcggatgaaaccattctgaaagggaatagtacagtccaagacgcaggtcagttctgttcctaatggctacctcaagttccttgacaatgtccctcttgggcccctcatctatggcattccagttccacgaatattctgacccccacaaggtaaagccttcatgatgtttggaagttaagacaatgtatttggcaccagaggcctgaaaaatatctgcccactggttggcattaaaaaattttgctgtaaatagtggtcccaaatcttcatatttgaaactaggagggtaattatctttcataaattccacatacttcggtatcttttccttttgccaataccaccagaaccactcgctaccgaagctgggcacggaaaacactccccagtggatgaagatgccgaacttggcctggtcaaaccacgcgggcagctggcgggcgtccagggactcccaggtggggtcgaagcgcgtggcgctgtgggcagggcacggcggcggcggcagcagcagcaacagcaacagcagcaacgggaacgcgagcctggggagctcctggggccgcatgtcccggcgcaggccggctgtcctctctgcaggctcccgcggcctcgggagcgctgttctcgaacgcgtgggtcgacgatatcccgggattccggaccggtaccgcctgcttttttgtacaactgttctatattcacctaatgcc

SEQ ID NO: 162444 - DNA, 499 bp, Homo Sapiens
tcggcaactgcttcggatgtcggcaactgcttcggatgtcggcaactgcttcggatgtcggcaactgcttcggatgcggcaactgcttcggatgcggcaactgcttcggatgcggcaactgcttcggatgcggcaactgcttcggatgcggcaactgcttcggatgcgcttgatgtcaggctcaatgttgatggttgggaaggtgcggctgtagcgtcggaagggctctccctccggccctatgaggaacttctcaaagttccaggccacatctgagcggcgcgcagggctccaaatgatgagcttgggatcggtcatgagggaaaatgggtcatcataagggtaggggagcttgtccttcaggtaggcgaagacaggatgctcgttctgcccattcacctcacatttttggacaagggtgaaggtgggctggtatccacccccaggacggacatacttgagactgttcaggatctcctaattctgaccggtctcctga

SEQ ID NO: 162445 - DNA, 210 bp, Homo Sapiens
ataaacttagttttagactatgttgtaaaaatgggaaggttgtaaactatgttgtaaaaataggaaatgtggcttaaaatatatacattatattgtttcaggattttgtcagtgtttaaagaaccaatgttcatctttgtatttatatacatgatttaaattttgtctaaaattttaaataaaactgcagtgatttatccttaaaaaaaa

SEQ ID NO: 162446 - DNA, 549 bp, Homo Sapiens
tgagtgaaatcaagtgcagttttatttaagaactggaaagaataatcagtatctgtgaaagaaaatccaatttagaatatttaaataaacatttatgtaaaaagaagagtagaataattactccgttcagttcctctccttgcaatgggataggctgcctctgctgcagatggctgggtcttccaaacccatgacaagtgccacggcctctgcagcagtggcccagagagtaggcacttcccagcatgacagagaggccgaggccttctaaccttgccaaaccactacaaaagcaaactagggtgggcaagcccaactacctaaggcaggaagaaagtgcagtgaagggacagtggtgtgctgtgcgtatcgtgggggtactcctaagcagctagctgttggcgagatcttacaaagcctgatcggctaacgcagcttcctggtttaggaacattttccccggtcgctccaacatcagaatggatgaataaagcctactttttaggctcaaggagcagctcgtgaaggggtggcaggtgcgctgctgcc

SEQ ID NO: 162447 - DNA, 179 bp, Homo Sapiens
tcaggttttacattttatttccaggaaatgagatagtattttcacaaagaagaggtaagccatcctctcaaaatagacactgccttcagaggcagccatggggtacacccaacctatccaaaacaactgtcaacggaggtgtttccgaggtatcaaaacagtaacaacaacaacaaatt

SEQ ID NO: 162448 - DNA, 928 bp, Homo Sapiens
  misc_feature (775)..(789): n is a, c, g, or t
  misc_feature (812)..(842): n is a, c, g, or t
gcataaaggaatataaaactatttattaaccactgttcaccagtatttacaataaagtaaacaatatacagttggataacattttgattactacaaagttgttcttcctggcttttgctgaaccagtaaagcaaaagccaggaagaacaattttgattactacaaagttgttcttcctggcttttgctgaaccagtaaagcaaactcaagattgagcctccatgtaatgaattggggtaaagaaaaaacatgcaggtcaataggttaggttacaaaaggttgttcacacatttatgacagcaggtcctaaactgccaacacctctaaccatctgattaggtttctatgagccaagtcttacatattccattcatcatgaccttttagtcaatgtagcaacagggattccaacattttgctaaggaatggcccgctagggaaacttttaaatgttcatttaacttagttttgtttagctaggttaaaacaccctagccatttgtgtagtttcctcatctggatgaggaaacctgctgtgatggcagtgataaaatttttccttttaggaattttgcaaataaaccactgcaattatagacactttaaaattatccaatttaaattgtcctatctagaattacttatttcacttgaaatgtatggtttcaggaaaattttcaatttaacttgaagggattatctcttattttgcttggaataatggcatctcagaaacatgggtttacctgtgattttttgtttgggtgaatgcttnnnnnnnnnnnnnnntttacatatgcattttatggatnnnnnnnnnnnnnnnnnnnnnnnnnnnnnnnaaaaacacgtaataaatctagaatggtccttaggctcatgagaacacaagttttgactgagtaatgactatggacatttccccccc

SEQ ID NO: 162449 - DNA, 819 bp, Homo Sapiens
gcacccgccgcggtctagcggaccgcatgagatccgccaccctctgacccactgcgtccccagtccgggacacgggtctgtgggtcaccaccaggcctgtcgccaaacacgggtcccaaccgtgctcaaggtccacacacaccaccctcaccacgggacaagccctccggcgacctgcgaggcctcgcctggggtggaaggccagacaacaggacaggcgctgggacctccaccacgccgacgttgctgggacgcagtctcgccgtccaggttccaggcacacacgaaggacttaagcgtgctccaagtccccatggtccagccggccgtaggcacaggcccaccacagagccagtggagttccaggagatgctggtcacatgcagacccttgcgcattgggctggcgggtagcccagggtatacaagacaagacaccatctgctgctgctcggtccaagttcacctcgaagccatcaaaacgcgtggctcatgccaattcttgttcagctctcggatgaccatggcctccactctccgaagaaaggctgcgagcctgggtatgtcgtactgggacgggggctgcacggctgacaggcaacagggggcactccgtctgcacctgggcagtccacatgattcctggcctgggcaggatgcactggcagtggcaatgctggccgtctggcaacttttcagtctccccgcaggatgccactggccggccactcacacatgcgagggcacaggacgccacacccagggtctcgtcctgcagcaggcctgaccgcacaccggccccggccgctcctcgtgccga

SEQ ID NO: 162450 - DNA, 781 bp, Homo Sapiens
tagtttggccactccctagattcttggtttaccagcttataaagagtacacctaagaggcagtataatatacgcactaaaaaccatttccccctttatcatctttggctagaagcctcatgaaaggaaactgaggacggcagaggcaggcaggctccgtgcgcttctgcctcacacgtcactgaccggaaggctcgcatcgtccaagtctactaggtcacaatctttttcctgagggccatttttactttgaggtcttaacagagcttgttcagtcactttggaagctggttctcttggagagacagtctggaccttgaagttccctggcttgaccttggcaagagactcgtaaaatcctcgcttctccatggtaaaggttgagaccaaagagttgctgcgagaggctgtggaatgtgaggtggcggcggctgcgttggtaggacggaaagcgtgtttggattctgaaggaccgggggaatgctctttctatgatcagttgtaagtagtaagtctgggccctccactaagaaggcacgtttgcgtgagagcccacatacgtgctgcattcaccagctcttgatgtatacctctgtatacaagggttcgacagccttctggcctgccgcatttgactgagaagacgcagatctgccgggaccccgctgtgctacaatggcgccagagactgctttaattccactgtgcatcttttcagggctatcagctgcacatagaagtccgagacgtgtacaatttcaaagaggttgccctatattatg

SEQ ID NO: 162451 - DNA, 702 bp, Homo Sapiens
  misc_feature (390)..(446): n is a, c, g, or t
  misc_feature (558)..(614): n is a, c, g, or t
attccaataaaactttattttttcaaacacagccacagaggcagaacctcatgtttaacacacacagacttatggatttttcttttaatataaaacaaagtttacgaaaatttttttccactttttgtatttgtaatcccattagcacagggactttggcagcaggtgggagtgaagggcagctgagctgccactgggcagtcactgggcacaggaggagagcaccagcctggggagtggcttcactcacacacacagggatactcacctactggccaacctccctccactttagctgttttgactatttgaattttcacatattgggcttacccagagtggagcacacctccagggcatgtggctgacactgggtcaatgtctgcatcnnnnnnnnnnnnnnnnnnnnnnnnnnnnnnnnnnnnnnnnnnnnnnnnnnnnnnnnnaagccactccccaggctggtgctctcctcctgtgcccagtgactgcccagtggcagctcagctgcccttcactcccacctgctgccaaagtccctgtgctaatgggattacnnnnnnnnnnnnnnnnnnnnnnnnnnnnnnnnnnnnnnnnnnnnnnnnnnnnnnnnnccataagtctgtgtgtgttaaacatgaggttctgcctctgtggctgtgtttgaaaaaataaagttttattagaataatccattttccc

SEQ ID NO: 162452 - DNA, 997 bp, Homo Sapiens
tgcaggaatactgttttgtaccttacaattggacttatcccaggaagaacggcatagggcatgtgtttttcgacagcttgccgtcaagtctgcaatacgattgcccccatccaacccgatagagccttgtccattgaggaatgggttctcgatgattgcctgtacgaggtgagatactcagcagggtcacccagtggcgagggaaggcaccttggcggccaatgtatttcacactgtctctgggaggctgtcacatgtggggtcccattcatgacctgggccaatgtgcatcacccggatacctatgggagccagatcctcgagcctatggcacgtgtcatgcccactattcccgccttggaagcagagtatgcagcttgtccaacctgacccctcgaaggcagccacactggcagtgttgatgatgaccccacgttggcctccctggtctggttcattctggcccatctcaccagccaccagtcggatcacaattgtaaggtgccacatgtagattcacatcaagaactcgctggtatagtcttccaaggtatgggtctggcccttctttaagttgtacgtcttgctagccacctgcgatgcctgcacagttgacagctacatgccacacggccaaactttgctttttgctagagccagatctgtgttgcacatccttctgcagaggtcacagtcggctggggcgaataacgcagttgttgtcactaacgtcttggcttgggcactccccacaccgagttgggcaggtccaagaagcacagcagaggctccctgccaccacaagtcagctcacgccagtggcacaggcccaggccacgaggctcctccaggttattaccgccaccaggccacttcacgctccgacacgctgctgccatcttgtcgccggccgatcgcgtgggtcgacgatatcccgggaaatccggaccggtaccacactgcttttgtatacaactggtctatattacactgcctg

SEQ ID NO: 162453 - DNA, 874 bp, Homo Sapiens
atcgggagagagtatgaagtcgacggcgcgccgaattcggcacgaggctgccaatcaagtcggcccgctaccgtggccagtacaacacctatcccatcaagctcttctatacgtccaacatccccatcatcctgcagtctgccctggtgtccaacctttatgtcatctcccaaatgctctcagctcgcttcagtggcaacttgctggtcagcctgctgggcacctggtcggacacgtcttctgggggcccagcacgtgcttatccagttggtggcctttgctattacctgtcccctccagaatcttttggctccgtgttagaagacccggtccatgcagttgtatacatagtgttcatgctgggctcctgtgcattcttctccaaaacgtggattgaggtctcaggttcctctgccaaagatgttgcaaagcagctgaaggagcagcagatggtgatgagaggccaccgagagacctccatggtccatgaactcaaccggtacatccccacagccgcggcctttggtgggctgtgcatcggggccctctcggtcctggctgacttcctaggcgccattgggtctggaaccgggatcctgctcgcagtcacaatcatctaccagtactttgagatcttcgttaaggagcaaagcgaggttggcagcatgggggccctgctcttctgagcccgtctcccggacaggttgaggaagctgctccagaagcgcctcggaggggagctctcatcatgcgcgtgctgctgcgcatatgacttttataatgttttgaattcgtatcttcatcactgtgtagtgctgacatttccattaaatttgctttatctgcctgcaaagactgtgagtgatttatcgca

SEQ ID NO: 162454 - DNA, 959 bp, Homo Sapiens
  misc_feature (107)..(158): n is a, c, g, or t
gcagtcatctggtgtttctatttattgactctttaaacttcatcatccaaagagagttaatacatgactgtttggtagcaagagaaacataatctaagaccgcaatnnnnnnnnnnnnnnnnnnnnnnnnnnnnnnnnnnnnnnnnnnnnnnnnnnnntctgaaaccaaacctttggagttttagctgaagaagcgaggggtctgagggtcagagtggctctctgtggttcagggggtcaggtagaggctgctctcaagtgggagccttctctgttgaaaaggctacattcagcccctcagctttggggggtccttcctgaaggggcttcccttggcagaaggggtgtggagacggattcagtggtcagaggggctcctaggtctgccctccaaggtgaccatatgtgccagtgcatgagacacagggaagcagggccaaggactgggggcgactgtgaggagatcatgggcccatttctcctacctgagagaaagccctgtccaaggccccatcagtgttcccaaattagggaaccactaaaggcaccaccaacaaactgggaaatgacaaagcctgacaggtccccagatggcaatcactgccccctaatagtcagcatcttgatctagaggactgagggcagccccatcaggctggggccctggaaagtttatgtcaacgggcaatgtttagggccttggacatgcagtgtgcgtacgtgtgtgtctgtatgaatggaatggggctcaggggcgcatgggtccctccaggaaggcttggttagagtcccagggtggtccccagggcaggaataggtttcttttcctcatgtcatttcctcaaatcacccccaccccaggtgaccaggtcactgcataaataagtgcttgggaaggtgcacatctaaaaagaaacataaatactgtaacatggggattccccagcattccgtactcc

SEQ ID NO: 162455 - DNA, 516 bp, Homo Sapiens
  misc_feature (36)..(36): n is a, c, g, or t
  misc_feature (477)..(477): n is a, c, g, or t
  misc_feature (482)..(482): n is a, c, g, or t
cggaaaaaatactgctggacgcacagcatgagtctnggacggagtagctccaagagctctcactgtgacagcccacctcgctcgcagacaccacaagataccaacagagcttctgaaacagatacccatagcattggagagaaaaacagctcacagtctgaggaagatgatattgaaagaaggaaagaagttgaaagcatcttgaagaaaaactcagattggatatgggattggtcaagtcggccaccctcagcatgaggaacacgagcgtcatgaagaaagggggcatattctctgcagaatttctgaaagttttccttccatctcctgctgctctctcattttgcttggccatccggattgggggatcctatattgggaaggcgtctggacaaccttcccaccaagcacctttttggatggaagaacttgggagtcttgactttggttccgttagttggattacttcctggagcnttgcnacattagctcactggaagagctggttagatccct

SEQ ID NO: 162456 - DNA, 482 bp, Homo Sapiens
  misc_feature (144)..(152): n is a, c, g, or t
acagcttgatcctcttatgaaaaggaaagaatttaaagatgaacaattacatttttgtttaaacagcaattaatcctcattacagagaacaaaagatctgtggcacattgtctttggaaagatcttttgcagatttttcttctnnnnnnnnnctataattctctcacagatcacatattctttcaaacgactatacaaggcagctaaattttattcacaaagccccaagttgcagttccattgctgaagtaggtaaaatacatggagttccccttaatttgtgttgcacatcttcccattgagagcatcactgcttccctaccctatgtacaaaatcattgtgttgatgatagctggcacgttattccacagtaattaaagaaaaacttattaaacataggccagtgattttcatttatcaactggaaaatttactcctttttaaaacaattttaataataccaagatttgactttcctcca

SEQ ID NO: 162457 - DNA, 477 bp, Homo Sapiens
  misc_feature (260)..(260): n is a, c, g, or t
  misc_feature (359)..(359): n is a, c, g, or t
tactgtgttttttgctttatttattcagagagtgaaactgtgttacagtgagctaaatttttagctgtacttagaatgtgctccctcctacatttcactctggaaaagtgaagtatcttatcatttcttagaaacctggatgtgaaactagtcaatattaagatcttatacacatcctgagtgatgcccaatttaaggctttgaatagctattcatgtaagttgacttttctgtgcatttgtatcggggaggatccagtntcaggttgatgtcctgggaaccagtgaggctctcgcttaaatcctgggaaggcaagggtttgggctgcacgatattcctcaggtcatatctttcctggnttccagttgcccatcaggttacggtttgaaataggtattctcattaaagtggtgcatcgccatccatactggaaaaacttggacatattattccaaatctgtccacacttcaccatgg

SEQ ID NO: 162458 - DNA, 1024 bp, Homo Sapiens
  misc_feature (691)..(691): n is a, c, g, or t
  misc_feature (712)..(713): n is a, c, g, or t
  misc_feature (792)..(792): n is a, c, g, or t
  misc_feature (892)..(892): n is a, c, g, or t
aaaaagtttctctccagattataaaaggttagttaaaactgtttaataggaacaatcttgcacaagcagaaagagctttgatttggaggattatagcaacatacaactgagagagtccacagggacagtcagacgggatgtctgcacctcttctagagactctgtgttaaaaacacgaccgactgaacattctgccccctttcaaggcacatgccacttcttaaaacggtcagctttccacacaggctaccagatattttatttacatttaaaaataggttttcttcttcaacgtagtggaaaggcccggagcccagtcacagcggtgcctgcctagcacaagtgtaggacagctttattgatctctgggtttgtccagtcattccgaatgtcatccaggtggttatcgaaatccacgagcgtctcgtaggaccggctgtccaggagcgaggctgagatcctctgtgcctctggccagtcttcacagtagtcacatgatgagcgcagtgtcgctgaagccctcggcgattctggaggccaccttctctgcaacctggtttggactggcatcctttactcgctcattagctttgataatacccagcaatcacgtagctatgatctttgcaccatgaatcaatcagggtgagagccacctccagcatgggggcgagggtcacggtgccgtggnagagggggatgcagtcacgannagggtgtggtgggcgtcggggccgccaaggggaggtgctcctacgcggctctgctctcgggcacaagagccgttgacgngcagtggggtactggggcgtgcacacatctgcagaggctgggggcagttcacccgggcagtgaccgggagggcctggagccctggcgccggtgaggctgnaccctgctggcccccgggctcaccaaaggggacagcggcgcatgatggcggcgcggtgcgggaccttcagccgccgttggcctcgtctgaaagatccgctcggaccgaccaatcatccgtccgccgctctgg

SEQ ID NO: 162459 - DNA, 720 bp, Homo Sapiens
  misc_feature (23)..(23): n is a, c, g, or t
  misc_feature (69)..(69): n is a, c, g, or t
  misc_feature (87)..(87): n is a, c, g, or t
  misc_feature (498)..(552): n is a, c, g, or t
gttgactacttgttctgcttcgnacatcgagtcaacgtctgcgagcactgctgggtagccatcacggcnaagtgcatcgtccagtcntacctgcaatggctccaagatagctactacaaccccaattgccgcctgtgcaacatacccctggccagccgagagacgacccgccttgtctgctatgatctctttcactgggcctgcctcaatgaacgtgctgcccagctaccccgaaacaccggcacctgccggctatcagtgccccagctgcaatggccccatcttccccccaaccaacctggctgggccccgtggcctccgcactgagagagaagctggccacagtcaactgggcccgggcaggactgggcctccctctgatcgatgaggtggtgagcccagagcccgagcccctcaacacgtctgacttctctgactggtctagttttaatgccagcagtacccctggaccagaggaggtagacagcgcctctgctnnnnnnnnnnnnnnnnnnnnnnnnnnnnnnnnnnnnnnnnnnnnnnnnnnnnnnnagcagcacacagtgatccacatgggcaatcctgagcccttgactcacgcccctaggaaggtgtatgatacgcgggatgatgaccggacaccaggcctccatggagactgtgacgatgacaagtaccgacgtcggccggccttgggttggctggcccggctgctaagga

SEQ ID NO: 162460 - DNA, 769 bp, Homo Sapiens
  misc_feature (525)..(546): n is a, c, g, or t
  misc_feature (615)..(637): n is a, c, g, or t
cataagaacagaacaaacatgacctatgagaaaatgtccagagccctgcgccactactacaaactaaacattatcaggaaggagccaggacaaaggcttttgttcaggtttatgaaaaccccagatgaaatcatgagtggccgaacagaccgtctggagcacctagagtcccaggagctggatgaacaaatataccaagaagatgaatgctgaaggaaccaacagtccacctcagcgggccagcagcccagggaacccctgcccaccaggattgctggaagtgtgacggagcaggcgggctgaggagagtggaaaaggaagcgacccagaaatggcagggacacttctcttgcagaccaagagggaccctggagcaccttagacaaactacccagcacaggcggggctggaattctggcggagggcatgagcctgggactccatgtcacgtttccttctgatttggaatctctccatctgtaattcctcaccctcacccttccaccgttgttagtatcatggtgnnnnnnnnnnnnnnnnnnnnnnaagaacctgcagtttgactcttcatcgttcatctaggggaagacatctgatgttgttttcctatggaannnnnnnnnnnnnnnnnnnnnnntttttttgcaaatctcacaaagtgcggcaagcccagctggtcaggaaagagaatacttgcagaggggttcaggttcctctttttcctgccacgtggatcaggtctgttcctgttactgttgggtcttggctg

SEQ ID NO: 162461 - DNA, 644 bp, Homo Sapiens
  misc_feature (402)..(423): n is a, c, g, or t
  misc_feature (492)..(515): n is a, c, g, or t
gatgaaatcatgagtgcccgacaagaccgtctggagcacctacagtcccaggagttggatgaacaaatataccaagaagatgaatgctgaaggaaccaacagtccacttcagcgggccagcagcccagggaacccctgcccaccaggattgctggaagtgtgacggagcaggcgggctgaggagagtggaaaaggaagcgacccagaaatggcagggacacttctcttgcagaccaagagggaccctggagcaccttagacaaactacccagcacaggcggggctggaattctggcggagggcacgagcctgggactccatgtcacgtttccttctgatttggaatctctccatctgtaattcctcaccctcacccttccaccgttgttagtatcatggtgnnnnnnnnnnnnnnnnnnnnnnaagaacctgcagtttgactcttcatcgttcatctaggggaagacatctgatgttgttttcctatggaannnnnnnnnnnnnnnnnnnnnnnnttttgcaaatctcacaaagtgcggcaagcccagctggtcaggaaagagaatacttgcagaggggttcaggttcctctttttcctgccacgtggatcaggtctgttcctgttactgttgggtcttggctg

SEQ ID NO: 162462 - DNA, 1130 bp, Homo Sapiens
  misc_feature (52)..(61): n is a, c, g, or t
  misc_feature (261)..(261): n is a, c, g, or t
  misc_feature (266)..(313): n is a, c, g, or t
taaagccgggggacagcaaaggcggccgtggcggcggcctttccgctgagtnnnnnnnnnntttttttcccccccttttccatgtttttatattgatataacctagagaatgttccaggttaccctatagagggcagtgctcttgcttgtttacatgccaaagtgctctgtggaagaggtgacgaaagggtggcatccctgggtaagtaagtgcctatgaagaagtagcccaaccaatggcttttgcagcacacaatgtcnccagnnnnnnnnnnnnnnnnnnnnnnnnnnnnnnnnnnnnnnnnnnnnnnnntggtgatgggacacccagggctgggccactggtccgtgcctgacctccagtgggtctgccagccaagggtgaggaaggctgtggggaggggaggtggccaagtcaggcttccccctccacctcgtcctcgctggcacagccctcggacacagctctgcgccgggatgcccgcctctccaggtactctgccttaagctgctccagctcccgcagctcagcctccagccgctcccggtggaccatgcgcagctgccgcagctgtttcatgcggaaggggttcatgtcattgaaggcgatgttcatcagcgcttcatctgcagctgctgcagccagtacagcatcgcttgcttggtggcggccttcagggtaataacccggctgggagtcttgatttcgaagatcccctcctcagcgtccgccttacagtcaaacactgcactggagaggtcgatgctgtccaagggattggcatcctgagcggtccgcgagtaatacagctgacatttcctttcgtcgtagaagaaccagcgggatttccagccccggatgggccctttgccgccgaacttacttaaatacccacagagtttcttggggaccgcctccagggaccgggcgcagtcccccgattcttcctccggaggcggcacctgtggatccctggcagactcttcggacccaggggcagaggagctggactccggggcgttctccccagcgccctccatcgctgccagccggagactgcggagggacgaggggtccgcgggaccaccagcggacgcgtgggtcgacgatatcccgggaattccggacc

SEQ ID NO: 162463 - DNA, 847 bp, Homo Sapiens
gaagagtatgaagtcgacggcgcgccaattcggcacgaggcgacgaggagacatggcggcggcgccggtagcggctgggtctggagccggccgagggagacggtcggcagccacagtggcggcttggggcggatggggcggccggccgcggcctggtaacattctgctgcagctgcggcagggccagctgaccggccggggcctggtccgggcggtgcagttcactgagacttttttgacggagagggacaaacaatccaagtggagtggaattcctcagctgctcctcaagctgcacaccaccagccacctccacagtgactttgttgagtgtcaaaacatcctcaaggaaatttctcctcttctctccatggaggctatggcatttgttactgaagagaggaaacttacccaagaaaccacttatcccaatacttatatttttgacttttttggaggtgtttgatcttcttgtagaaattcttatgaggcctacgatctctatccggggacagaaactgaaaataagtgatgaaatgtccaaggactgcttgagtatcctgtataatacctgtgtctgtacagagggagttacaaagcgtttggcagaaaagaatgactttgtgatcttcctgtttacattgatgacaagtaagaagacattcttacaaacagcaaccctcattgaagatattttgggtgttaaaaaggaaatgatccgactagatgaagtccccaatctgagttccttagtatccaatttcgatcagcagcagctcgctaatttctgccgattctggctgtcaccaccatgatgagatgatacacatctcgcgaggaccgactg

SEQ ID NO: 162464 - DNA, 227 bp, Homo Sapiens
ctaaataactcattaaagtttattacattaaaaccatatatcacttttatattgtatttgccatttctgaacaatacaaagtagaggcaaatagtaacacttaataaaaatgttgcttccccattcctttccctaagacccagccctccctcaaatattccctcccacccctaacagaactctgtccttaataaaacacttaaatacatcataaatagtaaattatg

SEQ ID NO: 162465 - DNA, 524 bp, Homo Sapiens
agcatacaagaaaaaaagttttatctgaccaattacgttggaagggttttattacctttaagaagccattagctaggataaaacactgaaagcacttgtgtcaaaacaaataaataatgtaaataacgctctctcaattagcagagaaaacagtgaatccgttaaatcagagacacacatcacttcacaagcatggcccagccagcaccaccacccccaaaacgaacaaaacaagagacagcagttttcagttacaatcttgggaaagatcaggagctttggaaaacgcgtggtaaacatgtctgtttctccttctacctccactcaacctgagctgcacccggacactttaaaggaggcatgtgtccagaggctgcatccagggatgcctcgggaaacttacaatcatggctgaagacaaattgcatcatatagccggggcaggagcaaaagagagagggaggaggtgccacatatttttcaatgaccagatttcttaagaactcactcattaccagggggac

SEQ ID NO: 162466 - DNA, 613 bp, Homo Sapiens
aggtcagatgttttatttatagataattaaaatttaggcatatacatgacacaaacattatatatagtacactttccatgatagaagttatgatgctgttcacagaaaggcctcaattcagatgacataatgcatatgctacaaggggacacctgggagaggggacaccaaatggccttctggtttttcattttggtttaaatatcctctggatgcattcaagtaatactaatcatttcatgttcaaaagtcttttaataaacaaattcagagtaaaattaattgtatattggaaataactgtgtaacaaatcgtattataaatatttcaattaattttactctgaatttgtttattaaaagacttttgaacatgaaatgattagtattacttgaatgcatccagaggatatttaaaccaaaatgaaaaaccagaaggccatttggtgtcccctctcccaggtgtccccttgtagcatatgcattatgtcatctgaattgaggcctttctgtgaacagcatcataacttctatcatggaaagtgtactatatataatgtttgtgtcatgtatatgcctaaattttaattatctataaataaaacatctgacat

SEQ ID NO: 162467 - DNA, 1074 bp, Homo Sapiens
  misc_feature (53)..(53): n is a, c, g, or t
  misc_feature (112)..(112): n is a, c, g, or t
  misc_feature (208)..(208): n is a, c, g, or t
  misc_feature (279)..(333): n is a, c, g, or t
aaaaaaggccaacaccattttttctttcttttcaaaaaagctccccaggcctntggggaacagctgaaacaaaattcatattcctgactaggtctgttttctcttaggtatntggatggtccctctctgctgcgacttctgcacagatgaggcactgataatggcctgcaggtcactcacaatcctagctccacatcactccatggtntgataacctagaaccacattatgatttccatttataatgccctaagaacagctgaaaagatctgtattaannnnnnnnnnnnnnnnnnnnnnnnnnnnnnnnnnnnnnnnnnnnnnnnnnnnnnnattctgctggttctgagaaacataaatggtaccatagggaggtgtttcctcctaagtggcaggaggatgtttgctgggagttaagtgaaccaattcctcctctgcttacaccacgtgggggtaggtccagaactcaggccttgggaacatatgctgtgctctcttctacaggcgctgtgtggaagaaccaatagcagttgttaaatagctgtggaatttcttccacaatccacatagtgatgtgtctccaaggagctctgggtcatgaggccaatgtatgaaatcttcactgaagttcgcatgaagatcactatgttgtgcaccaggatctcaggtaccgtgcagaagaagtacacataggaaaacggtcctcccatctcggccttcccggtaaaattcaccactgtgttcatgtactgaatctggctggacaggctggtcactgccaccgtgtagaagttggagttcctgattttcagggtggccatgatggtgagaattacaagggagtcttgcttattaaatgtgactttcaccactttgatgccgtcatcatccacaaggactgaatgcggaaacaggaagaaaaccaccaaaccagatgccaggagacaaagcaggatggacaggaggacatattgcttagttcgctgagggcgcaatctctgatcactgtgtgggatcaaagccaccaactcatttacttgctctgttggaatgtagcctgtccccatgacgtga

SEQ ID NO: 162468 - DNA, 580 bp, Homo Sapiens
  misc_feature (368)..(425): n is a, c, g, or t
  misc_feature (456)..(476): n is a, c, g, or t
gtactcggtgctggtcttctcttctctctccggtctgtgcgctcagtggtgcttcgagctggagggcagcaggtgaccctcaccactcatgccccctttggcttgggggcccatttcacagttcctttgaagcaggtatcttgcatggcccaccggggtgaagtccctgccatgctacctctgaaagtcaaaggccgacgcttctatttcctcttggacaaaactggacacttccctaacacaaaactctttgacaatactgtgggtgcctaccggagcttgtgaagaaatgacctcaagtcactcacctctccaagaggaggataaaaactgaaccttggggagccaggtgtgttggttcacacctnnnnnnnnnnnnnnnnnnnnnnnnnnnnnnnnnnnnnnnnnnnnnnnnnnnnnnnnnngcaacatagcgagaccttgtctctatttacnnnnnnnnnnnnnnnnnnnnncgccaatcttagaatggagtaacaaccagggtcacacaaggaggtcaagattcattaacaacaaataaaggagcagtcatccctagggcagctgcctaacagta

SEQ ID NO: 162469 - DNA, 542 bp, Homo Sapiens
  misc_feature (192)..(206): n is a, c, g, or t
tagttaaatacgcacaattttattgattgaagattaggacaaaaacattaaaccaaatacaggacaaagcaccagaggccatagatccccaccatgcatgtcaccaacctctcctcctccaaggtacttaaaaaataggggagaggggaaaaaaaaggtccttcttgacacagcaccatcttcagaatgttnnnnnnnnnnnnnnnccttctctcctttctatcttccattagcaaaatagaatcaagggcaaatccatggccgccttgtctcctggttacgaagggtgaagccgccctcctgggaacgtgaggacagggctcctgctgcgcaggcataaagcatccaagagtctgcacatacatgccacacactattatgaagcacagattcaagtaacatttacatactagagtccacgtgtcacctacccaaaaacaggaccatttcacaaaacatatacaggcagtcaaatccgaacaagtgaggtactgggaacacaaatatttatgccaaaagagttctgtatcatacagcaattg

SEQ ID NO: 162470 - DNA, 396 bp, Homo Sapiens
  misc_feature (242)..(256): n is a, c, g, or t
ttttagttcacattttttaataacatggcacagtttacattacacaagaaggctccgccgatgagaacatgctgaagattcagttgcttcacttttcttttcacataggatctagaaaggactttattacatacaggataaacagcaaaaaggtccgtatagaacaatctctttacaatactgaaagctaccactacagttccagtgtacatattccttgcatttttttagttgttgtcttnnnnnnnnnnnnnnncaccgcacaacatctggagttcacaaaatctgaagctcacaactaaaccttcagtttactactaaaatagatctctctgcttattagttccatttggtcttctagtatattaaagtgctatctgatgttggagcggccgc

SEQ ID NO: 162471 - DNA, 426 bp, Homo Sapiens
  misc_feature (75)..(123): n is a, c, g, or t
  misc_feature (349)..(357): n is a, c, g, or t
gcatagaattaaatttttaatctttaattttacatttcctaaatatattttaagacgaaacatttgttctatagnnnnnnnnnnnnnnnnnnnnnnnnnnnnnnnnnnnnnnnnnnnnnnnnnctctcgtgagtatattgatccagaaagaaaacttgtattatgtgtgttttaaaatgagaaatctaaaaaacgaaaagtctccaaagtctctggaatttgaaacactttgcataacgtataaaagcctgtttaagagacagccaactatggcctgtggatcaaatccagcctgctgcctgctttttatggcctgtgagctaggaattgtgtttataattttaaatgnnnnnnnnnaaagacttttatgatacttgaaaattaacatgaatatttagtgttcataaataaagtttgttgaaacac

SEQ ID NO: 162472 - DNA, 424 bp, Homo Sapiens
  misc_feature (56)..(66): n is a, c, g, or t
aacagtgaaccatatttcaatttattgacattgtcaatttatgaacaagacaggannnnnnnnnnncccatggaatgagatccttttcaatctgccataacatgtgcccacacatcttcaccttggaaatgtagcatttcaagctttagtcagggtagattattccttctttactttcacaatttttacgttgctgccagaagtcttctcagcatttgctttgaattctgtcttcagtgcatctctcactgcttttgcacagatctgggagtatcggatgtagctgagtccagcctgtctccagtaggccaccatgctgtagcgaaagcggagctcgtcgggccgaatcgccaagacgccggcaatgtcggctcagccgggcggttcagccgcaggaagatcagaccacagaagcggaagaccc

SEQ ID NO: 162473 - DNA, 880 bp, Homo Sapiens
  misc_feature (193)..(232): n is a, c, g, or t
ggggcgcggagccctgctctcgcaactcaagatggcggacgagagtgagacagcagtgaagccgccggcacctccgctgccgcagatgatggaagggaacgggaacggccatgagcactgcagcgattgcgagaatgaggaggacaacagctacaaccggggtggtttgagtccagccaatgacactggagcnnnnnnnnnnnnnnnnnnnnnnnnnnnnnnnnnnnnnnnnggcagtgagacagattcagcccaggatcagcctgtgaagatgaactctttgccagcagagaggatccaggaaatacagaaggccattgagctgttctcagtgggtcagggacctgccaaaaccatggaggaggctagcaagcgaagctaccagttctgggatacgcagcccgtccccaagctgggcgaagtggtgaacacccatggccccgtggagcctgacaaggacaatatccgccaggagccctacaccctgccccagggcttcacctgggatgctttggacctgggcgatcgtggtgtgctaaaagaactgtacaccctcctgaatgagaactatgtggaagatgatgacaacatgttccgatttgattattccccggagtttcttttgtgggctctccggccacccggctggctcccccagtggcactgtggggttcgagtggtctcaagtcggaaattggttgggttcattagcgccatcccagcaaacatccatatctatgacacagagaagaagatggtagagatccacttcctgtgtgtccacaagaagctgcgttccaagagggttgctcccagttctgatccgagagatcaccaggcggggttcccctggaggggcatctttccaaagcaggtttat

SEQ ID NO: 162474 - DNA, 377 bp, Homo Sapiens
cgagctcagtacccgtaaggcccacaagaagtccaagactgaggcaggcagccttgtgatccccacagctcacaggtgagaggctgctcatacctctcctagcactggaagagccttgtccttgggaccggacactatggctttggccctgtggagggagaaacggtgccacaggagttgtcttaagaggacaaggcatgcacggtctgagatcagaggttgtgacgtggccacccatgagccagtccgtttgggacacatcacactgcacagctttttaaaaaaataattagctgccaatcttttaaaatggtaagatttcatatacaaatctggatttttggcttctctaggagtaaacattgaaactttttttt

SEQ ID NO: 162475 - DNA, 138 bp, Homo Sapiens
tttttttattcagtagaaaccattgaagtttattggcggtcacaatgcttacactgtatgcagcaaacacccttacaagtctatccgcaacctgatcacgcaagaaaggattcatcacacagtcgccagaggagaagg

SEQ ID NO: 162476 - DNA, 420 bp, Homo Sapiens
gtgcatttttcattcaataaatgttccatccttatttagttttgttgccgaaagtgaagtccatgactttagaatgatagcaatttatcaaccaaagaatccgtcttcacaccgtttcaataactgcagcaatttccttgaactgtctgtagaaattctgaaactgtggaatcgtcatttcaaagcacttggtctttacttggcctgaatgatctgccacttttagcatcactgcaacgtaaggatacttaagagatctgcaagtgtctgagctcacagccatacccagtttccactgaaaatctacaagctggttggtgacatcggacttagcatccagcggcggctcgctggacgcctccatgggcagcgtctgggacttgcggcccggactcgagagaacgcccccagaccagcccc

SEQ ID NO: 162477 - DNA, 979 bp, Homo Sapiens
gccgcgccaaactaaacggggccacggggtacaggccccgacaacaaaagggggaggaccgggaaacttcaggcctacccacaaaaggaccctggaggaggagaatccaggaggccggcccaaccccgcagactctgcctgcattgtcaccaaggccttcaagacactccgggcaaatttggcctgtggtcagctgcccagggcctgcgggcaccaagtcggccccctcagcaggagcctgactcagttcagcctcaggggcctcctccaggtcggagcacaggtcgtcccccagacccgggggctgggtattggggatcccgagcgccccccgcaggccagccactccgtccagggggctctaggtggccccgccagggcgtcccccagcagatcctggaagctgctgccctcacgcagcggcatggactcgagcagatggttcaggagctcggcagcgacggtagcgtcgatggcctggcacgtggacacgaacgtgtgcacctcgtgcatgcactggatgtagccggcagcgaagcgctcgctcgcttccgcctgcagctgctcgcgctcgcgcgcccggccccgcagcacaccctggacccgccgcaccgtcagctccagcacttcggcgttctccagcttggcctgcacctcggcgcccgccagcagcagccgcagctcctgcaggctctcgttgatccgcgcgcgccgcttcttctccaccaggggcttccgggccttgcggtcccctcgcgtctcccagccgtcctcatcctcacggcccacacggtcccggccaggcgccgcgggtggcgccatgcccgctccgccgggacgcggcaggggctaggagcagcggggacggggagcggcggggaccggagtgccggcgccctccgctgccccgcggccgcccagcagcagcccagccgtccgcgctcccctcgtgccgattaaacccagcctcgtactagcc

SEQ ID NO: 162478 - DNA, 578 bp, Homo Sapiens
  misc_feature (131)..(144): n is a, c, g, or t
  misc_feature (475)..(505): n is a, c, g, or t
tatagttagcattttaataaaccagagaaaaatcggagacagttttacaatcgcttcatgtcaactacaatggcactgaatgaacaggtttcagctttatacagcattttgcaacatcaacatgcctaggnnnnnnnnnnnnnnaaagtctgctgcctactcgtatgtaatatgtgtacataaaagcggcacgtggtttttcgtttaagagtaatctaatatacagaattttggcacgtaaagttttgtacacggtcagtccgggtcctaagggcgcagggtagggcatcccactgggagttcaaaggggaaacgaagatggttcccactgctgctcagacagtgtcgctaaaattccctcactcattttcaagtcttgttttacataatggcttttaaagcaacttttgttaatgctactgatccttaatgcaactattaatgtccatttggtgacatctgggtttcatacagnnnnnnnnnnnnnnnnnnnnnnnnnnnnnnntatatatacacattttatatataaacttaaaaaccttgtacaaatgagttgttatatataagatgcttatgct

SEQ ID NO: 162479 - DNA, 1018 bp, Homo Sapiens
gaatcagctccttccccagggtgttttaagatttaggagtttcagttccccggtttaaaaggaaaagtaaaaaacaatccacagttgagcagttgatgtgcaaatcatcccaggaatccaactttttgtctcttgggccccaggctttcttccttgtacagaacactctgcaaggaggcatgcagtaccttgcccacacgcttgccagtctccatcatcttcgaagatgctcttttggttccagggtgccctttccccacttttctccatgcacgtcgcaactcccttgttggtcaccgacaccagcaagctggccagcgagcaggcctcctcctgaagagtagcatccaccacatgccgatagccaatcttgcacagagtgacaatgcaggggacattctccacacttagtcgtatgcagtcataagggtatctgacaattcaatgtccttcgacccctcttcatcctccaaaactcgaacccttggtatccttgtattgaagagagcagcctttacagcaatggaaatggcatcaaacaaatttccaccacattccagaagcagcacatccacatagagaacccagcagtgctcccgaggactaatgcagagggtctttaagtcgacactgcttttattgttaaatatccgatagagggtgttagcgatctcggtgccaaggtcatcacctcctctaccttcaaattcaggcgtagtggtggccggtcagtccacgtcgcactccaagtagccttcattgcgattctgcgagattatgatagtctggcgatgtcatgttatgcactgtccttacaatgatgtgagttgaggcatcatgctagtcacgtggtggggacgatagtctatagcagcgcaccacttttctttaggacacatgggtagtcttcgcagccgcgtccatccgcgcggaggtatttttgtgtgtcactgcaaggaaggacgcgttttgatcctcatgcatcgtcatgggctccagagaagcgagtagcccctcc

SEQ ID NO: 162480 - DNA, 587 bp, Homo Sapiens
ttcgctactgtgtgttccggggtacccaataggcaattgctgtgtagcggtcaatttcgtgagtcacaatgcaggagaaaatgtcagaaggttctggtgtgaagtttaagtaagaaaaggcctggaagctgagtccatcgacagctgagacaaaagtaggcccaaatccttccacagggacggaatgatgctgccagttcactgtcagcatgggtgggaagagattactgacaaaacagaccaaagtgttgggcttgccaaactccaggggcttcagcgtgaacacttcagcgataggaaaccctctggacaccgggattttcccatcaagttttggccctatttgctggatcatccactcgcagaactctttgtcaaataaaatggcaggagcatctccctgttcctgagcccagtcagcaaattcgggcaggcgaggcacccgagtgttcttcagggacggcccaggagtggggtagcagccacagaagtggtaacatctgtagcagcgcagctccttggttctgttcatgacccataccttcttgccacacagtaggtaggagctaccaaccgcatcacccgtt

SEQ ID NO: 162481 - DNA, 558 bp, Homo Sapiens
  misc_feature (193)..(274): n is a, c, g, or t
tttcctctttgaactggttgtagttatggtattatttcttttaccatgagaacctgccaaagttgtccaggttgcagatatacctatggtagtagtggttgtggcacttggaggttctgtcaagacttcaggctcatcttcaactttaagcttttctttttcttgagcagcttggagttcaaagttctctttnnnnnnnnnnnnnnnnnnnnnnnnnnnnnnnnnnnnnnnnnnnnnnnnnnnnnnnnnnnnnnnnnnnnnnnnnnnnnnnnnngcagccaaagccagcctccgactttcttcccttaacttttccaagtctaactcctctaacaaaatgctggcgtttttgtttgcttcagcagcctgtctatctttggcttgtactattgactccatacaaagatgacacttcttcagcatctccttatcagtgatggttgctatgtatctcatacattcagaatctgatggaaactgattgacttctttgactaagtagcgcaccaccttcacatgaccctttctaaatgctgccataagaagagttatcttgcg

SEQ ID NO: 162482 - DNA, 942 bp, Homo Sapiens
  misc_feature (119)..(119): n is a, c, g, or t
tccggtcctgttttggcctgctgtttcaggtttccaagtttcggaaacaacccgttcaaaggtctggcgagtccctgttttaggttccctcacctttggaagaaacctcccgcccaaanatctcagagctttctcctgtgtaggctgccactggttctggactgctctgcgttttctccatggccatttgtttcttggcctggagctgctcaaaggctccccggagttgtgtccgtttcctctgggcttcctccatctgagtcagggccttggtgaggccaattttgatggcctctacgtgctccctgtaggtggccttcagctctttccattgttccttagctgcaattgccttctgtcctgagatgagccaccaggaatgagtacatgagtgagggtggcctgctagcctgcctccctgcaacactgggcctccttcccatcagccaaatgggagacctaactgaaatcctccttccttccccactcaggtcagctgctactacaatcccctgcctactcacggctcgtgtcttcagaagccaaggggtcgagacccttagcagtgtcctcctgagccaggatgttctgcaggaaatccgctacctgaagctggctgcagagcagcttgtctttcttctgagagtcctgctcagagggagggcagagacagggaacatccttacctccttacaggtttccttaagtctgctctctgccaatgctgccctgtatctcagtaagaggagccaggaccagaccctggcttctgaaaggctcgctctcatcttgtacataccaccacaaactcaaccaggatcttggctggcagttctgcctcctcctgcaggcctacaggttccaagatgcctgccacctcagccaggacctctagggctgcagcttccgcctctgtctccgctgcctccatctttccaggcg

SEQ ID NO: 162483 - DNA, 249 bp, Homo Sapiens
tgtccaaagagtgaggattacatacgtagtctccgacctgcaagacgatgagatggtttaattatctgccttttctccccccacccccacccagcagcttcctgtcggacagactgaagcctggctgggctagtgatggtaaaaatcactgacagcaccagcaaacactgtctgtggtttcaaaaccatggagggaatgcaagggacgggtcagtaaataaatgaactcagcaaagctgcttcttcctc

SEQ ID NO: 162484 - DNA, 570 bp, Homo Sapiens
  misc_feature (128)..(178): n is a, c, g, or t
  misc_feature (254)..(263): n is a, c, g, or t
  misc_feature (305)..(338): n is a, c, g, or t
aactctctcttataagcaccaaattttaatatctaagtcaatttttggggaaagaaacaccatcaagatcttccctccagcaaaacaacgatgttcactcctccaaatatccaaattgaagatctacnnnnnnnnnnnnnnnnnnnnnnnnnnnnnnnnnnnnnnnnnnnnnnnnnnntcacattctaatggggggggtcagtgcatttagcagtcttcgctgtgctgtctaaccatccttcagctgactttcnnnnnnnnnncaccctaagctcatcaaaatatacattttccatttgcttttnnnnnnnnnnnnnnnnnnnnnnnnnnnnnnnnnntttaaggaattcacaatcaattgcctgactcattttgatgtcatgtacagcatatggaggtcaggaaggctatttgcagcacatgtgattaggggctactgatcttcagggtttagctttcttccaaacagtgtaaaatacccacaattccaagtatgaagggacacagacgatctcctttgaaaattccacaggacaatacaggcgccccagctgttcttcatagagcgcc

SEQ ID NO: 162485 - DNA, 287 bp, Homo Sapiens
agctgggcatggtggtgtgtgcccgtgataccaacgctactcgggagtctgaggtgggaggatcgcttgaccccaggagttctgggctgtagtgcgctatgccgatcgggtgtccgcactaagttcggcatcaatatggtgacctcccgggagcgggggaccaccaggttgcctaaggaggggtgaaccggcccaggtcggaaacggagcaggtcaaaactcccgtgctgatcagtagtgggatcgcgcctgtgaatagccactgcactagccaaccgtggactagt

SEQ ID NO: 162486 - DNA, 310 bp, Homo Sapiens
gcctttataagagaatttttattgttaattatttaccttaatagtttcagaaagaggaacaaattagctcagtccaacatgattggcagttggcatattctagtgaagcaagtgttctgactgctaaggatttaatttggataattttaatacttagccatctaacacttcaagcataacccagaataaatgcatcaccttccctttcactttaataccgcacctacctcacttcgatatagaaatatcattcaatatgatttccagaaggacaagtttcctggagaatacaggcatgaggacaatgcac

SEQ ID NO: 162487 - DNA, 399 bp, Homo Sapiens
gaaggtttcaaatgtactttatttcttcaataatgccatatcttaatgggtacacagtgctttaatttggcatcaattatgagctgtttttttaaacaattcattattacaccagaaacgtacacctgattttcatgacaaatacggtaatgctgtattagctagtggagccactttctgtattgttacatggacatatgtagcaacacaagtcggaatagaatggaacctgtcccctgttggcagagttaccccaaaggaatggaggaatcagtaatcatcccagctggtgtaataatgaattgtttaaaaaacagctcataattgatgccaaattaaagcactgtgtacccattaagatatggcattattgaagaaataaagtacatttgaaacctt

SEQ ID NO: 162488 - DNA, 109 bp, Homo Sapiens
acaaaatgttattccagactggatcattttggtgggcagaagaaacctggcagtgaattctaactaatctgcatgaaaagacaaatcacgatggttggggggaaaaatt

SEQ ID NO: 162489 - DNA, 477 bp, Homo Sapiens
gcccatgcgcgttttattaataaaaactaacagtgccaagttaaacaagtcaaacaattaaagtctctttattttccataaaatattacagaaaagtttatttgtgtttcaataaaaagactatcgttttagaacaggcagctaatagcaactgtgcagttaatgggttttgtgaataaattttaaaagagactactgcctgtccttaaattcctttttctttttataaaaaaagaactattaaaaatgattgacaaattttgagttaaaaaattgttaaaacattctctatatttaatttcaattttataatagattacaggaagatgcttatgaaacaaatacatttgtttcagtacatgtctttaaatgatagacttataagtatgtaaacaactatataataaaaggtttccaaacgctgcctgtaagaaatcaggcaaattttaccataagcaataaaccattccaagcctt

SEQ ID NO: 162490 - DNA, 582 bp, Homo Sapiens
tttgcgtctctgaaaattttaatttgttctgacaacgaaactaacacagcataaggacttaagccctcaagctaggcaagacactgatggcccttggaggacctcggggctgagccacggcagaaccttgacactgtacttgggaaaatcgtggaccactcgctgccgctgcccatggcttatcatgctgaggttgctgcgcaaaccagacaggtagaccttcccatccacagagatcaggatgtggctggctttgacactcctgtgtacatatcccatgtggtggatgtagtcgagggccttcagcaccccctgcaggatgtaagcaatcgccagctcattcatgccatccatgaagtgtgtacagatgagatcttttgcagaaccgtatgccatgaatgatgtgacaacccacagctcattgtctgcaattaaagtggctcgatatggcacgatattgggatggttgaagagtttggagacatgcagctcgccctgcaagaatgttaccatctcattggaacaagcttctaggttaattctgcgtacagtcacgtactctactgttggatggtaccttgc

SEQ ID NO: 162491 - DNA, 1549 bp, Homo Sapiens
  misc_feature (1456)..(1508): n is a, c, g, or t
ccctcccagcaaccggtctggcggcggcgcggcagtaaaactgaggaggcggagccaagacggtcggggctgcttgctaactccaggaacaggtttaagtttttgaaactgaagtaggcctacacagtaggaactcatgtcatttcttgtaagtaaaccagagcgaatcaggcggtgggtctcggaaaagtcattgttgagggcttaagagatttggaactatttggagaccaatgatgcgagctcagagtcaatagcatccttctctaaacaggaggtcatgagtagctttctgccagagggagggtgttacgagctgctcactgtgataggcaaaggatttgaggacctgatgactgtgaatctagcaaggtacaaaccaacaggagagtacgtgactgtacggaggattaacctagaagcttgttccaatgagatggtaacattcttgcagggcgagctgcatgtctccaaactcttcaaccatcccaatatcgtgccatatcgagccacttttattgcagacaatgagctgtgggttgtcacatcattcattggcatacggttctgcaaaagatctcatctgtacacacttcatggatggcatgaatgagctggcgattgcttacatcctgcagggggtgctgaaggccctcgactacatccaccacatgggatatgtacacagaatctccagggttcatgatgccaagtctgacatctacagtgtgggaatcacagcttgtgaactgggccaacggccatgtcccctttaaggatatgcctgccacccagatgctgctagagaaactgaacggcacagtgccctgcctgttggataccagcaccatccccgctgaggagctgaccatgagcccttcgcgctcagtggccaactctggcctgagtgacagcctgaccaccagcaccccccggccctccaacggtgactcgccctcccacccctaccaccgaaccttctccccccacttccaccactttgtggaccagtgccttcagcgcaacccggatgccagatcaagcgacgtgcctcagaggctttgcccgaattgcttcgtcctgtcacccccatcaccaattttgagggcagccagtctcacgaccacagtgaaatctttgccctgataacaaaacctgaaagagctggaggtggacgattgggagttctgagcctctgcaaattgtgcgcattctccacccagggaagcacagcgcacccacaggcccctttcttgaaggggccggccaaattcccgccctcttggggcaaactgggccgcaaaggactttcctttccgccaacgttcacatgctccactgctctgcaaaaaacaaactcatcgggaaaacaacctccacaatgccttcccagggtctttgcacacccccacgggaaatcctcaaccaatcagcggatcctggacggttccatcannnnnnnnnnnnnnnnnnnnnnnnnnnnnnnnnnnnnnnnnnnnnnnnnnnnnaaataaccatgccagccttctggacacccgcggaacctaat

SEQ ID NO: 162492 - DNA, 788 bp, Homo Sapiens
  misc_feature (54)..(54): n is a, c, g, or t
  misc_feature (374)..(393): n is a, c, g, or t
cccccaaaaatataatttttaaaaaactaccaccaattttctcccttttaaagntgagctccccttgtgcaaagctgctgaagtgtacagcagcaggggcaatgggcgtctataggagggtggctctgctctgttctggggttggtccaaagtcaggtggagttcccaatgtatgaaaagcttgaaaaatctaccttaaggagactgaatatcaataccagtttccaaggagttcttgttgaattttcacagaaatactggaaccctcaaaatcagatagtaatttcaaacaacattaatttcagatgatcccttttatttagaggccctgcatctgttttgatcaagtcacatagccttacaccaacttatcnnnnnnnnnnnnnnnnnnnnctacccaaaatatagttgtatttttaaaataacaaataaatatatagtcagtttggagagacctggagtacccgatgttgtctaccaactgtcacgatcacttctctgcaaacgctgctgctgccattggagtccttatggttcctcttgctgaggctgtcagttcttcaatctcagcatttaatttatgtattacccattccattgcttctcggcctttactagcatttgaggatatcgtacttgccatcagtccttcaaggtaactgctgaggctaactcctttcacggtaattatggcttcttgtgtcaaaacagttttttctggatcctgaggatgtggtttgtatataagtctctcatctactaaaaccatgtttgtaaatgaaatatta

SEQ ID NO: 162493 - DNA, 1132 bp, Homo Sapiens
cgtctcatctccgctgctgttgtagtcccacgtctggtgttgggcgcgctcgccgtcatgagttgctcactccgcatggggccctcttttaccggttcggggtcttccttgtcatggggctcgcctcctttattacccaaggggcggccccacttctgttacgccctgtggttaggcacacgccggcttgggacaccctcttggtgtcctctggttgccaccgatttaagggacatcgggccggtccctggcctgggctgaattcccctgtgacccagtgtgaaccccgagtttgcccgtgttccaccagtgaatgagagcctccagatgtgtaactggaaccacagagttgttgagggccaaacacaaagccgttgggtgctgtgccctggctggaggtgacggtgctcgatatggcattagtgaggttgctgctgcccagcccaaagccgctggggtttgccatggctggggtggcagctgtgttgctcaagttgagctttgaagcaccgatccccaaagaaaatccagttccccccgaagcaagagtcgctgttccaaaagtgaagcctgtcgtctgtgtggccggagtctgggtggcaagtgagaacaggccggtggaaggggtacttgtggctggttggaagggagccccaaaattaaaccctccagtgccagaggtggagaaagaaaaccctgtagcaggtgtggttgttgccgtctttgcagtgccaaacgtgaacccgcctgtaggggccccagtgcctccaaaattaaacccgctcatggctccggactctggtggcggcagctactctggctcccaaagcaaatccgtcggtgtctgcagccttgggaagatttcgctcagtatcaggattcctccaccttctctggaccttgattcagtctcctaactgccacagaagggatgaaggttgaactccagctgggatgtcctgatgtggatgggacaaggtgggtttcacgcctgcgctctccgctcccaccttctttcttcagccgaggccgccgccgcctctccttgctgcagccatggagtgagtaaccgcttacctcttctcccctcgtgccgaactttaacaccccaggcctcgctacctagccgtaa

SEQ ID NO: 162494 - DNA, 859 bp, Homo Sapiens
  misc_feature (285)..(319): n is a, c, g, or t
ctttgtgtttgatgccgtcgtgtgggaaaagtcaactccgatgccaccattgcgggccggacgaaggatgctttcttcctagaggctccgagctgagctgcgaactcgccccccgcccttgggacaagaagacccagtcacatcactgcacccgtcctgtgtcctcaccattgctatgcaaagtgattcttgttgtacataagatttaaataatgcacctatttaagacatgttgacaaattgcgggtctgggacccgcctcttatttatgaagtctttgaccgnnnnnnnnnnnnnnnnnnnnnnnnnnnnnnnnnnnacctggcgtgtagtactgtataaaccagtcagctgtcgggttagtggtagtattattgttatttttttaaaggaaacatacagacaactaaaagaagaaaaaaagaagaacctccttggaaaaattaattgctttttcgtaatggattctctatgctaatgctctctcgtctgtctgtctgtctgcccactcccccacccaccactgtgcgtttctgatttccaaatgtctccaactccctcacgaggtggggctcaggctggaggaggagggattaagatccccttgctccactaaggcccaagctctttctctcggcaccttttagacttgaatgggaggctgctaacccgccctctccagtccaccccggtaaaagagctgttccccacccccagggaggtcctgtccctgtcagcctttgctgtccctgtccccaacggagactctgtcaccactgggctccccctgccatcgtgtgcttcacgtggccccatgcatgcccgcctctctgcatggtctcttggaaagatgagattc

SEQ ID NO: 162495 - DNA, 986 bp, Homo Sapiens
  misc_feature (323)..(380): n is a, c, g, or t
  misc_feature (533)..(596): n is a, c, g, or t
  misc_feature (689)..(689): n is a, c, g, or t
  misc_feature (793)..(793): n is a, c, g, or t
  misc_feature (907)..(907): n is a, c, g, or t
gagttgtctaatatgaatcgggttttatttgtttttggatttaaaaacttctcctttgatgaatgcacatttatagggcaagttagaacaaccaatcacataaacaactgtcctcacataataggtagttgttacttaaaatgaaaatcccagagttagtaataaattcaggtacatatgattctgtatgtcaaacaaatagaagatagcatgtcctgaaaaagtttctggtgactaaaacaattgggccaaaaagacaaggacattgatgtccaaagatgcatgttaatggttcaaatgaaatgtgaaaaagcaaaaggtannnnnnnnnnnnnnnnnnnnnnnnnnnnnnnnnnnnnnnnnnnnnnnnnnnnnnnnnngtgaaagaatccttccttctacatcagtatatctgagtcagagccactaaagctatctatttctacttcaccaaacatctcattcccactcagtacttgaggagtttgatatacttggcttcatctccctatttctaaccttaggaatctgannnnnnnnnnnnnnnnnnnnnnnnnnnnnnnnnnnnnnnnnnnnnnnnnnnnnnnnnnnnnnnngtggccacttctgctgcttctggctttatttctggggccggtggtggagcactgctggaggagttctgccggggcacctctggtgatttttancaagcaatcaatattgtactaatatatattataaaagttatgatgatatatcacatgtctaacatgttctcacgtcggatgatcaatgtgattcactctctganggtccactagctacaggaggcatgtcacacactcactctgcatacaatcagggggcagcctcataatggatgctaacataaatcctccataacttttcgggtgcagagacatgngttactgtcaggatcagcaactgtgtgcatatgcatggcatcctcaagagtatacatagacagtcactctgcattgccc

SEQ ID NO: 162496 - DNA, 465 bp, Homo Sapiens
  misc_feature (279)..(299): n is a, c, g, or t
gtttttgtatcaaaacttgaaattcctctatttctattgggatataaaagccttccccttcagtgaagaaaacatttattttttatttgattcctaggatttagtaaactctagctgtctatttaaaatgtactgaggcacaacaagtattatactggaagacttgccaaactggcaaagctttaagttcatcagcattctatgtggttcagagctgtgatttttgcaaagtattttaccaacctcctcgatggctttgataaaggttagatttgatgnnnnnnnnnnnnnnnnnnnnncttactccactaaactataaagaaaataattacttagaaactccattttaaataatcattttctagaaattcttaaatatatacagaattttaaagaaaacatttcatctgatttagttagcatccacatatcattgaggaattaaagtgtgggacagtcattatt

SEQ ID NO: 162497 - DNA, 984 bp, Homo Sapiens
  misc_feature (195)..(195): n is a, c, g, or t
  misc_feature (273)..(281): n is a, c, g, or t
gtgcggtaagacacattattccccaagagtgtcggctcagactaaccaagcgtaaatccggctgcatggtgtcccgttctactcttctagtggcgggggccgaggtccaggtgaagatcgatatcttcgagaggccacaggtgtcaagctgagggccaacccgggttgaacacggctcccccgttaaacgtcgcnttccgggacgttgccatcgagcgagatcagatatagaaaaagactaaggtgttgttcgaccggggaggttttgctgtnnnnnnnnnaacgacacacgccctaattctaggttgcagggttttcttaggtgaacagtcttatgcccatgttccagtctccttcgggggaggcccggcgcccaaattgaatggttctataaaatttttttgaggggcgaggcggggccgccaagggctacttttccaagctcctctgcaccaggcttcgcttgtctggtttcaggtcgtatacccctcgtataaaacattccaatttattggtctttgtggagaattagatgcatcaccagtatattacaacagagccattaatcttgtagcttcatcaacattaactggtttgctttcatgacgctgctgaggaatcttcttaagattagtggtaactggttttgctttgtttttagccttaaagtttttttggctggctatgtgaaatacattcctggacttcggccctcttaatttgttcttggccattgtctttgctcagtcgtagtcttgactgaaatttatatcttccttcaatgtagccttactacattgtaagtaattaaggaactacttaactgaaacagcaatgcttttgaacgccaacagtattcctcctacagaagtttaacacttgcgtgcagctttttaagctccaggtaacaccatctggcacgtacggcgtctaggaagttccggggaggatgaaccagtcaggattccgctcacgagccgtccc

SEQ ID NO: 162498 - DNA, 746 bp, Homo Sapiens
ccatctactactgaaacttgacacattttcttaacatttttcgtaaatctggtagaaatttctcaggtattttgaaatatcaaccaagtaaagaaacccctttcacaattgtgcatttcaataaatatttttatcttcattttacaggtttttgtttgaattgcagatgtcttcaaagatacaagaattactgaggagaaaaagaatgggtgctcactgacatcccatgtcttgcctctattaatacattctgacatttgagtttagagataagaactgtttcccatactatggtttttaaatgagttctatggttcagtaaaactattaaattgaagcttcacacatttgtagttaaaatgtttatttcttttcaacatttgttttcaagaaagggaggttatttttcttccttttgttcttatatttttttagacaaatgcttgaaaccatccttacctttctaggaaaaatgaagaacctttttaaaaagtaatagtatacagctgttcagtagcttacaatgacactttgcttgtaaacaataaagtcagagtgcttaactaatactcaccttcttaagattagtggtaactggttttgctttgtttttagccttaaagtttttttggctggctatgtgacatacattcctggcacttctggcccatcatttatttgcttcttggccattgctcagacagctttaacacttgcgtgcagctttttaagctccaggtaacacc

SEQ ID NO: 162499 - DNA, 179 bp, Homo Sapiens
ctaagtgcaatgggaagccactcaaagggctttaagcagggaagtgacattatctgattttcgttttataaagatccctgcggctgccgtcagtgattgtaggagggcaggagtggaatgcaaggacagcagacattagtgcagagtcagtgaaagatatatagcttgactaggtgccg

SEQ ID NO: 162500 - DNA, 679 bp, Homo Sapiens
ccaggttcataatttattgtacaaattgaattatcacatgatgagttggcattagcttctccaggcatgggaacttaacagatgaggttaagaaccgtagacagtttaaaatccatttatgttgctttcacagctggagtttttttggaccttaacttgaaatataagacaatcaatgcaatgcttccatatgtggccagtacacagttcattctacctgtgagagtataagagttgaaatattttttaataccagtgaactggtattgcgcatcactttctggacctgccatgatttcaatctgccaaagccgcaaattccgcagctggtgtccttcaacgaatgtaaccacctctcggcccggccggaagaagaaaatgatccggatcattttcttcttccgggcatgggaacttaacagatgaggttaagaaccgtagacagtttaaaatccatctatgttgctttcacagctggagtttttttggaccttaacttgaaatataagacaatcaatgcaatgcttccatatgtggccagtacacagttcattctacctgtgagagtataagagttgaaatattttttaataccagtgaactggtattgcgcatcactttctggacctgccatgatttctatctctcaagccgcaattccgcagctgtgtccttctac

SEQ ID NO: 162501 - DNA, 968 bp, Homo Sapiens
  misc_feature (905)..(905): n is a, c, g, or t
  misc_feature (956)..(956): n is a, c, g, or t
ccctcctcgtacaactccctcatgttagggtttctctgccaaatgtgcctcagtgctggtgctgatggaaagtgtccacctgtcatacaaattgtattcccgccaggcgctcacacctgtgcaagtttctgcttgtgatgtgttccctgatgatctgcacacatgcataaatgtctcccaagatcgggccacacagtgctcacaggggtgggccattcttgggagacacacctgccataggagtccatgacactgagtctctcatttgtatataaatactctgcttagaaggtgcacagcctcatcttccactccacaaccagacaacaccagggtaggacataagtgccaggttctccagcgtcacatcacaggtacaggcatctctgagcctcaactaaggagattccattcctccctgggtaaatttcacagccacgtcttcatatagtcactgtgccctgaacggggaaccttagcgcggccgccgccatgggaccacgtggggtaagctgggttgagagcagcgggcgccgttaaagagctgcagagtcacgtctgtgcaaagagaagaacgactctcgacctcctggatccagtcaccaccacggtcccaacacagcgctccaaggactccctaacgccaatggaaatggtcgcgctaaggttccccgttcagggcacagtgacttttgaagacgtggctgtgaaatttacccaggaggaatggaatctccttagtgaggctcagagatgcctgtaccgtgatgtgacgctggagaacctggcacttatgtcctccctgggttgttggtgtggagtggaagatgaggcggcaccttctaagcagagtatttatatacaaagagagactcaggtcaggactcctatggcaggtgtgtctnccaagaaggcccacccctgtgagatgtgtggcccgatcttgggagacattntgcatgtggcag

SEQ ID NO: 162502 - DNA, 1746 bp, Homo Sapiens
  misc_feature (137)..(137): n is a, c, g, or t
  misc_feature (150)..(150): n is a, c, g, or t
  misc_feature (165)..(165): n is a, c, g, or t
  misc_feature (217)..(217): n is a, c, g, or t
  misc_feature (241)..(241): n is a, c, g, or t
  misc_feature (295)..(295): n is a, c, g, or t
  misc_feature (339)..(339): n is a, c, g, or t
  misc_feature (342)..(342): n is a, c, g, or t
  misc_feature (357)..(357): n is a, c, g, or t
  misc_feature (363)..(363): n is a, c, g, or t
  misc_feature (368)..(368): n is a, c, g, or t
  misc_feature (373)..(373): n is a, c, g, or t
  misc_feature (535)..(535): n is a, c, g, or t
  misc_feature (556)..(556): n is a, c, g, or t
  misc_feature (627)..(627): n is a, c, g, or t
  misc_feature (632)..(632): n is a, c, g, or t
  misc_feature (1718)..(1718): n is a, c, g, or t
  misc_feature (1731)..(1731): n is a, c, g, or t
ttagtagcaggcggggtaggaggatgagcggaagctcccgcccgacagtgtggagtggaggagagtgaaatcagggatggggggaggctaatcgcggaaaacaggtatccggggcataaggagttcggttgtgttgncaccgagggtttnggcagtcagggcgcngggcggttggtcctgctgtccttttcggcctgctgagaatgcaggaaggcgnttgccgctgcgagacggttttagnatttttggtggggggcaaggcgtaattagtggttctatgagagtggaagacggntgggtgcgtggccggtgatgagggggtttgcggcgtctataagngtnatggtcggtctggcncccganggagnaattngcggcggcccgcccgggagaggcagtggaaagagaagcaagggacagggtccccagaatggaatgggtgttgccgaatgctagagatgaaaaagatctttatttatttaagtagcgcacatatgccagcagggcggcgaaaaaaatgtagagagggtaccgnccgggccctgtgtacgtttgngggaagtaataattccaataccagaattcgatcggtatttcttttggtggtggttggcatggaagtcgctntttgnttggggggccccaagtgtggttcaaacaaggtggcgaatggcgcgggggcagggggaggtcgcaacgggcgggagagagggggcatcgaagataccagctggtaatgtagaccgcggtgctccgtacggttcggcggcgcgtagactagtctctgttcgccacacggagaaagtactgaaaagaattacgatggcgacgggttaggcgccatgattgtaaaaaggagaagagagatcaagagagataaattatcggatggagcgttggtgggtaatggaaacacacgggagcctcggttgtgggtggctgtttccggtgtcgtgtaggtgtttgattgggggtttgccgggggcgcgggataacaagagcctgagggtcgcgatatgatccagagaggtggggctggtggggttctgcagaggccttttcgcggacctgaaaaggggcgccttggggaggcatatgtaacatttatgcaatccagaggcgcccacagcccgctgggccctggactccgccggctctttgtcctgagatctgtccaatatcggcctccagctgctctgggcccagctcggagtggtccgccgggcccaagggctctggtgccttctggaaagcgctggctgggacttcaccctcctccttgaagagcagaacgtggagcttcccgcgcgccaccagcagtccgtggttggcctccagccgctgcacttgggctgcgcggcgcaccgcgcgctcttgggcggcgttggcgtgcgagctcacgcgctccgccttggccagcaggtgcgccaaggtgttgctggtggtgtcgtggctgcgactcagagcgcccaggccgctctggatgcggcgcacggaccctgccaggcctccctgccttcgagccaggcctccctgccgctcccgcagagtctccagcatggaggccagcttctccagcagggtcaccaccgtcacggcgtgcacgggaccccccgccggcgcctcgggcacaggccccggctccaacgcactctccctcatgatcccctcgtgccgaattcgccacccaggcctcgctacgtagggccttagagaangggggcgcggcgngcggcggaacggaac

SEQ ID NO: 162503 - DNA, 467 bp, Homo Sapiens
gccgcaaaccacaagtgtttattgcagaaatctggccaacattccaattgcagggccccagcacagggctgggcaggtgagatagggaggggtggaggaagtaatctggcccagggcttcagagctgtgagatgatattgggtgccaggctgcaggtgaggcctgtgccatctggttccacattcagggccttcactatgccatcctgtaccaccatggagaacctcttgagacgtcgattcccaaagatggacaccagcgaatcatctagtaataagtctgtctccttcccaaaggccccagtgggatcagccaggagccgaaccttgattggggccatggctgcagcggctctgctgaaactgcggaccccgccagacgcccactctccttcactgcaccgtcttgctgccgctgccgcagactgaccgccggccccaccgacgagtatatagcccgctgagcgt

SEQ ID NO: 162504 - DNA, 1113 bp, Homo Sapiens
  misc_feature (237)..(237): n is a, c, g, or t
  misc_feature (513)..(513): n is a, c, g, or t
  misc_feature (716)..(737): n is a, c, g, or t
ctgcgtgccgcccgcgggggttttttggtttggaggggggccccagacgggggtcgctggcctcgggttcctcctcgggggaacaagcgtcggggcccggggtccaccctgccaaagcgggggccgcgcggcggcctaaagaggcgagtttttctgggaacctcttctaaaagggagccagaggggcgcctcccaaccaatttcctcctacgagtcaccgcgaccgggagcatcganacagcaagaaacaccccggcggacccctttttatttctcccgggagggggctttttgtgattaagaaaaggggagccaaacaattcctcgtggaatatcaaaaagactttccaccccccgaccggggtgtccttataaaggggggggcacaccccagcgtgccccactaggttaacgcgcgaaaaaggtttctgtgtttttggaaacccccgttttcccccaggaaaggaggcccacgtttccggaaaaaggggaatttttgacccattcttcccnggccagggttttaccaaccaattcaattccctttgagtgccgcgtttcaaggcccccaaccccatttgtccattttgtgagtttcggttacccgacaaggtgcgtttccccaagttgggtgtgcatgcaacatgtgcctccgtgggtacacaaaaaggctcattttacctacttgataaatgagctgagacgatgttttgggnnnnnnnnnnnnnnnnnnnnnntgttaccccaacacgatggagaagccaatccaaaaaagcttcatgctagagctagctttctcctcagaaacttacatcctaaaaacatccctatgggtgcctaaaaatggaaatccagtgagttcatggccttgagttcactcctgtcctgaatttctcccagtgcaggtccagaagggcgagatgtggcagaaaggagaatgtgggaatgtgtgagtatcccacagccagctcacagtgcagcttgcactcagaaaggagactcagggacacaagttctcaggatgcacagttcaccttgcctcatgtacctggctggggagagggagaccattcaaaagcctgtgattaccagggtgtggtttttgggaacagt

SEQ ID NO: 162505 - DNA, 716 bp, Homo Sapiens
ccggttaaaagaaatggttttattaaatccaaaataccaccccaaactctgaagcacttaagaaatttaaaatatctatgtcacagcaaacaggtggcaattcaacatccagggtcgacagaatgcttgaaggagactgcaacagatgggattcccatggtggagagggcatcttcacaggtgaaggggggcccagctgaaacagcttttcaagctctctctcttggtcaaggatcatgagaggcactccactcaaggggaggtgcgcaatctggtgctcttcaggcaggtcaaaactctcaaagtctagaggattgaagggaaagaatttttctatttctggataggcatcatctgaggcaggaacagagctttttgctttaacagtcttctcagtcatctttttggcagaaaagcttggctgtttttgtttgaggggtcccttggtctttacagacttttctgtagctctgttgacagttcccaaagcctttctagtagctttaggtaaggctggtggggcatcgaacgttttgccaaaacgtggtgttgaaacttgagatctcccatctaaggctttgattgaaggtccagaccccagcttcagcccatccttagcaaccacacgggtgcctggttctccattttccttatcaacatagatcagagtagccattctggattattgcaggtcttaacagccgcattcatctccc

SEQ ID NO: 162506 - DNA, 942 bp, Homo Sapiens
  misc_feature (64)..(72): n is a, c, g, or t
  misc_feature (128)..(185): n is a, c, g, or t
  misc_feature (358)..(440): n is a, c, g, or t
  misc_feature (496)..(756): n is a, c, g, or t
  misc_feature (826)..(826): n is a, c, g, or t
  misc_feature (853)..(853): n is a, c, g, or t
tccagttctgacacctttttaatagaaatcactgtttttaggaaacaaatagcacttttgtaannnnnnnnnacaatgtttcttaccttgatcttaatttaagtaacactaggaagacctcaataccnnnnnnnnnnnnnnnnnnnnnnnnnnnnnnnnnnnnnnnnnnnnnnnnnnnnnnnnnngcccttgcataaaaaaaacagtgcccgaacgatgacacaaggactcacaaagactcacgggacctcactgacactatgattcctactctaccatgcaaggtcttggctacccttaattggactgtcagcctgaaaaacagcttttctattccttattttagtttttgttaccnnnnnnnnnnnnnnnnnnnnnnnnnnnnnnnnnnnnnnnnnnnnnnnnnnnnnnnnnnnnnnnnnnnnnnnnnnnnnnnnnnncgtctccattcaattcacacacacctgggtcgcgtgctcctcgtgccgaattcttnnnnnnnnnnnnnnnnnnnnnnnnnnnnnnnnnnnnnnnnnnnnnnnnnnnnnnnnnnnnnnnnnnnnnnnnnnnnnnnnnnnnnnnnnnnnnnnnnnnnnnnnnnnnnnnnnnnnnnnnnnnnnnnnnnnnnnnnnnnnnnnnnnnnnnnnnnnnnnnnnnnnnnnnnnnnnnnnnnnnnnnnnnnnnnnnnnnnnnnnnnnnnnnnnnnnnnnnnnnnnnnnnnnnnnnnnnnnnnnnnnnnnnnnnnnnnnnnnnnnncgctctcccgctctcgctactgaccgctgcgctcgtcgtcggtgcgggagcgtacagtcactcaagcggnaacggtatcacagatcagggataccangaaacatgtgacaaaggcacaagggcagacgtaaaagcgcgtgcggcgtttccatagctcgcccctgagacacaaaatcacctaatcag

SEQ ID NO: 162507 - DNA, 359 bp, Homo Sapiens
  misc_feature (219)..(241): n is a, c, g, or t
tttccttggttaagaaatcaaatttgcagaatttaatctacaagttgtattatgctttgaaaactccatccctcctaagaatcttaaaaaacttgaaatgctcgccaaatgtccccatgggatttttgaccaaaagtaaggtgataactgaagaaatttttagttctttgatcacttcagtgacaatacccattaatgaatcttctccatgatttgggnnnnnnnnnnnnnnnnnnnnnnnacacttcttaacctgttgatctatttgaggtcttttgtgtttatcaaacttattcttaagtttaaaaaagaaattaaaagggtggtttttttaagattttaaagtttgctaacatatt

SEQ ID NO: 162508 - DNA, 570 bp, Homo Sapiens
  misc_feature (508)..(516): n is a, c, g, or t
tttttgccaaagacaaactagagcaatgcctatgtaagaacaaggactctcaagatcctgctacacagtattcacaatcaaaagggcccaagattcaggaccacctaaagacaactgacaaaaagtgtcagagccagaggccaacctctgctagatgaagcagcagcacatgactccatttctatctgataaggagacagagaagaggcatctcgaacagatgaaaaaccaaaggctggtgtcctaaaaaaacagattggcttcaaagaaaacactaaggaagacccacagagctgtattaattttagtaaaaataatcatatgccaacaggggaattgaaccactttctaaatcatagtatgaactcatctcttcagatacttggtaagtggtcaaagcttgtttttataattactttcactgtcttgggcaaaaagtctttcttatctttggtccttaggtgtggtatcagtttcttccatttttttatgtgttacaaaacaatcnnnnnnnnnacttgacatcagcaacttcgtgtttatactgcaccttggttgttgatgtcaagt

SEQ ID NO: 162509 - DNA, 1063 bp, Homo Sapiens
gtgtatagaccacccagttttgggggccccccttgaatttggagccccccctgggtttgggggaaagtcatataaccccttttccttgtttggattgaagcagagatcttagccttttttccacagctcagtaacaattcaggatttgccatgttcaagcaaatgccaaaattcccctgggcatgttttcccggacccgaaggggagagaagccaaatcgagatccccccatctggatcactggtaaccggtcatcctcggaggcaaggaccatctgagtagcaccatcaggatgccatgccaacccagaacaatgcattctgttactatggtcactgactttgatgattggctcatttttcctaagatcccatacagtggcccggccactgggactggctgatgctaaaatatgctgaacttgtctgttccatgcaatgcagctgatatcttctggcggctgtgttttggctcctggtgtcattggggttgcaaaattatttagatcccatatgtagatttcagattcattagcaccagaagctaccagattagtctggaaaatgttcacatccaaggctctcactgggccagtatgcttgtcattctgggcaatcacaacttccttgtctccagctataattttagaaggatcatagagaataatatttccattttcaccacctgcaatcagaactccagagacatctcctttggaatccattttataaggcccccaaatcaacttgtggtacctgtgagaagaggagaatgtggcacaagatttcatatccaaggatggatcagagaggtctaattcaaatatctcaagggaagcattcgtactaaatgttgcatccaattgctgagcagatgttcctgttgctaggtaaatggggtgattctgggcagggctccatgcctgcatggctgtacgatctacttcctttaacttcatcctgctggcgaggaccttcggcagccggatcctgcgttagtgcagcgctcgtcggactctcccagcattcgccgccgcccctcctccccggccagggccaccttc

SEQ ID NO: 162510 - DNA, 511 bp, Homo Sapiens
  misc_feature (245)..(296): n is a, c, g, or t
gcgtaaattattttcagttgttttctgatcctgcctttttcttttccccacaacttcacgccagtgattcgttcacatcaggtaaatcttgagaaagccttggtgccctcctccccaccccccactcagtaaccacgtgcgtgcacccccgcatcctttctcagtagttaagacgttctaggcaataccatagacacatctgactgtgtctctctctttgagtgcaagaaactcaagtcatcttnnnnnnnnnnnnnnnnnnnnnnnnnnnnnnnnnnnnnnnnnnnnnnnnnnnntatcttttttaggccagagttttctacaggtattaatgaatatttttcttaatccttataagttttatgtgtttaatatttcttaataccggtagcattaatttatacttttgtagcaacacaatatttttataaacagccggtgcttggctcaagtcttcacgaggggtttaggcagggccatcttggggaccctgtgtaccatgtactgtatt

SEQ ID NO: 162511 - DNA, 899 bp, Homo Sapiens
caggggggtaccccaggaatgggccctccaccggggagatggggcccgccggcccggtaggggccgccccacagggcccgaacgaagtttcctaggaaaactggcctctggaagggccgtggaaggctatgcgtttttccgccccaagagcggctcacgccggcaagggtacagggggacactctgcaggaagggcaccggcgtgctgaaggggccttctagcattttccgcagctgcttctccttcttggccacttcgttcaggaagagcttggagttcaggtggccgatcttagtgggggaaaggctgctgctcgtgcaggtctgggtccggtccatcaggattttcacagacttggtgttcttcatgaagctgacatcctccgtcttatcaaagagcagctgcagggagcccagcagcttcttggcctcctgcatgcgctccccgaggtgcagcgcctgcgctgcgttctcgctgcagaacttggcctgggcctcgtctaggacctccactgtctgccgcaggtcctcgtccagcagctggtgcagcttctcgtactgcagccgaacttcctccttcagttggttcactttctcccggatttcattccttcggatctccacgtcgcacaccgagtgtccctgatgcgcgccgctgtagtagcagcagtactggcacacggccacctgctcggcctcgcagtggtagaggcggtaggcgttgtgctgcgggcagctccaggcccgcacgtcgtccgcctccaccaggaggtgcccgcgggcggtggagggctgctgcaggtgcgtctgcacgtgggactggcagcagggcgcctcgcagcgcaggcagaccttgtaagcgggcagcgggggcctcgtcttgagaagccacccaggcc

SEQ ID NO: 162512 - DNA, 788 bp, Homo Sapiens
agcggcccatgcccaattcaagaggggaaaaaaggcgaaaacttggtaataactttgcgaatgataacccccaagtgggccaaatggagtccattatcagttgttggaaactccaccttaagacttctggtaggggacaaagttgtagtttaagcttcctggggacaggagtatttggaattttcaaaaaatgccgaatatataaaaaatagtctcagcaaaatgcaagagtatatcatgattcattagacacttttaatgaaaatagtggttgacagttagaaaacagttaaaatttttgctttagaaaaaaagtacctcaaagtaatgttcatattagaggtgccagtgctatttgtgtttctagcattccatattgaagtttatcttttcaatacaaaaaaaatatgctctgcccattacagcaggatgacatgaacttagttttctgttcctccagatgctcagagcagcaacaagacaagtctcaggatcatcatgaggacagtgacacttttacatctcgtttgtcattggagacacggtaagctccatagccggccaagcatccaacaaaaagaccagcaatcaaaggcggaacaccacctctccgcttatatccaaaaatgcttccaaacgtcacgagggcggcataaccaaagccgatcaggtccattggcaaggtggcaattctggagtccggaagcagtctccgcaccagcgctgtcccactcggcgcccagccgtctcgcgctgagcaaaggccgctccctcctggaaacgccccc

SEQ ID NO: 162513 - DNA, 420 bp, Homo Sapiens
cagaatctcgggctggcactgaatatctgcttcagcgtctgaatggatcccggcaccgaagcagcagtagtcatctacaagggccttggctaacctcacacagtaaaccacgggcgtccgctgaagccaggaggcagcacactccaacaccgggattcgacacacagccaccgccatggagaccagttttcccaacaagctcatccggctgtcatcggctttgttcccttgagggcttgggctgcgcgctgcgctccttgggcacctggaacacgaactcctccagcagctccacggggcccttgtccacgatgggcagcggcgcgctctgcagctggctgctgaagtagatgtccaggtggtacaacacctccttggcggcgctcagcgcatcgcggcgcagcagcgagtggcggatgt

SEQ ID NO: 162514 - DNA, 434 bp, Homo Sapiens
  misc_feature (405)..(405): n is a, c, g, or t
tatctttaacctgggactttatttgtacaactaagacatttgtataaaacaaacagaaaatgaaagaagcatgaagccatgggagagtagaaatgggagctgagaaacttaagagtaaaaatgggagctgagaagatgaagtgaactcctatcctcaaacccgcaagttcccggccccaaaggaagccctcagagactgatatgccttctgggaactggcgctgtctcagccagtagatgcgcatgttactgagggagattttagcctcgcaggacagcatcaccatcttgttggtttgcacctttatgtatgcaggggtctgctggaggactgagttgccatggagaactaggaaaagccaagaacagagacatcacacattttcctagccacagctgtgggancctcgcagtcacactgagtcaagtgtcaa

SEQ ID NO: 162515 - DNA, 187 bp, Homo Sapiens
tatttttctattaatctttatttatatgatggttctctggaaagcacttcattttaaaacctgtttctgagataagtagcataaggcgcatttgaagaaatactattgttgtatcacagagaacttccatgccttgaaatcatttttttcagagtattattaataagatggtctagctatgcagagc

SEQ ID NO: 162516 - DNA, 474 bp, Homo Sapiens
  misc_feature (318)..(346): n is a, c, g, or t
aattaattcagtcttctgttaatttttaagttttggttagtgccacaaggaatttaactttttgatttgtataatagaaaactgaactaggaattgttagcggggttttgaaggatgtgtactttccttcaaaataaagtggtagattttcaaaattttacactagtcagttctttatattctaagttaaatgtagtttgtaaaattattttggttttcttctacaaaggaaaaaattggatttatatatataaggttactgcataatgatttcattttgataatgtgcagaatggcctcataagctcacagaaagtnnnnnnnnnnnnnnnnnnnnnnnnnnnnntcaggattccactgttttaaaagaaatctcagtttttattttggaatataaaatgtgtatttggtatatgtgaccaattttctatcccaaaaaacacccattcttagtaatgtcatgaattaaacaca

SEQ ID NO: 162517 - DNA, 145 bp, Homo Sapiens
aaaaatttttttagagatgggaatggaatgatcttgaatagtgttggtgccacctatgttgtggcatcattttgaaaccaatcattcagagtgctttttttggtaaggcattattttttaatgcaggtatgccactactgggaaa

SEQ ID NO: 162518 - DNA, 568 bp, Homo Sapiens
cctgcagtaggcggcccggggccacaccgcggccgcccaagccagtgcaaggcccaggggcctgacatcgctcccagcgctcgaggaccgaggcctgctgtggaggacaccgtgctccctcgggacctgctctggattccggcccggacgtccccttggagctctgcatctccaacctggaacccaacccagaagtctcaagtttgacgcatcacgtggcgtgcggatccactgagggtccacagagaggggcgcccatctcctgcgtctcagttatcctgaattccgactcagatccgaacggggatctggtggaatcgagggtgaaagaccagagggacaatgttctactatcccaacgtgcttcagcgccacaccggctgctttgccaccatctggctggcggcgactcgcggcagccggttggtgaagcgcgaatacctgagggtgaatgtggtgaaaacctgcgaggaaatcctcaattacgtgctggtacgagtgcaacccccgcagcccggcctgccgcggccccgcttctccctctatctactcagccccacttcagata

SEQ ID NO: 162519 - DNA, 208 bp, Homo Sapiens; identical to SEQ ID NO: 135984

SEQ ID NO: 162520 - DNA, 482 bp, Homo Sapiens
ttttttggattcattcagcatttattgtagcaaagagtgggtagggacaggagctctaggactggccagtgggtgttctagaggccagctggggttggaagacaatggtctggacacttcactgggtggcaggctgtgttccaagttccacgaaatagctcaagaagttaaccagttccgttccagccttcttgatcaggggtgtcagctgctcctttgacttttcaaagtaagacttggcctcggcctgaagctctgggctcttgaccttctccatcaggtccttgccatagtcagtcacggtctggaagtactgagaaaccaggctctccacacatggctcctttgcctgtctccgaaccaaagctccttcaaggctgcagatggtgaggagtagcacagttgctgcgagcagcttcatgttggtaacagtggggagggcggcctagccagcgtctctgtccttggtgtctgtgcctccc

SEQ ID NO: 162521 - DNA, 416 bp, Homo Sapiens
  misc_feature (182)..(228): n is a, c, g, or t
gtctagtgtcgactggtgttttccctcgtgatgtttacagcttgctgtttgctgcccagccataacccactcagtgacagacgaacacagctaaggcctcgctgccagccttctgacggcgggcgagcacacggtctcttcccctgccccaactggccctctccaccaccaacttctctacnnnnnnnnnnnnnnnnnnnnnnnnnnnnnnnnnnnnnnnnnnnnnnnggctcttttctccccttgagaccctaatatcttgacttcattgccaaaaaacaacccattgagaactttcttcctactgatcccatctcttttcccttctttcctcctggttccggtcagttcagaggatttaacaatcacaagtgtcctgcaaaaatgcctgaacattattcttaggccctcgtgga

SEQ ID NO: 162522 - DNA, 799 bp, Homo Sapiens
caccctcctgtccccttttctccaccctgcaagctagttgcatttagctcacagagcctgggctgcgacttgaaagagtttaggcagcaacagagtgaccctgggggtgctcttgaccgacagccgcacccccggcgtctaggacctccgagcagggatgcatctggaggtctagggaagcacttccaccccctcctctcctcaatcctggcaggatggctactgctgcttcaagacagtgacgtttctctccggtcagctgtcaggagcgctgctgggtcttactggggatctggccagccttgggggcccttggagccctggcccagtggaagctcgtgcctgaggaacatggaggccacgctaatgagttacttccagagtcttcaagagtgccaactgggaccaggaccccagaccacagtcccccacaccgtcctggacctggattctgactgtggttccactgtacccctcaccttaatctctggttctaaccagacctgagcctagacttccactttttcccttacccctgtgagggcctgggaacactaggtgggcagggtttgagcccacaggacctgcacacaaacttccccacctcttggacttggggacaggatctgtgcctcaaaccagaccagctttgtagggatatgttccaagaacagagaagagtcttatggggaacggcggaggaagggaagtatgaatatttacctctgaccaaataatagaggtgccctggtccccaaagcactcgactcccgaacttccctccaaagccttacccata

SEQ ID NO: 162523 - DNA, 519 bp, Homo Sapiens
  misc_feature (25)..(25): n is a, c, g, or t
  misc_feature (31)..(31): n is a, c, g, or t
  misc_feature (48)..(48): n is a, c, g, or t
  misc_feature (96)..(96): n is a, c, g, or t
  misc_feature (118)..(118): n is a, c, g, or t
tcaattctttccctggtcactctgntccatncacagttcatgggcaanataatcatatatagctttcagcatgttcctggtagtcttttgagctgncattctaataaataatttgtanaaccatttgtctttgtagtgttccaaattaaaattttctttctccaacctgaggcacggccaaaaagatctggttattttttagcccaggaacgtgcttgttaatgagtatgtctggaggacagacctgctcattaggtgtgctgtcccctgtagcctcgtgagtcagcccagaggagggtacatgcgactgtggcctggcctcagtggtacccacacatcagcactaccacaagaaccaacactgagcctcggaagctagatcacaggttaggggtttctctagatgggggttctgaaatttgcagtgtctgctcctgggaggcagcaccagaaagggcactgaaatgtactagctggatgtgacccagtcttaataaacaggttttctaatccagaaaa

SEQ ID NO: 162524 - DNA, 437 bp, Homo Sapiens
aaagaggccaaccgctggggacacctggttttggcacctttatgaggcctcccagcagcacaggagctctaaggggcacgctctgcagttgagctatttgcagagctccatgatcgctcaaagccgagcacgcgcacgggtttgctactggcaccagcacaaggctttagacaggcacttcccacggctgagttctaggcatcccctttttgaaacgtgttctctccaccctgcaagggtggggtgagaaatctcactttcgaagggcttgcaaggaggaagagagtcggcgccttgcggattccccggccgcgcttcaaggttcacacgccgcgtggcagctcggatgcagcccggttccgaggcggtcggcggtcgagactggggcctcgaagccgaagaaagcgaagaacaaaacgggccgaaagctttatttt

SEQ ID NO: 162525 - DNA, 697 bp, Homo Sapiens
tttggtgagacatgaccagcatttaatgaaaaaagagaagaaactagaggcatcatacggagtacacagataagatacaacgtttgttccagttctatctatgtataaacaagacacaatataaaacctaacatccagtgagatttgattctaaagggttcacaattcagtctagtaacaacactaaaagttctgcagatgcagtaagagaactaggagagaaatgcaggaaaaaaaactgaatttatttattttaataagttattacctctccctttcacatcacatgtctatcctaaatctatacatttgcaatccaatgaacatcaccaactcaggaacatacctccttcttgtctttatctttgtcttcataagggctgctaggctgtttcgtagcagtctccgggctactaggccgttgtgtgctggtagtacctggttcactgaaaggcgcatctccctccccgcgtcgccctgaagcaggggaaggacttcgcccagccaaggcagttgtatgagttttagctgcagcacttcgagacctgcaggagttaattgaggacgtgggagaggaaggaaatcagctcaaagggagaacagaaaaccccctccccaactcccatccacctttcctaactggacaaccctcttccaaaaagcctttagtcgcacaactcaaatcattcactgaaat

SEQ ID NO: 162526 - DNA, 1057 bp, Homo Sapiens
ccatgcaatagagagcggcatgtttcccaggggtgtctttaactgccgcgtggcgcccgggtgtttaagccccgggcctgttaacccagcccgggggtccccaccccaacggtggcatccccccgccctgtgtccagttgccaggagttcacccggaccctaaggtccagccaaaccaggtcaccggctggccctaaccctcccagccaaaccttttggaaccagctttctttccactagacgagatccacgccaagctgctattaggaagcgttttattgaccagcagacaggaatattcatttagcagctcagcttcagaccctccttctcccacatccttttacacaggtgtgtaaagtccttttaatgcaaaaggatttccagagtctccagggacagaaccaggggcttccctgggccaaagtaatcccattccgatctccccactggtcagacaccatcaccccagcccacagtgaccgtgggccttagtcctgggcatcggctttcagagcggctttgtacttccccctcatctccttgggtaatggcaccaggctggggcagggcacctgcccttccacttcacagatgcactcccgcaggcagtactttcgagggccgaagttggctgggtgagaaagctgctttttctcctcctcctcttccctgagggtttcctcattcttccccaagatttttctgatgtgctccatgatctccttattgctcttggtctccacatccaccaggacctgctccccaggaatctggcgccctcgcccagctccccatgcgtgttgtaattcactgtcatgaccttcacggagtccttgaacaccacgttccctggctcagatattgcagggtgcggcggatggggaagcggcccttcatgggcatggcggcaacggtggcggggccgaccccacggccgcgagccgagcagcgacgagaaaggactagctagcacccgcgcggatctcacgcggcttctccccagagccaggtcctcgtgccgaattcaacacccaggcctcgtacctagccctat

SEQ ID NO: 162527 - DNA, 726 bp, Homo Sapiens
tggttgggtcttggcattttaataaacgttcaaagaaacaaaatttacttgtaggggacgtgacaaagaacagaacccaaagactgcctgccttctcggcagaccctagggagctgtggtgatgtgacagctgccacagcggctatcttccatggaaataacgtacgtcatcaacacaatatacaacaccccttccactcacctgaccccttgtcataagatgcagcactacacacgctctcaacactatgatagagcagactcttttaccttagtggcctgtctgattgcatgcatgtaaatggggggaggggagtcaaacaaatcaaggctatgcataaacagaaaacaaagcaatattcgtaaagctaggcaagcgagcgtaacattggagaaacataaggcttgaggcttattgattctttagatcacaaccgtttggattcgctttccttcttaaatatcggtgtaccattttggcttcaaaacaatctcttcttgcttctgcccctctctttgaggaaggcttgcttaactcagagatgtgatattagaacggccgccttggggcgccacgatgcgcttgctggctgagcgaaccccctcattcacttgggtgcctgacaggctaaatcccgactgatgaagattcctcacaggtgggttcgggcgagtaggagagccccgagcagagcctttgcggggtgcaccttttgtggggtgtgt

SEQ ID NO: 162528 - DNA, 357 bp, Homo Sapiens
taaggaatgaacctcttttgttggggaagggtggcattctgctgaccacagcactccaaccaaaagccaaaaaccaaagcaagacttactaacgcatatcaaataaattaaaggtacaaaatcgtgaatctcagttatcttaaatattccaatactatttacaaaattattcaaattctcacgccttccaactcaaaattagcaatctaaagtaatttccatatcctagatggaaaccctcatgctaaactgtctgattatgcatggttctaaatggtttcagtggcaaatacataacattgtactactgattaaactgaacttaaaagcatcaataccaccattgctgcacttaaa

SEQ ID NO: 162529 - DNA, 658 bp, Homo Sapiens
  misc_feature (484)..(526): n is a, c, g, or t
actgggaaatacaacttttattcatctaaattcagactttgctatggaaaatagtctctttccatactgaggaaaaaacaggttttgagatcaggtcgattcctctctttatttcacctctgaagaacaccccagctgagggggctgtgagtggtacctgggcagtgacggtggaagctccacatacctcctgggattaggaggcactgtttccagagtctgtgaggtcgtgaggatgtcacttatgctgtgctcctgtggctggttctcccctccatgggagtctttccccagcctcagctggttcctgcccagcctcaaccccaggcttgccttcagcacctcgctccaggcctggctgtgatgagcgcagagctgtacatagaatcccccagggggcggctggtatctaagcatctcaggcaggatgatgatgtaatcctctgaggaagcagaggactgactttgaacttcatctttgagnnnnnnnnnnnnnnnnnnnnnnnnnnnnnnnnnnnnnnnnnnnatgacagcttcttcctcagcgatatggataatctcctccttctcatttccaagtgtccttcaggccaggcaaatgtcatctgcaaggacttccctcgtgccgaattaccacccggcctcgatcctgccatcc

SEQ ID NO: 162530 - DNA, 936 bp, Homo Sapiens
  misc_feature (141)..(318): n is a, c, g, or t
  misc_feature (342)..(351): n is a, c, g, or t
  misc_feature (394)..(404): n is a, c, g, or t
attccactctttttttagtaggctagacacggctttcagagttgtgggaagtggggaaaatcaacccattcaaaaactactctagaaaatgtctttggcagaatagcaggtatccaagtaaaaaataggagggtcatttannnnnnnnnnnnnnnnnnnnnnnnnnnnnnnnnnnnnnnnnnnnnnnnnnnnnnnnnnnnnnnnnnnnnnnnnnnnnnnnnnnnnnnnnnnnnnnnnnnnnnnnnnnnnnnnnnnnnnnnnnnnnnnnnnnnnnnnnnnnnnnnnnnnnnnnnnnnnnnnnnnnnnnnnnnnnnnnnntaacaagagcaaaactccgtctcnnnnnnnnnngagggtcagtttgtagctttgtggtttttcaaaattcagatannnnnnnnnnngttccccttctacataaaaacctcagtcgcctctcctgagtggagatgggcagaggctctggcccctgctcctctggcttctcagcagctgctttcttattgctgcagcaaggcttgaagagatgtgtgtcaatgaggacttccccaaaacggcctttatagatgatcccacaacatatcttctgtcttttccagtaagtgagatctaaaaaggaaaaaactggtgttctgttagaaccagaagccatctctgtatctgagccgtcatctgactggttactgtaacaaggagattgagctggggaggcacttgaggtggtactgtgagcatcagaatcttccaaaagcagccgttccacgcgcaataatgtccccgaggtgcggagtgcacgccaggccagtccccctcaagcgctccctcctcctcaactgccttgtctagaaagatagtctcctgcagttctgcagttgctaccgctggccgggaaggtgtcggacgcgtgggtcgacgatatccggagaattccggacc

SEQ ID NO: 162531 - DNA, 954 bp, Homo Sapiens
  misc_feature (222)..(222): n is a, c, g, or t
atcggattccgacgcctgcggagctgagagcaatgaggccaattcgaagtggttggatgcgcactacgacccaatggccaatatccacaccttttctgcctgcctagcgctggcagatttacatggggatggggaatacaagctggtggtaggggaccttggccctggtgggcagcagtccccgcctgaaggtgctcaaaggagccactggatgatgaccgnaaagcccgcatatcctgactctgccagtctgctgctgtccaccattcctcatggaggcaacatgaagccccgggaccctcagctctggtcacttgcttcagagcccttgctgtctagtgtggtataagaactctcaggacctctacttccagagttcgagcctggcccgcaattggcctccaaagtcctgcgtggaagcaaggacgctttggaagccagtgccaacagagggaccgatatctgacccgcttaacgcctgacacggagatcgctgcgagacgcactccgggtaggacgcgcagaggacgcctttcgtcccatccagttcacgtcaggctttctgcaagctggtagctaagtgcacaatggaggcagtttgtaaaccaactacaagtccaactccatcaagcggcagaccagtcatcaccaccatgaccaccttgaacgaagaacctgggctgacgaggatgctgtgtcttgcctggtgctgggcaccgagaacaaggagctcctggtgcttgacccccgaggccttcaccattttagccagagatgagccttcccagcgtccccgtcttcctagaggtttctggccagtttgatgtgagcttccggcttgccgggggcctgccgtaatggaaacattctatattctgagaaggagactccaaggcaacccaaggtacctgcatcgagctgaagcgcccagctgtgggacttatccgggtacac

SEQ ID NO: 162532 - DNA, 300 bp, Homo Sapiens
gagttaataattacctaatattttcacatatctagctttttactaacccatggccagcctttttttcaagtaccccaacgtttttgccacatgcctaacgataccgttttccaaaggctcaaacacatccgttgtgtctaactgattctcctgttccgacctagaccgatcacttcctgacccggctgcacagctcttatctcgagcttttctctgctctcatccttgagactcactttgtctgtctcctttcttggattccctgtgtaaacgaaaaataaaatcctaaactctcaaaaa

SEQ ID NO: 162533 - DNA, 699 bp, Homo Sapiens
  misc_feature (113)..(183): n is a, c, g, or t
  misc_feature (287)..(326): n is a, c, g, or t
  misc_feature (550)..(565): n is a, c, g, or t
gagcctgcctttgtaccctttttaacttaaagaacagagccacaccggtattatatgtgtatagttatattgcgtttgcagactaaattgtcatgttgtgaaagtttgtgtgnnnnnnnnnnnnnnnnnnnnnnnnnnnnnnnnnnnnnnnnnnnnnnnnnnnnnnnnnnnnnnnnnnnnnnngtatgagagagaggttaaaaaggtttggtttacactgagtatatgttgtcaagtggcaaaagtccacatagctctcctgttttctgtatacgttcacagcctcnnnnnnnnnnnnnnnnnnnnnnnnnnnnnnnnnnnnnnnnacctccatcctgtgataagtacctcgaatggattcagctttactcctttgtaactcatctttacattttcagcatatttaaacaaaccaacaaaatgaaatactaatagtaaaaaggctgacccatgtggctttgcagtgctgttcgtccagaagcatggcacacgatgcttgtgcatgtggaaacttagcgactgtcaacatacattctcagggatttatccnnnnnnnnnnnnnnnngaatgagagcatttattgtactgtatatatattatagtatatgtctgaatattgaaaatataacattaactaatttataaaaaatattctatgtaatgcaaaatacttgaagctgcagtagcttggttttaaac

SEQ ID NO: 162534 - DNA, 723 bp, Homo Sapiens
ggtgtgtgtgtgttcttcgcaaatggttcctcagccccagtgctgggccctgaaataggcccagctccctgtatagttcccacagagctggccacaccataagtcaggggcaaactggaactgtgggaaggagctgcagccatgtacttccccttcagttagagcactgaagctggaggagcttctgtagcaagtaccgttctgttcgtatacgttgttgcctttactgtattagttttgtcacactgggaagggggaacagcttggggaaagattttgtgagggagtctccaggatggggccggctgagtgtgggtcagactcaccagcatggtggccttgggcacgctttggcagcagcacagcaggtacatgtcagccaggtactttctcaattcatggcatcttcttcgggagcatttttcatcactggccattgctggactgcagcaggagcccagcaggcagaggaagcagaggccagtccagcaggctcatggtccagccccgctacgggggccccaggacgctgccggcatcggatcctaagtcggggagcgggcgggagcgctggctttgtctgttccgggctagcggaatcgggcctctaggaatctagctctccgggacgttcccagggctgaccgcagggccagagacacccgcaaccgaacggctcccgcctcgtgccgaattcaccacccagcctcgtacctagcctga

SEQ ID NO: 162535 - DNA, 504 bp, Homo Sapiens
accagccggccctggagtggtgcgtggcggtgtacgccatctgcttcatcctagcggccatcgccatcctgctgaacctgggggagtgcaccaacgtgctacccatccccttccccagcttcctgtcggggctggccttgctgtctgtcctcctctatgccaccgcccttgttctctggcccctctaccagttcgatgagaagtatggcggccagcctcggcgctcgagagatgtaagctgcagccgcagccatgccatcctacgtgtgtgcctgggaccgccgactggctgtggccatacctgacggccatcaacctactggcgtatgtggctgacactggtgcactctgcccacctggtttttgtcaaggtctaagactctcccaagatgactcccgttccctctccaacctctttgttcttcttgtccgagttttctttatggagtacttctttctaccgcctttcctctgttttcctcttcctgtctaacgcggatcgtc

SEQ ID NO: 162536 - DNA, 478 bp, Homo Sapiens
  misc_feature (45)..(139): n is a, c, g, or t
  misc_feature (226)..(226): n is a, c, g, or t
  misc_feature (415)..(426): n is a, c, g, or t
caaacattacatattttttatttacttgtgtatggtgagccctgnnnnnnnnnnnnnnnnnnnnnnnnnnnnnnnnnnnnnnnnnnnnnnnnnnnnnnnnnnnnnnnnnnnnnnnnnnnnnnnnnnnnnnnnnnnnnnnaccctttcttcttgtcccaacaccttcttcccaaaccttctggcatcactcctcccagccagtctgccctgattgcccttcacttgnagttctgacattctccctcttcatcctcagtcttgacttggagatcgctgtttatctagaaacttagaattgcggtcttatgttccctggcctgtatgaccaggggctttgcaaacataatgactctatatcggctgcatttctccttccactttcccccgagtcacagacttttatccacttgttggnnnnnnnnnnnntctaaccttctctatttgtctttattttctggaaaccaaatgtttgacttaa

SEQ ID NO: 162537 - DNA, 488 bp, Homo Sapiens
gtcactgccccatgactccggcatcacatacctgggcatcaaggccaacgacacacaggagttcaacctcagcgcttactttgaaagggctgccgacttcattgaccaggctttggctcaaaagaatggccgggtgctcgtccactgccgggaaggttatagccgctccccaacgctagttatcgcctacctcatgatgcggcagaagatggacgtcaagtctgccctgagcatcgtgaggcagaaccgtgagatcggccccaacgatggcttcctggcccagctctgccagctcaatgacagactagccaaggaggggaagttgaaaccctagggcacccccaccgcctctgctcgagaggtccgtgggggaggccgtgggcaaaggtgtcccgagctgccatgtttaggaaacacactgtaccctgctcccagcatcacaaggcacttgtctacaagtgtgtcccaacacagtctgtgggcgtgac

SEQ ID NO: 162538 - DNA, 391 bp, Homo Sapiens
gttatacatctgcatttattatgagcagcaggtgggacacttccagcaacagtaaaaaaaagtaatttacaaaagcaggtttcagtgaagccatctggttgttacccttgggtgctcacacgtagatgccaacccagagcagcaggaagaggactccaaagcccatgaagagtgaggccactaaggagatgaggagctctttatagatatcacgagtgtacttggtagaggtgacctcgtaaacgaagaaccaggcggtgaagaacatgccaatggccaaaagcaccacggtcagatgggggaagacagctgggttcactgggctggtatatctgctcatggcctcgagctccattttgccccgcgaaggctaatccgccgctccgccccc

SEQ ID NO: 162539 - DNA, 703 bp, Homo Sapiens
tcatgcccacagactggcaaaagttctagaaacaaacaccatggtggtggaagcggttgcgttgcttcagtgatcacctagatttggtgtctttggtttcagttttctggttactgaagaaatcccggatctttacaacttcagctgcacacaaatgtccaaaagattttgtgtaccattctggcatgtggccccttaagtcaactctgcacatgtaggtgagtttggattttcctggcccacagggttcaatcaaatacctggacaagagcacattaaccctcacacccaccacaggtgcgcgatcgtgatccacagaggttagtaaaagggcacaggctcctttgggtaaattagtcctccaggttcttaaaacaacgtagtctcgagcaggatgaggtgccatactgttttggacatactggtaaatttcagtttggctgtccagaatttcgatcacttttgaatccaacaggtctacatcccagaggtgctgttctttaagtaggcgctttaagatttcctctggcacagcagggacttcaatgactgacctccaaagcctcagagggggtccttcgctcaccttctctataggacagctcagcctgctcgcgaagatggagtagctgaccctgcctttaaacttctctttgacttcgtttaaacagtccatcacacacagtcctatgtgggcgtcgaa

SEQ ID NO: 162540 - DNA, 499 bp, Homo Sapiens
  misc_feature (251)..(425): n is a, c, g, or t
acctgttgaagccaaccaggcactgtgctcccttctgttatgggaagtgcaagatgcagtaatttattcttctgaggaagtgtcttgtcattgcccagaccagtgaacttctaaaaatttactgacatggaaaagctcctgaattcttcctaagttttacctcccacccactggatcagatatgtcttaccaaggctttgaacatcctagcctcgtggagaagaagcctcttctcctggttctgttagcannnnnnnnnnnnnnnnnnnnnnnnnnnnnnnnnnnnnnnnnnnnnnnnnnnnnnnnnnnnnnnnnnnnnnnnnnnnnnnnnnnnnnnnnnnnnnnnnnnnnnnnnnnnnnnnnnnnnnnnnnnnnnnnnnnnnnnnnnnnnnnnnnnnnnnnnnnnnnnnnnnnnnnnnnnnnnnagtgagcaatgcaaagtgatagcttatctttacaggtgcagtcacccaggcccaccacacgcaaatgcatatct

SEQ ID NO: 162541 - DNA, 418 bp, Homo Sapiens
gtcaagctgttctttatttcagggagagggcaggggaggggctcagtctttcttggcagcagctttcctcatggcggccagtacgttgctcagctcctcccgcttcctcttggcgcggatgtgcgtccccacccttttcttgataaatttggagggcccgtttgtccttggagaccttcagtagctccatgggcgcgccgttcgtacggggcaaagccacacacctcccgaatcatgtcccgcacgaacttggtgtgtttggtcagacgcccgcggcgtcggctgtgcctgggcttgctcacgttcttggtcactttgtggcccttgttgaggcccacggccatagggtagcgtagggccatggctgctgctctccagagacggccgtggcggaagggctggcgccgcgcggaacccc

SEQ ID NO: 162542 - DNA, 1494 bp, Homo Sapiens
  misc_feature (366)..(395): n is a, c, g, or t
  misc_feature (790)..(837): n is a, c, g, or t
gtttaaaggggtggggcgcggctttccccaaatttagggggtgcacattgaggtaggggtgggccctggccaggttaattatttaggcgggtttaggggcgttcgcggcccaggggctatttggtttgaaaggagtagggctgatgggtttcgataataaactagtatggggataaggggtgtaggtgtgggagggaggggaagagtctaacttagaatatggtctacctgatttccaagaggctaaggcagtgtccataagtttggggacctggggatgggacagttctgagtataaaaatgcccttaacaatctgatgtcagcacgcttagaggctgtgtggggacaaaggcagcaatgtttgnnnnnnnnnnnnnnnnnnnnnnnnnnnnnnaattgctcttggtccttgagcagcacgttactggttttaaaggctttatggtaaagttgtattgcttttcatttttctggagatgtgccctctctcctcccaccaggatccctatcactcgatttggtcaaatcttgagtttagcctagtgagagtcaagcaccaatagtttctacctaagcgagtttggagtggcccctgcagtcctacccctcctccctctcttcctctcttgacattgacctttggtgggcagtgacgctcataagggactgttgggttcaaggccagtggccctgaggaaactactgttggttcattagataggttagtcgtttgactttggtggtcgccatcttgtaaacatcatggcagaaatgatcaagccaccagcnnnnnnnnnnnnnnnnnnnnnnnnnnnnnnnnnnnnnnnnnnnnnnnnacgatcatacagagatggtccagctgccaggactactttggcaggcagcgtgctacaggacgaaaatgtaagagaagtctattaaggctggacagcccagggttatttatactctctcagccccaagtcccccggactaaagacctaaaggctgattgactcattcctgattgatttaatggaaagtctcccaccccatcatcatttgccagagtaccaggcaccgatgaaaggggacgagtaaagaactgccacttcctaatgtatagtaggccttatcacactgtaagtggtccaagcccatagggatgctctttttggttcctggaatttccagttggatgtgacagagatctttcagtataggtgtaagtcaagagtagcctctgggttgaggtgggctgggagattaacatcttacctggggtccttcagataaacctgtcggtttttcctgtctcatacaggcccatcttaagttttgatgttgaattaaaactacttctacccccttagttataaaaaaggccacaaggagcatttatgtggatatctggaagtgagatagttattccattcccaggaaaagaaaaataaggctaagttacaaactaaatctatatgcataaagttattatatactgcttttggactact

SEQ ID NO: 162543 - DNA, 120 bp, Homo Sapiens
ggcggggcgaggcgaggcgaggcacagcgcatcgctttggaagccgcggcaacgcctttcaaagccccattcgtatgcacagagccttattcccttctgtcgtcttctcgcagccgtata

SEQ ID NO: 162544 - DNA, 519 bp, Homo Sapiens
  misc_feature (247)..(284): n is a, c, g, or t
taagggaattatctcccgtgttcaaaaaataaatatatctcgctgagtctacatatgtcaaatcacactaagcactgagaagaaattcagtccctttggagatcgtgagcacgcgttggaaagaagcatgatccagacaatgcgaacgaggtgagtgtggattccacctgtgtcatgccccagaggttccatccctcttcaggtggagctccttatcgatttttaggagagagaaagaagctcacgnnnnnnnnnnnnnnnnnnnnnnnnnnnnnnnnnnnnnntgcgcgcgcgcggggaagtctgaaaggcacatgaagtggaccataaggtgtatggcacattcactgataaaacatcccctattccctcccaagaaagcggagatactttaatcaagtcaaagaccagagaagacagggtgctcctgcttacagctcagcaacatgaacatctctgaatatgaaagccattttttgtttgcgtccccctcccgcgcctcctctccctgccgatgcc

SEQ ID NO: 162545 - DNA, 196 bp, Homo Sapiens
tttagataagacatctttattacttaatctttaaaacagtcacttgcctattcaattctgaaactgtttgttttctttccctcccccgcactcccgctctgatacacaaacttgttgtaaaaataatgcagaaacatatacgtcaatctaagtctctgaaatatggccaactctacctcgccgtatatccaacatt

SEQ ID NO: 162546 - DNA, 770 bp, Homo Sapiens
gacggcgctgtacctgcagtgctgcttttcttgcctagactctaggtaactatccgagctccaggtccccacaacatactcaaaggaacggagagaaccgggacccccctgcggggacccggaactgatctgacaggatggcatctgatgcactttgacatagtgattgcaggccatgctggaagctccctatataaaaagaagagtcgtagtcgagatcgggatcggtatagacggagaaatagtcggagccgaagtccaggtcggcagtgtcgtcaccgtagccgtagctgggatcgtcgacatggtagtgagtcgcgaagtcgggaccatcgtcgtgaggatcgtgtgcattacaggagtcctccacttgcccactggggagccagttgagtaatctgagtcctgaggagcgtgatgcccgcacagttttctgtatgcagttagctgcccgaattcggcctcgagatctggaggactttttctctgctgtaggcaaggttcgcgatgtacgtatcatttcagatcggaactcacgtcgttctaagggcattgcctacgtggacattctgtgaaatccagtctgtgccactggccattgggctgactgggcagcggttgctgggagtgcctatcattgtacaggcttcacaggcagagacaaaccgactggcagccatgggcaacaacctgcaacagggcacatggtggaccaatgcgcctctatgtagagtaccctgcactttcaatatcactgaagacatgctccg

SEQ ID NO: 162547 - DNA, 890 bp, Homo Sapiens
  misc_feature (45)..(45): n is a, c, g, or t
gatttttttagggaagggcggaagggcggcgccccaccacagaanctactctcttataatggcggggctcacccgggtgcatcccgccctctgacgggaatgctcctttaacccccaggtttctgggccccatgttgaaggattgtagggcccaccaaccagcacttttgaccaggccgtgtctgtctgggcgaattcggtgttccgtttgctcaaggactcgagcggtttgttattgctgaggctctctaaatgcttctcttctaagggtttggggaagtcttgttttctgctccagtttatggctcgtctctctctgaattgccttcattttttggagttcaagcttcttcagcttccttcttgattcgtgacagatttcttctctttttagccttttgcttgtattttggattgcatcagctggagttgttgtttctgtctgacttcagtttctgactggcttccacctagccgtctgggcaccaggtgaaccggtcttagctctgttctgctcacttccacttctccaggtttggccagctcctgctccgcaattctttgtatctcatttctcacggtttatatttggtgctatcaaggtgtatgtcacattgtgcgcctctggcccgcgtgcacgacgctctcccgcgaagggcccttaggggctgcctccaaaccctctctctggtcttccacggggctcagctccccttgccgcccagaagggtcctggggatcccgggtcgggcgggaggcagagggaggctgcacgagccacggagttcaccactctattgcgggtgttcatggttcacagcccgcgggtcccgggccgccgtcgctgcgggagggatgcggctgggacgcttagcgagtctcaagatccc

SEQ ID NO: 162548 - DNA, 493 bp, Homo Sapiens; identical to SEQ ID NO: 139020

SEQ ID NO: 162549 - DNA, 494 bp, Homo Sapiens
acgccagcgtgccatggatgtcaagctggatcctgccctccaggataagtgcctgattgatctgggaaaatggtgcagtgagaaaacagagactggacaggagctggagtgccttcaggaccatctggatgacttggtggtggagtgtagagatatagttggcaacctcactgagttagaatcagaggatattcaaatagaagccttgctgatgagagcctgtgagcccataattcagaacttctgccacgatgtggcagataaccagatagactctggggacctgatggagtgtctgatacagaacaaacgccagaaggacatgaacgagaagtgtgccatcggagttacccacttccagctggtgcagatgaaggattttcggttttcttgcaagtttaaaatggcctgcccggaggacgtgttgaagctttgccccaacataaaaaagaaggtggacgtggtgatctgcctgagcacgacatatagctagg

SEQ ID NO: 162550 - DNA, 672 bp, Homo Sapiens
  misc_feature (317)..(333): n is a, c, g, or t
  misc_feature (356)..(491): n is a, c, g, or t
  misc_feature (598)..(598): n is a, c, g, or t
  misc_feature (638)..(638): n is a, c, g, or t
aaaagggacattattcacattttattaaaccaaatattagaaaattgctgtcatttaaaaatatctgcaagcaatttgccatatcaataaagaaatgtctacagattcaagtctgaaagagaagaaggtaagtgatcagtaacccttacagacatggaaaccaaggaagcctcattcctgtgctgagaatattctagtagctcctgctgctgccacatggcagctgggaataccagtagtctcagcactcggtcagtaccgtgcaagctcccttgggaatgctgataaatcctggcatgatacagcagtatatatgnnnnnnnnnnnnnnnnngagacaagagtcttgctctgtcnnnnnnnnnnnnnnnnnnnnnnnnnnnnnnnnnnnnnnnnnnnnnnnnnnnnnnnnnnnnnnnnnnnnnnnnnnnnnnnnnnnnnnnnnnnnnnnnnnnnnnnnnnnnnnnnnnnnnnnnnnnnnnnnnnnnnnnnaggactatagttttaaggcaagtttataacctttggctcatttgagcctcacagcacttggtaggtagtgctattatccccattttatagatggcactgagaagtanaaagtgactagccctggtcacacaattgatatggactganactgccgctttctggctatcacgggccttgacac

SEQ ID NO: 162551 - DNA, 592 bp, Homo Sapiens
  misc_feature (177)..(225): n is a, c, g, or t
  misc_feature (256)..(365): n is a, c, g, or t
acttgtagataccaaattttaataaatgtattcttctttgcatctaataaatacagagggaagagttcttactgcattaattacctaccaatacatataatgaatgttaattctaataacgtcccaggcatgctcccaaaggaatgctttgtaacaaagcgtcagtcttatgctttnnnnnnnnnnnnnnnnnnnnnnnnnnnnnnnnnnnnnnnnnnnnnnnnnggatctaaagcatacacacaagtgtgcacannnnnnnnnnnnnnnnnnnnnnnnnnnnnnnnnnnnnnnnnnnnnnnnnnnnnnnnnnnnnnnnnnnnnnnnnnnnnnnnnnnnnnnnnnnnnnnnnnnnnnnnnnnnnnatgcatcactgtgcattcttatgattttaatattctgtacatttattattgatttaaaatgcattttacctttttctttaatagatgttggaatttctgatgaatctgcagtcaggtaagatttcatagatttaaaaaattatgttaactaagaaaatatagatggaagaaactaatatctgttgagtgttgtattctgggctagacatcctaatatgttctatgca

SEQ ID NO: 162552 - DNA, 774 bp, Homo Sapiens
  misc_feature (156)..(167): n is a, c, g, or t
  misc_feature (359)..(375): n is a, c, g, or t
ccttaaatagagataaccagtaaacaattttcagaacttggaagtttaaaaacgtgcatataaaaatgggcattatatactttttattgaatgtggattgactgcagtctgctaagaaaaatggggtgtgggagctgaagaaaaaggaagttgtcnnnnnnnnnnnnaaggcttgcttgtgaaaggaacagttgtaaaaacaaaattgcttgaagcagggtcagcttagtgcttcacagtttgactgcttctctaagaggagcccttcctgcgcacgtgcattcaaaaatcacaaaaaagtacaaagacaaacacctaaaacacactgcgtcaagtgcagcaccgactttggtcaaatnnnnnnnnnnnnnnnnnttaataattgctaagcttttctacatgatataagcaggtattgcatattttcatatatctgggggaaaataaaggaagactccaaataaattgtaaaatgcagcaacatccaaaatactgatattctaagcatctacagatctcagaatagcactgccaccgaccgtacaggacaataaagactactcctatctgcggaacaactagctttctatttagttctagatgttgaaactgacgatggctgacataaaagtcacatttacaaaaagtgtctccaaatgcttgactagggaaaaacccctttcaatagaggagcatgtgcaacaattccacaaataatcgctatccagggcaaggcacattgatatggaatttttgttttcgtgcaaattaagg

SEQ ID NO: 162553 - DNA, 205 bp, Homo Sapiens
gcgttctctagtatctttattatccattcccgggggcactcctggctgcccaactcaggggtgcagatgtctccctgcaccatgccaggtgtggtgcagaatgggaggcagggggatggagcagagagaggcctggactgcctgtggcctttgtcgagtcactgcccttctgtcgtcttctcgcagccgtatagtagtagtaggc

SEQ ID NO: 162554 - DNA, 211 bp, Homo Sapiens; identical to SEQ ID NO: 140127

SEQ ID NO: 162555 - DNA, 175 bp, Homo Sapiens
ttttttgatgcaaaaatagtttattatgatatagtttatgtaaagttaggtaatatttacaaaataaaaatgatcagctacatccagggaatctagcatgtcacacaaaggaataaatattctgacaaagtaacacttcaattgtagtgaatcgttgatcacaaactaactttgt

SEQ ID NO: 162556 - DNA, 252 bp, Homo Sapiens
caggggagcggaatattggtttcttttacttgttgttttcagttttctctgccattcatgtttcttttttgtgttcagtgtttcaaatacaatttgtatttaaggattttaaaataccaaactgtaactgagtacagtggatcgttttctgttaggatgttaatattatacaatgaaatctataaagtgttgtcaatttgattattgacacatataacatgtttacaaataaactgtggtattgatcaagtt

SEQ ID NO: 162557 - DNA, 646 bp, Homo Sapiens
gcggccgctccaacatcagaatggtaactgtgctgccttctccagcgtgggcagtaactgatcaaactggagaaggcagcacagttgccaggcttatgtgagacagacaggatggatggtgcggtcaccagtgtaaccatcaaatcggagatcgtgccagtttcacttcagtccgccacatgccagacccacttccaggctaaatagattacctgagctgggattgggaagcaattgataaccatttgggcaaaccagaacaaggggttaagattcctgggccaaatattacggtgaccggtattaaatccgagtaaatcaggaagaccagtggtattggctcacaatttaggatgagcttctcttgtccacccacaacagttagaggggagaaatgattgagaaggctcttcctgtacagctggtatccttccttagtggccaaaatggaactaggccagctggacctggaccgagctctgggaattggccaaactgtttccaggggttgatttaatggtttttccgagaggttttccaccccaacaggcaaggcccctcttgttcatgaatgaaggaccccacctgtccccgttcggaatttttggccccgagggaaatttcccttaaggggtcgcttttaatt

SEQ ID NO: 162558 - DNA, 566 bp, Homo Sapiens
ttttttttacaattactaatttatttggctttttatggttcagttaagagtatcttagttagtctagcacatggcagcccgtcaaacttcacagggtagctgtcagaattttgactgatgtacaagagctccttgctcatgtttgcccttcctttcagtggagtgcacacaggtaagacagcttgttggtaatttttatttaatgctcccaggatctgtggctacacttttattgaaagttctgacaataaaatttcactccctgaaatttccaaggtttctgctgtgagcacatccccacttaagatcttcctctgggattagacaactcttgagggtcttttctgatgccttctgatcttggagacagctgtttagtattttggatatggttttattttgttttgttttttgttagctttactggaaaggcatctaagatcctataataattggtagagcaagactcctgtctgaatccctgaatcctgttgtgttcggagtcctggtgtttgccagccatctgggtggcagcaggccctggagtgagcaacgcacccttaaga

SEQ ID NO: 162559 - DNA, 852 bp, Homo Sapiens
  misc_feature (47)..(55): n is a, c, g, or t
gtatttgacgacccagtgtttgcggcaaagcaaatggccacgggccnnnnnnnnnttaattttggggtttcggaactcttcctttgggacgcccctggtggaaaaaatccccggaaagggcgcctcgggggatttccattttgtgaatttgtttccaaaaacgttcggggtgggcccccgggacctatttttataggggtttggaaatcccaaacccctatttgcaggtcccgggggttttcctatagaaaaacaaggtaataggccatgtttcattgtgccctaggggggccccgccccgcccaaagaaaagggttgtagaaaaggtttttagaggggccgaaggcggggggccatgggaaaatggggggcggtaggggttggagggcaacatttaggggctaacatgaattcaaaggcaagtatacagtttattgatgctagaacaaatcaggacatcaagacatgattgccatcctaaaatcttaattttcagagagcaacatttccgccaggttggcgtgaagacactcagattctaccagtttttgaggtgttccatacttaagtagtgtaggcactgctgttactttcaagttttttctgaagtcattatttggatctttccaataaggcttttctcctacttggcagtagatgaacacacatccttcactaatgtgcttcagcccctctcgtacgactggttcagcattgtgctgttccacggcccggtggaactcctcgaagccggacacgctcacctcctcatagcgggccattggcacgacgtgcagccgctactggaggagtgcacgtccggtcgccgcggttgggtcccgcgtaggcccc

SEQ ID NO: 162560 - DNA, 311 bp, Homo Sapiens
  misc_feature (32)..(32): n is a, c, g, or t
aagtccatttattttacaatttaatgtaaatntagaatatctaactatttatacaaacttaactttaaaaaataagccacttgctattttacatacaaaacattcaaaagaaaattcttcatttagagtgactgaggcttcacattccagcccagagaatggcagcgaggagggtggcggcgggaagcagaggccttgggtggtccgtgctggccgccaccttccggagtctggggttgggtgggggatgctgaggggggtgccgtgagctgctccgctgccagctcagaaacatcgacccgcttggcctg

SEQ ID NO: 162561 - DNA, 403 bp, Homo Sapiens
tttgacttggataaagactttttaattttaactttgttctaagactgcttgtcatgatttcaaattagaaaattatataattgcaaacagcttcacttctcctgttcaacagaggcttaaggccagatgtccaaacttgtctcaataaggaggtgatattttactaaagtttcccacgtgcacatactgactaaatacagagctaggcccagtttgtattgtactctgaacttaatgcaaagtctccttggtgattttcgcaaagtccgtggatttgggtcagaggcacatttcatacataacagcccttataaacgtttgccctgcctccacattttacagtatcttaaaacagtacatttctttcaaagaattttatctctatgagtcagtactccaactt

SEQ ID NO: 162562 - DNA, 395 bp, Homo Sapiens
tattgttacattgttgtaatgtggctggaaatccagaagtcatacaaattgtcaggattggttgatacagtggcttaatgctatcaccaaggaccaactctccattccctttgatgttggtggcatcttcagacttgctgcaaaggtgactgtagcagtttgaggtgtcactgtctgaggaagagggactgttttttcctccatcatttttaggattgaagaaccttttctcacagttctcttttggaggctgtccagggggcttctactcacatctcatggccattcctcggccgcagcgagggctggcttccccctgccgcagtgctgcgtgccgtcgccgcacgtccggggcagctggggccgggcgccgcggcctccgcagatggaggtac

SEQ ID NO: 162563 - DNA, 102 bp, Homo Sapiens
ctttatgttcagagtgacttttgattctgattctttatgttttgtatggagcggcacttttatctgtgttttagcagaactgttcctctgtatcctttacgg

SEQ ID NO: 162564 - DNA, 303 bp, Homo Sapiens
cgtgaaaaatatttaaaatatcttttaatgcgttataacatcctggagagaaatcaaatcaatgtgtttcaatgttacaacatagatttctcctcccctcgcggataaagcactaatttatttaatttggttcagagcactgaatattccaagctacagcctcgtgggtaagagatagcattatcttaaacagtgttcggatttaacaaaggtcaacgtcttgtgcagtttacatagcatctactctcagtagcttttgcttcttgagctctacgtggctcctcagaagctgttaggcttaac

SEQ ID NO: 162565 - DNA, 156 bp, Homo Sapiens
acaattgcttgaagccctttactttccccttctccacgtctttggctgactttcattcattcttcaggctttgtcacgtctatcacttattttctgactacttccctgaccccaatcctggattagttgccccttctgtcgtcttctcgcagccgt

SEQ ID NO: 162566 - DNA, 246 bp, Homo Sapiens
acaaaaaacaattgttatttgtgtacttttaaaacctcacagtaatattttcacactaccttcttggctgaaagttcacactcggaattccagagcagtccatggccaggcccactgggctccccttgctctctccttggctttggtaaccactggccccagggactcagcctgctttcctatccatcccctcagtagctgtcaccatgcaggttaccccttctgtcgtcttctcgcagccgtata

SEQ ID NO: 162567 - DNA, 319 bp, Homo Sapiens
tgagctcaaagagagttctcattttccctattcaaactaatacccatgccgtgttttttaccttggatttaaagtcaccttaggttggggcaacagattctcactcatgtttaagatcttgttatttcagcttcataagatcaaagaggagtctttcccttttctcttttaccctcaggattctcatcccttacagctgactcttccaggcaatttccatagatctgcagtcctgcctctgccacagtctctctgttgtccccacatctacccaacttcctgtactgttgcccttctgtcgtcttctcgcagccgtata

SEQ ID NO: 162568 - DNA, 363 bp, Homo Sapiens
ggatacttttgaactggtgaggtgtgctcacaatgaggtttcctcacactgaggtttcctctaaaagttatttttttactttcttctgttagcaaagccgttgccgctacagattgaatgcatctgggccatttgtgggttactgggttaaggatttttgataggaaggctacgggttatcagtggcctctgtgctttcgggatatgcccttgtttacactgacaacaaagtggtattggagtgttatagggttatggagaataccttcaattatcaattataggttttaaatttaccctggcttttaaaggaatagggcacacttttttttaactacttgtatatttctctgtctttgacat

SEQ ID NO: 162569 - DNA, 490 bp, Homo Sapiens
tttgaaatggattctacaaacatcttttattacacagacctcttgaccagactcctcatcttaaagaaaacacaagtcgtggtttgtatgtggggctgacgaccacatttttcaggactcggtgaaatcatttccatctgtgtgagcgtgtcgacttctctagggcaatcaaccttcatgcgatctccagtactttttctttttaacccgctgttgctacgggcacacaatgctgctaaaaacaaaagcaaagcataccttccttgtcggtgtaaggatcctctgccacccaccccttattaattgggagacaaggcaagagtgaaaagcagatcagagtgggagccagggagcagcattccgcttcatggcaggatctatgctgaagcaggtagctgctatttgcagggctcatcaacagcgctcggcgagtctcgggggactgcgggggactaggggacctgctgggcctagcatgggctgtcagtca

SEQ ID NO: 162570 - DNA, 205 bp, Homo Sapiens; identical to SEQ ID NO: 143915

SEQ ID NO: 162571 - DNA, 196 bp, Homo Sapiens
gtccaattctttctacaaacaagcatcaaggaaaaggcagaactgtactcctgaggcttctgtaacagtcgacccataaattttctagagtagagtttcttaccgggtgtgcaggcatgctgaagagttcccgaaaaatactcatgtctggaagctactcccatagattttagatgtattatgcagctaggtattg

SEQ ID NO: 162572 - DNA, 720 bp, Homo Sapiens
tacgtgagccgtgttgtggtgatagctttattgggatcacacacgtatcgaccttggtttcctgagtagcaaatcgaccatttcctcaggttattccaagttcttccgagatgcgtcagaagcattctctggaggcagttgttccaaatggtgaagagtactagatggatcccattctcacaggattcttgcttctattgcagaagagttactttccaggacttcaaaggtttagagaagctgcttgattcgtgtggcttgcagaggtgcatgggctttggagtcacgaagttaatcctgagtcccagcccagcctcttagtagctgtgaggctttgcacaacttccttgtcttggaaagttatataaacctcatcttagatttcttgtgggatttttgtactgatcttcaatgttctggtctttccctttttttcctatggaggtcaggttcttgaaggtttcctgcatcacatccctgtagagattcttctgggaaggatccagcaaagcccactcctcctgggtgaagctgacagccacatcctcaaaggccactgaatccatttcccggcttccggggtgtcccgacatcctccctgcgaatcccccagtacatgcaggtcacaggagggccccgctgcggcagagcctcctgaaccgccgagagtgaaggagaagcgcagggctacatgaccgaacacgcacgtgcgggcacgag

SEQ ID NO: 162573 - DNA, 1136 bp, Homo Sapiens
cacttttctgagtgtctcctggacatgcctcatttgcaccagctcctgaagtcagccctgccccgcactgtctggactctggagatgcctgccggttgcctccacgtcaagagacaggtttcttatggcctgggtaagctgtcagctttggtttaagctcctccagatggggctgaaatgcacttgtaggaagggtgtccacgtggggtacagcacctgctccaaggatctatcagggaactcgtgccctgtttgatttgcttccatcactgcagctgtgaggttaccaggcagggctttccacaggcctggcaggctgtctgccacccggtgcacatcattctggagatctcccagcagatgttcctgctgttcctgttgcacctcaacctcattgatcactgcagcaaggtggccaggttttgaagctgactggtccatcctgaggttcctggtggctgtcaccaggatctgcaggctcagggattgccatggaatcgtggtgctcgcagttggggcccgtgtagccagggcagcacctccaggccaaagaggtcagcaccttctgcttgacctggtacactggcttgtgggccatgcggtacatgactttgactttctggcagtctggagctccctgcggacacggctgctgcgagtggatgaggaatttctctgttttgcaaagagctagtaaggtgaccagcttggacattgggtaggggcaccagttactttaagtccccacctggcaaagaaggtccttagttcctccacctccagctctctcctccgtattctggaggtgacccagctgcggtgggggcgtgggagatgtcaggagaccactgggttggttcttcctgcacctagcccaggcttcgttaggactccagctccctgtcagtcctgcccatatcccagtcaggagacaatatccaaaccaaccccttacttcaccagtgctccaggggaggcccacagttcttcccttgagactgaaatgctaccaaggaagcctccgtgtcaggtcccttccttctgggcttcacttttccatctgagagctgggtgcaaaggatgggctgctttctgatgggttaatcgagacgaggttcccaggggcctctcagcac

SEQ ID NO: 162574 - DNA, 550 bp, Homo Sapiens
  misc_feature (172)..(219): n is a, c, g, or t
aattttcacaatacattttatttaaactaatatgttcacaatgttaaaatttcaacatgtaatcactataaaaactactagtgagatatttcacattacttttttcatgtaagcctttgaaatctggtgtgtattttatatttactgtacatcctgatttggaataaccacnnnnnnnnnnnnnnnnnnnnnnnnnnnnnnnnnnnnnnnnnnnnnnnngcagttctagaacaaaggagtccctttcaaactattttgaagtcatcgtctataaggcaatatgaaagctgatctgaatgatttctccttttccaggaaaggaaacaaaaatgaaatcatgttagggctgcatattttatgggtcccaggacaaatagacatagtctgaaagaatgatctcagtcagaaactcagaatgaatcatatgaattaaacattggacaatgtccaatgctcagcatgtgtttttggtttatactaagaacatattatgccaccaaatacagatatttactattatacttagtgtaggaggtatattgagacattg

SEQ ID NO: 162575 - DNA, 1259 bp, Homo Sapiens
  misc_feature (85)..(85): n is a, c, g, or t
tgtttacgagctctaaggagatgtgtcgcgttgtgtgccgagcgatcagtagtgtttgggactgtgtggtctggaggcgaggttntgttgatctagtgcgtcagtcgatgtcttatcgcggttgtcacttggactgatgatgtacgtgagctatggctaagtctgcccttgagtagctgcactccaggatatcgttgtacgctgtatactgtcgtggcagcatgatagcttcctctgagcttttatgctcccggcgtttgtcgacagtcatcatcaacagtggcgttacagtcgggctgtttagagtagttccagcgctggccactatgtcacaaggatgttggtacggagactgtcttgggctttgggcccttattcctctgggttgagggttcagtgtgggcccgttagcctgcacgagtctgtgcaccgactggcagcagttgttggggctccaccaggcatccagggaggcagggaagggctcaaggcttccagacctcccacacactcggtgtcccgtggggaatgcgcaggctagaagcgttgcagcatcattcgtgaacggccggtcctcccggcccggagacttctccgtaggtcagtcagcccaccacggggtggcccagggcactgcagtgcacgcgcagctggtgtgtccggcccgtgagcggcttcagcagcactttggagacaggatcgcctgcgtacagcccgtgttccagaaccacgagatctgtgaggcttggctttgggttctcacaaccctgcgagccctcgatgcacatggtgtgggcccggccctccgtgctgttcctgccaatggcatggctgatggttacccggctctcctggatgtgcccccgcagcaatgccaggtaagccttggtcacgcgccgctccttgaagcacctgtaccgcgctgccggcggctgccttgtttagggccacgcacagcgccccgctggtggagaaatccagctggtggcagaacctgaacccgtagcaggtgtcagggtcggccagctcgggaaagcggtaccgcagctgcttctgcagggtcagagtctcccgccacgccttgctgtcaatgcgaacgtcccagtgcttgttgaccaccaggaagtcgcggctccggtacacgatggacaggttctccacgctgcctggctccatggccggcctgctgccgggccgtgcagtccaggcccccgatgccgtgcccggcgccggctccacctaagcgcccgggcactgca

SEQ ID NO: 162576 - DNA, 693 bp, Homo Sapiens
cggtgggctggcggtgtgcgccccccggggtcgtcttgtggtgtgcccctgttctctttggctcgggtttgcggtgtggcgctggtgtggtgtcgtgtgtgttctgtgctttgtgttgaaagttttaagaacctgttgtcttattgtgccaatgtagtgtcccacttcttcacctaggagtggctgcattagatgaaggaagagggccctggtttcatgaagaagggaattagcacccatttcagacttcctacactgaagagggggttccagtatggtggagggggctcagggaacactctggatggaccatgctctgtgggctctgcctggcttccctgacagaggagcaggaactgctggcatcacctgtccgattccctccatgtgttctgggattggaaatgaactaattagagctaatgttggaaataaacttacttattggataggcagccagatcccccgctgttctcactcatcttctttctctttctgaagctggagagcagaagcccccatctttgaaaagctcctgagtgcaacttaattaccaccatggcagggtgagggaacatttgcatcgtcagctgcctctgcatagctgtttgagaaattcaggcccaaatcatgcagcctatccaataaacttacttattggaatcctaaacctccgaccgtaccagcctgctt

SEQ ID NO: 162577 - DNA, 465 bp, Homo Sapiens
  misc_feature (268)..(306): n is a, c, g, or t
tttgctttgttataattttattcctcaaactggaagcatcatatagtaattgctcttagagcaagggagttaccctgggatgtatgtcttaatattctggaggtgtgcttttaaaggatagtttctaaatctttcttgttagagccaggttttgccctgaatgcagtcccttgaacaagaccttcagagtgtggtatggatgtagaccaaaacaatcactaagaggttaagtactgttccagctatacctaacatagtcaagatagannnnnnnnnnnnnnnnnnnnnnnnnnnnnnnnnnnnnnngctgtagtgatgacagaagtaccagttttcccagaaaatgtcttcattgttcattaaatggaagtggatcatcataaaagtcttcatactcagagtcttcatgttgagtagcctaatgaggaagaagtgatgaggttggtcttgctgtctcaggctggc

SEQ ID NO: 162578 - DNA, 248 bp, Homo Sapiens; identical to SEQ ID NO: 145933

SEQ ID NO: 162579 - DNA, 559 bp, Homo Sapiens
acagcagcagcggccgcagcagcagcagaagcaagcgccgcagctgagaccggcggccgacggccagccctcagggggcggtcacaagtcagcgcccaagcaagtcaagcgacagcgctcgtcttcgcccgaactgatgcgctgcaaacgccggctcaacttcagcggctttggctacagcctgccgcagcagcagccggccgccgtggcgcgccgcaacgagcgcgagcgcaaccgcgtcaagttggtcaacctgggctttgccacccttcgggagcacgtccccaacggcgcggccaacaagaagatgagtaaggtggagacactgcgctcggcggtcgagtacatccgcgcgctgcagcagctgctggacgagcatgacgcggtgagcgccgccttccaggcaggcgtcctgtcgcccaccatctcccccaactactccaacgacttgaactccatggccggctcgccggtctcatcctactcgtcggacgagggctcttacgacccgctcagccccgaggagcaggagcttctcgacttcaccaactggttctga

SEQ ID NO: 162580 - DNA, 969 bp, Homo Sapiens
ccccaccccccacccataggctaggtacgaggctgggtggtgaatcgggccgagggaggacacgagagcagtcactcccgtgctgcctttttcacctctgacacgagcccagacaccatgcaacgcaagtgaattccgaaggagagggaaggagatggtggattacgtgcgccaactacatggaaggcattgagggacgccatggttcttaccctgcacgtggagcccggtgtacctgcgtgccgctgatccctgccgcttgcccctcaggagccagacacgtttgaggacatcatcaacgacgttgagaagataatctatgcctggggtgacgcactggcaacagcccctacttcttcgcctacttccccactgccagctcgtacccggccatgcttgcggacatgctgtgcggggccattggctgccactcggcttctcctggcgtcgtgccagcccacggcatgcacccgagctggagactgtgatgatggactggctcgggaagatgctgcgaactaccaaaggcatttttgcaatgataacacgctggcagaaggcgggacggcagtgatccagggaagtgccagtgaagccaccctggtggccctgctggccgctcggaccaaagtgatccatcggctgcaggcagcgtccccagagctcacacaggccgctatcatggagaagctggtggcttactcatccgatcaggcacactcctcagtggaaagagctgggttaattggtggagtgaaattaaaagccatcccctcagatggcaacttcgccatgcgtgcgtctgccctgcaggaagccctggagagagacaaagcggctggcctgattcctttctttatggttgccaccctggggaccacaacatgctgtcctttgacaatctcttagaagtcggtcctatctgcaacaaagaagaccatatggctgcacgttgatgcagctacgcag

SEQ ID NO: 162581 - DNA, 371 bp, Homo Sapiens
actttattttgacaaatttaagatagaaaaatatcataatgtgaatatagcagttgctctttttgtaacatggtttgggatgtgcagtgaaacttgaaaggacttgctttacaggtggtccctcttctggctgggtttcagttaattctgaattatattccagccattgcatttgcttgaaagaatattggacacagtaaaaaaaagaacaggtttggcattcaataataaatattataaagcaatgaaccaaaacaacttttaaaataattactgaaagcaaacttcagacttcatgattaaagctaagaactcatattttcaaaatagctttaacagtttctatcaatatataatacaataataggaca

SEQ ID NO: 162582 - DNA, 512 bp, Homo Sapiens
  misc_feature (364)..(438): n is a, c, g, or t
  misc_feature (487)..(487): n is a, c, g, or t
tccccacagttagaataacctttattctgatccactataaagccagatgatttttaggtggcagtagctggcattgaagagttcttggcttcaagcggctgttgagtctttttggtcttgttttaactccctaattaaataaataagatccaacgtgtttctgttgtattcactcctggacatatagaaattcacttcacacccacctaaaatacgagcagaacttctgaggcccaatgaacccatctactatttgattttgttatcccttctggagcgtgtctctaccaagagcttcacaaagcaatctagtcattgctctttcttgtactaaaaccagagtacccatcctgtaacttccatnnnnnnnnnnnnnnnnnnnnnnnnnnnnnnnnnnnnnnnnnnnnnnnnnnnnnnnnnnnnnnnnnnnnnnnnnnngaacaattctagttctgacttttaaagctatatagaataaagttgcttncttgtgtgggccaaatcattctccc

SEQ ID NO: 162583 - DNA, 443 bp, Homo Sapiens
tttgtagagacgagattttactctaagtttgtgtggtggtagtaggaggtgcgaatgtggggtgacacatcatcagaataagagtcccggggctcagaatgggaacaacttcaccaaaataaacttccttagcaaaatgagaagcaagacgttccccctccagaatcagggaccacaggttctgggaggaaggctcctttgtaggattgggaagggaactgggcagacttggtttatgtcttctaacccctgatcctcaatcccttaccttagtaatactggactttaatgactggtagtgagctgtaaaaccaagtcaacaaatgtccatctatccctgtgacatggccatgggatggctcttctgaccattgggggccaggccaggccaggccaggcttagggtagcaaggaccaggccaaaggggcagggcctcctttgg

SEQ ID NO: 162584 - DNA, 585 bp, Homo Sapiens
  misc_feature (24)..(24): n is a, c, g, or t
  misc_feature (176)..(237): n is a, c, g, or t
caagcagtcccctgccctcccctngaggtcccctcgagctctaggggccctctttgaaagcacagatggggggcggcccagaggaaggccgggggacggagaggagcggcaggtgagcaaagaaacgttcattcaactcctgggctcctaccactgcctacactcctaacctgagnnnnnnnnnnnnnnnnnnnnnnnnnnnnnnnnnnnnnnnnnnnnnnnnnnnnnnnnnnnnnnacccccatcaagacccctggagttcgaagggaccaggggagaggaaaaagaggagcagacacctctggaaaaacccaacccaaaggctgaaggagggaaggagaggaaggcagacaggcagccattttaagagagaagagccagacaatggcagctccccagcagtgggggcccgggactgaggggagcccaaggctgtggcccgctcaccgcagccgccacccacccccaggaccacgctcgccccagccccctccccactcagctgtgtacctgaggggtccgggcgagcggctgccccccgccgccgctgctcccggggctcatgggcgcgtggtggctcctttg

SEQ ID NO: 162585 - DNA, 301 bp, Homo Sapiens
catgttagtgacagtgatattttaatatttttttaagccagtaataatttttctccattacagggctaagttctgtggctggtggtcagtttgtaaatttatacttaaagagacttaatagtaacttcatttatttgtctggttatgttattgtatatataaatatttatgttttcatatattgcatataaaaatttgtgttacatgttactctcagaacagattgctgtaagacaattgtaaaaaaacatgtctttcgtctgtttctcaaagcaatgtaaataaaacctatggactgtcc

SEQ ID NO: 162586 - DNA, 579 bp, Homo Sapiens
gggttttttaccacatttatgtttattaaaaactgacataaacaaacacaacctgtacaaaaaatatcccaaatctcatatgactttgaaatcttgagagacattatcgcctaggaccccctcttcctctgccacggccacgtcctcttcctcttcctcttcctctgcctcttcctgcaacagcttcccttttcttagatttcaccttaggttcaacatccacaagtagtgtatccagaggtaaactgtctggtagaataaaataccgaatgttatttcctcgaatactcagcgtttccagctgtacaggttctctgttcttcagggtcattttcacagctttaagatgtgtattcatgctgacatccacacctgtgattgttccatggacctgtgttccgttcttcaattcaatggttacagtttcatgactcaatttcatcaaaaatctcacgagcttcatcctagcggcgccgtcaccctctgggtccgacagcacacagaatccttcaaccgaacactgaccgactgcagtatgaatggccggaagcgcctactcccggataacacgttcgcgag

SEQ ID NO: 162587 - DNA, 855 bp, Homo Sapiens
  misc_feature (208)..(211): n is a, c, g, or t
  misc_feature (213)..(232): n is a, c, g, or t
  misc_feature (273)..(310): n is a, c, g, or t
  misc_feature (399)..(399): n is a, c, g, or t
ccaaaaaaccgcttccggttttcccccccgggggcgtttttttattggggggggaaattcccaagcccttagttcatggcccagggtttttccttgggaaaccaggtattggcccagggtcccctttcccttacggggcccggcgggccccaaaggaatggtttttagaaaggtttttcgagggccgaaggcggccggacattttttnnnntnnnnnnnnnnnnnnnnnnnngggtttgtctaagggcttttattttaaccttattcatcatnnnnnnnnnnnnnnnnnnnnnnnnnnnnnnnnnnnnnncctgatcaactaaaaatgaaactgcccagtagaaatgcttagctctcactgtggtaatttcgtgaatgtggaggaaactactaaaactntgatatactaaatagacagctctgtcccacatttatgtttattaaagactgacataaacaaacacaacctgtacaaaaaatatcccaaatctcatatgactttgaaatcttgagagacattatcgcctaggaccccctcttcctctgccacggccacgtcctcttcctcttcctcttcctctgcctcttcctgcaacagcttcccttttcttagatttcaccttaggttcaacatccacaagtagtgtatccagaggtaaactgtctgtgattgttccatggacctgtgttccgttcttcaattcaatggttacagtttcatgactcaatttcatcaaaaatctcacgagcttcatcctagcggcgccgtcaccctctgggtccgacagcacacagaatccttcaaccgaacactgaccgactgcagtatgaatggccggaagcgcctactccccc

SEQ ID NO: 162588 - DNA, 1013 bp, Homo Sapiens
  misc_feature (16)..(16): n is a, c, g, or t
ctttttttcctccatnacgatttataccactccactctccatcctcgctggttacgggtccggaattcccgggatatcgtcgacccacgcgtccggttcgggctccgtctcaggggctgaagtttgtgaggtgtagtattgagtcctgtttgagctattgttctctttttcctgaaaaatggcactgtcaaagagggagctggatgagctgaaaccatggatagagaagacagtgaagagggtcctgggtttctcagagcctacggtggtcacagcagcattgaactgtgtggggaagggcatggacaagaagaaggcagccgatcatctgaaaccttttcttgatgattctactctccgatttgtggacaaactgtttgaggctgtggaggaaggccgaagctctaggcattccaagtctagcagtgacaggagcagaaaacgagagctaaaggaggtgtttggtgatgactctgagatctctaaagaatcatcaggagtaaagaagcgacgaataccccgttttgaggaggtggaagaagagccagaggtgatccctgggcctccatcatagagccctggcatgctgactaagctccagatcaaacagatgatggaggcagcaacacgacaaatcgaggagaggaaaaaacagctgagcttcattagcccccctacacctcaggcaaagactcctttcttcttcccaccagaacgacttcctattggcaacactatttcgtcctcccaggtttgccacttttctgaatgatgcccctttgaaaggccaagcaaaccacctgaactgcaaactccaatcccagccccagcctggcacttgaaaccaggactcattcggcaatgcccaaatgggtggggccctgggctaattctccctggcccttggcgcttttggcccccccaataagggggacgtttaaaagaaccaatcgaatacctcaacacctctggattccctggcataaccccaaggggccccccgttccaatccc

SEQ ID NO: 162589 - DNA, 1082 bp, Homo Sapiens
  misc_feature (136)..(199): n is a, c, g, or t
  misc_feature (431)..(477): n is a, c, g, or t
gggcttccgcccgtctcccaacttgaaccgctcccgcggcggccgaggcgggctgcgactcccagtggctggctttcactttgtcgctgtagtcctctctcatcgttcggtgatgtgcagacacttccctgcgggnnnnnnnnnnnnnnnnnnnnnnnnnnnnnnnnnnnnnnnnnnnnnnnnnnnnnnnnnnnnnnnnctgctgctcccgcatcttgcgctcccgctcccgcttcctttctaactgctccaagcggtccctttctctcctggaatgctcccttgccatctcccttctcttctgtctttcccattcccggcgagctttatcctgttcttctcgatgccgtttccgacgttcgtgctctctttctttttctttcactctagcatgcttccccccttctgctgaatggctacgatgcctacgnnnnnnnnnnnnnnnnnnnnnnnnnnnnnnnnnnnnnnnnnnnnnnngagacatttgctggggtggtttgatggccaaagaatcatcttcttctcctctgtcttccatagagtcttctcttctatacggggagttccttattgtgatctccatgcggtgatctctcagctccccctcctcaagggaatcccgcttggaatcccggtcatcagaattttttaagcggttttatgtctgctttctcctgttgttccttcgttggtttcttttcctgaagaatttcatgtaaagttttcactttccaagagtccttttcatcacccatttgagttaaaacacttgagaccggggagatgctccgagatgtgctcgcgaacaaggccacctgacccgggcactgggctatttcctcgggttcagtcccgcacacttgaggttcagcctggcagacgttggctccagacagcgtttggacccgccgcctccaccacccaaagtcccgtgcgggatgagactgtccgcggaagcgagggtgtcgctcgcccccgggcccgggtccgccccgctccgaggcctgctcggaagaaagacctcggtgcgcagttctcctcgcgctcccacacctggtccgcccagtcggaactccccccta

SEQ ID NO: 162590 - DNA, 1016 bp, Homo Sapiens
  misc_feature (705)..(705): n is a, c, g, or t
aaggtagcgaggcctgggtggcgatttcggcacgaggccgggcccatcccgccgcagcggcccggggccgagcaggggctaggcggggagggagcggcgcccagcggggcccggagcgtggccagaatggtgctggaaggaaaccctgaagtggggtccccccgaacctcagacctccagcaccgggggaacaagggctcttgcgttctctcctctcccggtgaagatgcgcagccaggcgaggagcccatcaagtatggtgaactcatcgtcctgggctacaatggttgtctggcaagtggggacaagggccgccggcgaagccgcctggcactgagccgccggtcgcacgccaacggggtgaagccagacgtcatgcaccacatctccacgccgctcgtctccaaggcactgagtaaccgtggtcagcacagcatctcgtatacactgtcccggagccactcggtcatagtggagtatacacatgatagcgacacagacatgttccagattggccgctccacagagaacatgattgacttcgtggtaacagacacgtcccctggaggaggggctgccgagggcccttctgcccagagcaccatctcccgctatgcctgccgcatcctctgtgaccgccggccacccctatactgcccgcatctatgccgctggcttcgatgcctctagcaacatccttccttnggagagcgagcgggccaaaatgccggaacccccaaatggccctggatggcatgggactggaccaccccatgggaggtccttgggtgaaggcaacccgggcaagggcggggcttcctcccgaaggaactccaaccccccgggtgtggtctggagagggcaagaatacttctgggcccttggggtgggaaaggggggtaccaccaattgttggggggaacgagcccgccttctcaagccccacaacagaacgcgcagggccacaaacctttggtgtggcacaaaaacacacacagtcccacaaacgcggcggt

SEQ ID NO: 162591 - DNA, 1062 bp, Homo Sapiens
gggagtgggtcaagaccggtggggacagggcccctccggggccgggggcccccgcgcctcttccaccgcccttgttgctctgcggggcttcgattagcaaccggccccgcgattcgagcggccggcgcctcccggagtgacttgtgagcctggctccgcgccccttcttccctgccgcggcgcctcgctccttcagcgccaactgcttctcgcacttgaagcgctttctgggggcgcaggtagcagcccgttctcgaacatgttgcccgagtcagggtgcagggtccagaaggagcccttgccgggcttgtcgggcgagcggggcaccttcaggaaacagtcgttgaaggagagcgagtggcggatggagttctgccagcgctgctggttctgccggtagaaggggaagaggtccatgatccactggtagatctcgctcagcgtcagcatcttgttggggctctgctggatggccatggtgatgagcgagatgtacgagtagggcggctttgcgtgcgtgtagctgcgcctgtaggtcttggggtcgcgggcgcggctcaggcccgcctgcccgtacatggggctcatggagttcatgttggcgtagggggccaggccgcccatggccccggccgcctgccaccccgagcgggctcaggctgggactcaagtgcggccccatgcccgccaccgccggcacgccccggccgagccagcaccatgcccgccataggcgcccagcagccgggggacatccccgccagggacgggctcatgccagcgcccacgtacgacgacatgttcatggagcccgcgctcatgttgcccgagccgctgcccatggcggccgccgacatgctcatgtacgtgttcatgccgttcatccccaggccggccgttcatgttgctcacggaggagtagccctcgggctctgcatagtagctgctccagtcggacggctcgtgcccttccatcttcacctcgtgccgaattaaacaccaggcctcgtacctacctatgtttgtcccttacccgctttgtggtttggtggtgagtcgtgt

SEQ ID NO: 162592 - DNA, 584 bp, Homo Sapiens
cgttacgtgtatcgggcaacggagcttagaggagattccacgtctaggacagctgcgcttcttctttcagctgttcgttcaaggctatgccctgcaactgcaccagttacaggtaacccgcgggggcatcgcgtcctggggatgggagtgggcaccggaacagagaggctagaggtgagaagacgttggacagaaagtgaaggctgcaggaactcagctggggacccactgaggctatggtcataaactggaaatcagtagggagaatgggcaaagtgcagacagagccctttgagctgagataaacaggacgaggaagggcttaaatcaggacggcaccagtaagggggggatctggacgccggacttacagtgagcagaggttgaggagggagctgtcttgggaagagagtggcagatgcaaatgtgtaagctaacagatattatggaatcactaattctgggctgatattggctaccacagacttcttccaaacgaaataacttcaggaggattatagaaacctcttgtatttgcaaggtactcccctgttaggcatacacgctcgcgaggaccgctatgt

SEQ ID NO: 162593 - DNA, 491 bp, Homo Sapiens; identical to SEQ ID NO: 151130

SEQ ID NO: 162594 - DNA, 1175 bp, Homo Sapiens
  misc_feature (1054)..(1055): n is a, c, g, or t
  misc_feature (1124)..(1124): n is a, c, g, or t
gccgaggcggaagcgcccgcagcccggtaccggctcctcctgggctccctctagcgccttccccccggcccgactccgctggtcagcgccaagtgacttacgcccccgaccctgagcccggaccgctaggcgaggaggatcagatctccgctcgagaatctgaaggtgccctggtcctggaggagttccgtcccagcccgcggtctcccggtactgtcgggccccggccctctggagcttcaggaggcggccgtcaggacccctcggtcccatgtccatgggggcaccgcggtccctcctcctggccctggctgctggcctggccgttgcccgtccgcccaacatcgtgctgatctttgccgacgacctcggctatggggacctgggctgctatgggcaccccagctctaccactcccaacctggaccagctggcggcgggagggctgcggttcacagacttctacgtgcctgtgtctctgtgcacaccctctagggccgccctcctgaccggccggctcccggttcggatgggcatgtaccctggcgtcctggtgcccagctcccgggggggcctgcccctggaggaggtgaccgtggccgaagtcctggctgcccgaggctacctcacaggaatggccggcaagtggcaccttggggtggggcctgagggggccttcctgcccccccatcagggcttccatcgattttctaggcatcccgtactcccacgaccagggcccctgccagaacctgacctgcttcccgccggccactccttgcgacggtggctgtgaccagggcctggtccccatcccactgttggccaacctgtccgtggaggcgcagcccccctggctgcccggactagaggcccgctacatggctttcgcccatgacctcatggccgacgcccagcgccaggatcgccccttcttcctgtactatgcctctcaccacacccactaccctcagttcagtgggcagagctttgcagagcgttcaggccgcgggccatttggggactccctgatggagctgaatgcagctgtggnngaccctgatgacagccatagggggacctggggctgccttgaagagacgctggtcatcttcactgcagancatggacctgagaccatgcgtatgtcccgagggcggctgctccgggcctct

SEQ ID NO: 162595 - DNA, 819 bp, Homo Sapiens
ccagccccagagggatctcagctgtcgctcggggcccgacctatctcggtccatctaagggtccgaggcacagccccgccaagaggccacaagtgttagctgcttccgcgggaagggtgagggctaccggggcacagccaataccaccaccgcgggcgtaccttgccagcgttgggacggccgcaaatcccgcatcagcaccgatttacgccagaaaaatacgcgtgcaagtgaggtgggggggcgggcgttgggacgtgctgctgcgggtgagacgggaggaggggtagtcacgggcttagggctggaggctggcgggctagggctgagtggagcgcctgcttagagaccttcgggagaacttctgctggaacctcgacggctcagaggcgccctggtgcttcacactgcggcccggcacgcgcgtgggcttttgctaccagatccggcgttgtacagacgacgtgcggccccagggtgaggcccaagcttgggggctacagagccggggctggaagcctggaaccggagggccggtgcgaggtctcggcctgatggctgcccagcaccggccgccagactgctaccacggcgcgggggagcaggtaccgcggcacggtcagcaagactcgcaagggtgtccagtgccagcgctgttccgtgagagccgcacagctgagtgagtcctggtggtcccggcccgcagggcctaccctgggctggatgaatggtgttggacacaagcctgcaaatggttgagaataccatgcacgattgccccgacccgctggtaaatacttcgaatggtggcaatgcgga

SEQ ID NO: 162596 - DNA, 929 bp, Homo Sapiens
  misc_feature (329)..(329): n is a, c, g, or t
gaagattaacccagattagcccagttctcccaaggcttttggaaagaaaggaggagaaaaatgttcttcccaggagccgaattttccaagaaagaaaggttgggcaaggggatttccaaacaggagggggtaaggggctcccagtccctggccggtagggaaagggactttcagggtcccagctcctgtgcagaggggagggtccacgaggacagtccttgtagacaggtcggtgggacaagggccaggaccatctgcaggatgctgtccccgtggctcctcacagaggccaccttccaggactactctctgactagacacctcctctnccagggcactagggagccatggaggaccatcggcagggctggcatggtcggttcggtgatcagaatgacccacgagcaggtgcttttgcccccctgtccagcgtccagcacacagcatgaacttggtcaccttctgagggtgaacttgcgcacacacgtcattggaaataacatggaggtccacacactgaagtttctttggggtcaagaactcctctggttcaatgctgccccagcctgaggcgtagcaggtggtccccagtgctggctcctgggtgggcaggtccatgaccttcacagcatccgtgagctcggcaggctctgacaggcggagcagcatgaggtcgtggctggagtcatcacctggcttcctgatgcagtgggcagctgtgaggacccactgggggtgcaccagaacaccgccgcagactgccctgccacgagaggccacaagcacctgccagggttgggaatgcttctcgcactcccagcctcccacaatccgagacaggatgaggggtgcagcaccaatccacgtcacggacagggtgaggaagacaaccgggacccacatggtgacacagctctccgggtgcaggt

SEQ ID NO: 162597 - DNA, 423 bp, Homo Sapiens
gacctttattctcgaagctcaaacttgatttccaggtacagcaggcctctgtaacttttcttggcagtgaagtcatgaagtctcctgtcctctaaagctacagaaatttaacctggaagcaagcagtaggcactacgcacagcacagagggaatcctggggtgtacgctgtggctcccacctgtccgccaggtcattgtgacgcaaacgctatggccacgtggaacaccttcccccggtcaccctgggaggggtcgctccggcgggcgtctgctggagggtagaagcggggaagggaggcagcggcggcgcccaggcggcggtaggtagccgggcggcgagggcgcccgcaccccccggccgctgcgctgcgctgcggtgcgcacgggctccgccggttgctattccggctggtggcggccgc

SEQ ID NO: 162598 - DNA, 421 bp, Homo Sapiens; identical to SEQ ID NO: 152325

SEQ ID NO: 162599 - DNA, 363 bp, Homo Sapiens
tttagcatcactggtttattccgtttcatccagggcagctgttttaaaaacccgcacacaggacagtggctgtctctgccgcacgtgatctacataacgccatgcatagatcatcagcacgaggcaggtaagggctgcagctgagtcaggatccactcaggcttacgtggtctggtcctcagcagacccttcctagaagacacgaaaacacattccgccttccaagtttctaaaccagaaacacctgcgttttgaaacaggtggtcaggtactaaacggagagggtgtaccacgtgggaggggccttggcatgtctaggcaccgggaagactgtgctccaaattaggatgggccctggctggc

SEQ ID NO: 162600 - DNA, 140 bp, Homo Sapiens
aaattttgttgctacagttagcagtgggtcagaaaacacttcaaagttcaaaagaaacttgatgtagatttaacttttttcccggtacttcctagttagctcaaggcaatgctattactgaatttcatgtacttgaattt

SEQ ID NO: 162601 - DNA, 300 bp, Homo Sapiens
gttaaaaaaattagtattcacttctgtgtcttgagcccacagatataagcagtatataatcagaaagttataaataaactcagattatatagggaaaggtgtgctcctaaaaacgacacatacattaattaaaaggatgcatctaaaattatgaccaaactatctttagaaggcagaaatgtaaaattatacctttaaaaatgaagacatcatttatatacttcaaaaataaaatgtgatatagcagagatgaatgatcgctataggattgtattggtttaagagaacacgatttctaaa

SEQ ID NO: 162602 - DNA, 419 bp, Homo Sapiens
cctccatctaaattgcgagggtactgtgaactttacgtattttacctactgaaacccgtttaaactcaaaaggtccgcacttggagttcgttgtctcattaggcagtgcactgaagtttagtggacactatatcctgagatttcacacagatgccaagaaaggcggaaatggagcacacatttagtgcattaaaggacctaggataacttcgtttccttcatttgaatagtacctgctatgcatcagataatgtccatacttaatctatgacgtatttattattcctaactttatagatgaagtattcggggttcagagaagttacttcaacatacagtacttcagaatgctgataaaaggcacagtttaaagccagggttgtctgactccaaagctccatgcccttgcccctgtgaaa

SEQ ID NO: 162603 - DNA, 195 bp, Homo Sapiens; identical to SEQ ID NO: 152611

SEQ ID NO: 162604 - DNA, 329 bp, Homo Sapiens
agtttgttatgagagaattatgctttgtcaagccaactataaggcagctttctacaacagttctgcaaaatgtttccaccacattgagcaaagctgacactagacactagctacacgtgggaataggaagatgggccaggctcagagccgccgcaaaggatgaagtccactcagatttgaggcaatcctggggcaaagcactgagcaaagcaacttctctggtaatctcctcctcagccattctctacccaggatttcagaacacagaacagaagaaactgcaaaagccctgcaggatatatcacagctgttaacattctgactttaaa

SEQ ID NO: 162605 - DNA, 356 bp, Homo Sapiens
gcggccgcgcggaggggcccctgtggatgccgcgtctcggccgccgggccccgcagtcctgcaagccgcgcgtcgcgagatccgcgctttaaaagccaaactccccgaaagggtcagccccgaaggaacatgatccagaaagacgcagcttcttaaaaattccttttgatgtagaaactcagagttgacaggaccttaaaagtcaccccacccagctgccactctcttgattgtcctctgcagcatcacttccaagtaatgacctgtctgctgtgtgagcacctctcatcacaggatactcactaccctgcacccaggcaggcaggatgtcctgtcactgcagatttcaactatta

SEQ ID NO: 162606 - DNA, 416 bp, Homo Sapiens
tgacacagagaaaatatcctacaatgaacaagccagagggacctggtagaggactataaaattgtggaagcaaaattgctgagaatgtcaaatgatattacagggatcctccctggcatttagctgaaggaagcaactcttgttttctaatttgctgggtcattggccatttagttttaggttaatataattctctgatccttttagggccatccaggttatgcactagtacattcctacattcaattgaaataaattgagggacggcaagtgtgttggaaagaacaccgacttcattgagaaggtaaagtatttgagtcctggccctgacgcttaatttggccagactttcatcttctcccagcctcaagttttacctacctcacaaggttgttgtgaggatctaaaaatacacg

SEQ ID NO: 162607 - DNA, 216 bp, Homo Sapiens
atttctccctttagttctttcacgtttgctttatgtattttgaatttgttatgaggcatgtacacatttataattgttatatcttactggcaaatggcattttttttattatgaaatattcttcttcatctcaaaatatactttttatcttataatatatttagcctaacattaatatagccactccaacttttttatgattagtgccaatagtca

SEQ ID NO: 162608 - DNA, 152 bp, Homo Sapiens
tggctttgagggcgcgacgcttccaggcgctctccgcggctctgtcccgcggaccggtggagcctgggtgacggcgcctgggccggaggaggggagatgtttggggtccctggccaggatgaatcagcgtaaccgtcccgtcaccctcgggg

SEQ ID NO: 162609 - DNA, 259 bp, Homo Sapiens
aaatttagtagctgccaaactaatttttttaacttttcctttaaaatcaattgtctactgcacctttttattttctttttaatatggacagggagtctcattgtgtttatcatatcaattaatattacagtacatccttggtaatacaaaattgtacaccttcatcaaataaattaggataaattaaaccaataaattatgcaaagtcttcagaacaatagacaacaacaaaaattcacaattgaaattgcctctagct

SEQ ID NO: 162610 - DNA, 104 bp, Homo Sapiens
cttccgaaagattcccccaacattaccattccccaccttccgttgaatttttttggctctcattttgaatttttcaagagctcatgttctttgtcttcattaaa

SEQ ID NO: 162611 - DNA, 605 bp, Homo Sapiens
  misc_feature (113)..(246): n is a, c, g, or t
tttttgcctgagatcaggtctcactggagtacagtggtgtcgtttgggttcactgcaacctcttacctcccctccaacttggcctcctgggtagctaagactacaggtacacnnnnnnnnnnnnnnnnnnnnnnnnnnnnnnnnnnnnnnnnnnnnnnnnnnnnnnnnnnnnnnnnnnnnnnnnnnnnnnnnnnnnnnnnnnnnnnnnnnnnnnnnnnnnnnnnnnnnnnnnnnnnnnnnnnnnnntcacccaccacgcccagccagagtaagccttttgtgtgtttatcagatcaaccaacactacaatctaggtggtactgttcccattttacagaagaggaaacagccacagaaaggtaattgctcaaggctgcagagttaagtgcttgacctggattcaaatccaggcagtccagcttcagaacactgctgctgtgcgctcgggatggtggggctgggcccaggcccgctgggtatacatgatctttcacttgttaactagggaaaaacactagtcaccagtgtggtacaaacttgtacttaggtggattcttcaaattgtcaagattagtttttataaattaaaatagactgaaaaagga

SEQ ID NO: 162612 - DNA, 602 bp, Homo Sapiens
  misc_feature (360)..(493): n is a, c, g, or t
tcatttttctgtctattttaatttataaaaactaatcttgacaatttgaagaatccacctaagtacaagtttgtaccacactggtgactagtgtttttccctagttaacaagtgaaagatcatgtatacccagcgggcctgggcccagccccaccatcccgagcgcacagcagcagtgttctgtagctggactgcctggatttgaatccaggtctagcacttaactctgcagccttgagcaattacctttctgtggctgtttcctcttctgtaaaatgggaacagtaccacctagattgtagtgttggttgatctgataaacacacaaaaggcttactctggctgggcgtggtgggtgannnnnnnnnnnnnnnnnnnnnnnnnnnnnnnnnnnnnnnnnnnnnnnnnnnnnnnnnnnnnnnnnnnnnnnnnnnnnnnnnnnnnnnnnnnnnnnnnnnnnnnnnnnnnnnnnnnnnnnnnnnnnnnnnnnnnngtgtacctgtagtcttagctacccaggaggccaagttggaggggaggtaagaggttgcagtgaacccaaacgacaccactgtactccagtgagacctgatctcaggcaa

SEQ ID NO: 162613 - DNA, 602 bp, Homo Sapiens
  misc_feature (110)..(243): n is a, c, g, or t
ttgtctgtgatcaggtctcactggagtacagtggtgtcgtttgggttcactgcaacctcttacctcccctccaacttggcctcctgggtagctaagactacaggtacacnnnnnnnnnnnnnnnnnnnnnnnnnnnnnnnnnnnnnnnnnnnnnnnnnnnnnnnnnnnnnnnnnnnnnnnnnnnnnnnnnnnnnnnnnnnnnnnnnnnnnnnnnnnnnnnnnnnnnnnnnnnnnnnnnnnnnntcacccaccacgcccagccagagtaagccttttgtgtgtttatcagatcaaccaacactacaatctaggtggtactgttcccattttacagaagaggaaacagccacagaaaggtaattgctcaaggctgcagagttaagtgctagacctggattcaaatccaggcagtccagctacagaacactgctgctgtgcgctcgggatggtggggctgggcccaggcccgctgggtatacatgatctttcacttgttaactagggaaaaacactagtcaccagtgtggtacaaacttgtacttaggtggattcttcaaattgtcaagattagtttttataaattaaaataaactgaaaaatga

SEQ ID NO: 162614 - DNA, 207 bp, Homo Sapiens; identical to SEQ ID NO: 153190

SEQ ID NO: 162615 - DNA, 439 bp, Homo Sapiens
  misc_feature (214)..(226): n is a, c, g, or t
ttttttgataagtacaaaattttattgctgaagacagcctgctgaatcagttgattcacatgccttatttctgtaggtaaggaaattaaatttcctaaaagtgatataatttgcccatggtctttcccaaagtcaagagcacagcaaatgtcttctagttgcttgctttgctttccttgtcagcctttatattagaaggaaacataattgagcnnnnnnnnnnnnnaaatcaatctgtaaatgcctttttctcttggaaaaagtgcaaaggagaatttttaaacctcctcttcaggctcaagaatatgaattcaccatgcattccattggtacatctgggacccagtgagacaatgaataattcatgtaaacaactgtaatttttcactgccatctcttgtttacctgatagagatgcacgggtaatgctccttgattg

SEQ ID NO: 162616 - DNA, 356 bp, Homo Sapiens
ttttctatacatttccatttattttaaatcaaagtagtgtcaacaaatctacattacctatagaatataaagagaagtatgtgaaactttataaacttttaagttatactttcctgacagacaaccccatacctgctctcatgtcatctacagcactcattttcagcaatacttgtttaattagtccagcttctgtgctagtctgtacattccgaacactttttcatagaatggctgtaaacatgctccctatttctgcttgacatgttacatcacagtgctctaaaagctctgtcatgcatgttatactctcagcatcctggataataaagttcatctccagttcaaattctctg

SEQ ID NO: 162617 - DNA, 150 bp, Homo Sapiens
ccatttacatttttccacaagcattgtccactttattctgtaaccttttcaactaccattttgaaatttgcttttatccatgtggttgtttgtgatgaactacaggttgctgactttcttccccttctgtcgtcttctcgcagccgtata

SEQ ID NO: 162618 - DNA, 309 bp, Homo Sapiens; identical to SEQ ID NO: 101309

SEQ ID NO: 162619 - DNA, 253 bp, Homo Sapiens
actaactcagagatgcttctttgtgaaaatggaattgttagtatagagtaacatctgtcagttcttttagatcttatcatagggaataatagtttgatttttcacaaaaaggatctggaataaaggatttgcagggtgtatgttgagaagaggcagttgatgtatgcaccagctagaaatctgagacttaactatgtggtcttgaatcttttcccatgctattcttcctgctacaagtgacttttttcaagta

SEQ ID NO: 162620 - DNA, 221 bp, Homo Sapiens; identical to SEQ ID NO: 154340

SEQ ID NO: 162621 - DNA, 205 bp, Homo Sapiens
ccactctagtcccaaaaccaattcgttatgatgaaactcaaccttaaagattacaggctctctgtaacatataatcctaacccatctcccttcttctaagtgtttttgtattttctctgtatatctagaatccacccacctcttactgtctgtagccactctcatcgattcatcacactctccctcctgacatagagtgccggtc

SEQ ID NO: 162622 - DNA, 253 bp, Homo Sapiens; identical to SEQ ID NO: 155657

SEQ ID NO: 162623 - DNA, 311 bp, Homo Sapiens; identical to SEQ ID NO: 155660

SEQ ID NO: 162624 - DNA, 488 bp, Homo Sapiens
  misc_feature (211)..(211): n is a, c, g, or t
catgcatgcatgctggggtagtggagtatcctatagagtcgcccaggctccagcttaaatatatttggaggtcagcgcggtgctcacgtgtcgacgaaacttgcacagagaggcctgcacagcagtggtaaatacacgtcgcccaggctccagatcagctatttttaggaggtcagcgcggtgctcaggtgtcgacgcatcttgtccaggnaggcatgcgcagcagtggttaatactcgtcgaccagcaagcaagcaagcatggtggggtacaggatcatccacaagagtccagcaggctccagcttaacgatatttggaggtcagcacggtgctcacgtgtcgacggaacttgtacagggaggcatgcaccgcagtggtgaatacacgtcgaccaggctccagcttaacgatatttggaggtcagcacggtgctcacgtgtcgacggaacttgtccagggaggcatgcaccgcagtggtgaatacac

SEQ ID NO: 162625 - DNA, 224 bp, Homo Sapiens; identical to SEQ ID NO: 155775

SEQ ID NO: 162626 - DNA, 583 bp, Homo Sapiens
tcatgcgtacctcgcgaacgtgtatcatatagggtctgagggttggtcccagtgggctgtgacatgagcatgaggcaggtgctgatattggtcctatgtgggtctgagatgagcctcagccagaccctgagaggggccccagatggccacaggacaggctgtggtggttggaccatttagggttgcacctgtcctctgggtcaccaactttggacaagtggaggtgggtgaggttggcacccccaggactgacatcttgctcaaactgttctaggatgctgagctctgagacctgtgtggagggaacaaaggtcagagaacaaggcagagagaggaaagttgtttgttgattttggaggggaagaggtgggaaggaagattagcaccagcttggcagatatcaatcgctctaatcccgttcaccagcctgcacctgggcctggctcctccttttccttcgtgtttcttaaaaaggtgggagacagaaatctggggagtttgtttctcactggggttggcactaggaagtgcactgagtgatcagcaggttgccatgacctggccagggaggggatggcacgac

SEQ ID NO: 162627 - DNA, 550 bp, Homo Sapiens
acactgagaccgtatctcaaacaacaaacagaaaaataaccaaactctagccttcaaatttaaggggaggctgattcaagtgacagtaaatcaccagtcttccatttagctgactctatgtatattaaactcttcgtctattgcaattcctctgtcttgataaatcggccctatctgggcagcacgcaggaagaacccattgggtggttataggtgatttgggaatccactccccagaggctatgtatgccacataaagacatacacacccatataatttgacataaagatgtgtataattatatcatgtttgcatttttttaaaatatagtctttctgtttgcttgctttcctcctttcccatattcctctctttggtggttatttatctttccaaagtagattttaatatgcttccttccattttgccattttcattcaataatccctctctaaaatctttcttagccaactggtataactcaaccattttcttgttggtgggcattcatgtatttctctcctctctgcctggttctctcgatacaca

SEQ ID NO: 162628 - DNA, 436 bp, Homo Sapiens
aagaaaaaaaaccaaagaacaagtggggactgaatttcccaacctcttccttgctgtcttccctctctgctcagagctcctggcatgcgtcatcttacccttggtcatgtcttcccatctctgtactcctggcatgtttgacagtctgagggtcctcggacttttccactccccttcctagccccgggctgtgatttgctgcctgatttcttgcctcaccacatttcccccggccaaactgcttgctccgtgaccacatttccacacccttcatgcctcacatcattgtcctccagcacccattctccagatagacccacgttgcctctgttgttgtatgggaaggaatgtgaagtgcggtggagggagtgtggattttggagtcaggcctggggtgaggttccagctctgacatctaccagtctgtgggcgtgac

SEQ ID NO: 162629 - DNA, 792 bp, Homo Sapiens
ttcacgcccacagactaatgcctggtacgtaatagttgcttgttaaatgtttgtaggatgaccgaatgggccaaatgaaagattgttcgaacatcagctaagtggtcctgcttggacagcagtcaccctctgttgaccttggccctggcaagctgggaggaaggctgctggaatcccaggggctctatggggcctgggcctcttcatccatttcccttggcttcctttgcagggtccgtctggcttgatggtgctccccggttcctccatgccctatcgtacgtatcagtggtgccctggtctgcttgagaagctctcaaatgggtcattacactcagacaccatcccgcggccttgtccccaaaatgctgggcgaggcaggaggagggaacttccagctgccctccccatccctccgcagagcatctgccgggactgtgctctcccaccagcggatgccctggaacctgcctgctctgcctactggctgcggtcctgcttaggggaggtcctcagaggcacctctttgcttccctgtccccaccctctgctgcgctttccacagtggccccaggccgccctcggcagggggcctaggcttcaggctcacagcctcccaaccagggaagcatgcggcatgctggccagacctctccatgcccctgtgactccagtccccacaagggctcggggctaagatggagctgtcctccattgctctgtagggccatctctagggtaaatctacaaaaaccagaccagggtatctactctggagtctgtgggcgtgac

SEQ ID NO: 162630 - DNA, 536 bp, Homo Sapiens
ggtactcccctgcccggatggaagtgtgtcccaagtgtgtcagagacccagcaagcgctcattgccgatgttgataacctgtgcgtccggttgctcgtacttcttctccagagaagatgtggtagggtgacaagctcgaatacgtgatcattggcttagtttttctgtgtgtaaaaagacagacaccatcggggagtgggaagccagggcacggcaaagagagctgcacattggtcagaggggccccagcgtctgagtcctgtcctcctgcaggagagtacatcgcactgtaccagagccagagggcagtgcggaaggaggaggagtgcatcagcaggctggcccaggacaagggagaggtgaaggtgaagctgctggagctggcgtggcttgtggacgactgcaacaagtggcatagcagattcctggcagctgcccaggaccctgctgatgagcccactccaggtgcccccgccccccagtagcttggggctactgacaagccagggtagtgagtagagtcctgtgggcagtga

SEQ ID NO: 162631 - DNA, 149 bp, Homo Sapiens
tcactgtagaggggaggcattgatgaagttcaagaagtcctgttagctctgccttcagaatctacctccaggtccttttagttcaatctccagcctcactgctggaaccctcacccgagccaccaccttgcagtcttgtgggcgtgaac

SEQ ID NO: 162632 - DNA, 321 bp, Homo Sapiens
gaaatctttacctcagtttcttcatcagcagaatgggtttctggcctctctcagggataattttgaaggcataatgaaaattatgatgaatcactcattggtaggaaaataatgatataagtttcaaatatgtatgattttacctatacttggtaatgctttgttttatagagcctgttaagctgctattgatagtcggagcttatatactgtgacttctgaagactatacatgaattccacaatcagtgctttgttgatacaaaatccttaaaagggaggcactttaaagaatatgtatttttcacttttcttaatatgt

SEQ ID NO: 162633 - DNA, 456 bp, Homo Sapiens
tatatgtcgtgccagccaccgcggtcatacgattaacccaaattaatagattcacggcgtagagagtgtttaagaaaaaaaaccacaatagagttaaattataactaagctgtaaaaagccctagttaaaataaaataacccacgaaagtgactctaataatcctgacacacgatagctaggacccaaactgggattagataccccactatgcctagccctaaacccaaatagttacataacaaaactattcgccagagtactactcgcagctgcctaaaactcaaaggacttggcggtgcttcacatccacctagaggagcctgttctataatcgataaaccccgatagaccttaccaacccttgccaattcagcctatataccgccatcttcagcaaaccctaaaaaggaacaatagtaagcacgacatatagctaggggggatccactagagt

SEQ ID NO: 162634 - DNA, 392 bp, Homo Sapiens; identical to SEQ ID NO: 156432

SEQ ID NO: 162635 - DNA, 482 bp, Homo Sapiens
  misc_feature (13)..(13): n is a, c, g, or t
agctcggtacccnctaggtatatgtcgtgctgagtcaacttaatatggtaatctctccttccaaccttcattctagagcgattgaacgctttacagcaactgaatgattttacgtagatcttttcatctctaacctaactcagaaaataactctagccactgaaaagccaatcagcaaggggcttctaaccatgaagttccttttgcacatatgagactgcatgccaccctctgtacccggactgcctcctgctgaaagcacatatcttacttcacagatgactaaagttctgagccaatcaaaggatttaaaactaaactaactaaaatagttacaaggattaactaattttgttttctgtaaaaaatcagaagattgaagagatcaattgcttttatgttatgctctaaaccgaggaacaaagggcctgctctgattccctggcacgacatatacctaggggggatcaactagagtcggc

SEQ ID NO: 162636 - DNA, 379 bp, Homo Sapiens
cagaaggagagtcagaacttgtatcaggctttatcgtagaatatgcagccggacctttcgccatattcttcatagcagaatatgccaacatcatcataataaatgcatttacagcaattctcttcctaggagcatccctcgagccacacacgccagagctatatacaatcaacttcgtactaaaaacactcgcattaacaatcaccttcctatgaatccgagcatcatacccacgattccgatacgaccaactaatacatttactatgaaaaagcttcctgcccctaacactagctctatgtatatgacacatctcactccctattataacagcaagcattcctccgcacgacatatacctagtggatcaactagagtc

SEQ ID NO: 162637 - DNA, 385 bp, Homo Sapiens; identical to SEQ ID NO: 156695

SEQ ID NO: 162638 - DNA, 351 bp, Homo Sapiens; identical to SEQ ID NO: 156711

SEQ ID NO: 162639 - DNA, 689 bp, Homo Sapiens
ggcttgatggcactcctgcaggttattgatgcctgaggagtagcaaggcaggtctccagcaggttagaaatcctcttgcaagactagccccacaggaactatacattaccttccataaccaatcccactatgattccacgtattcatttggattgctttgactatgggcttttcctcagtttaacacgaacactacttccctttactaccacgcatcaagagagtaaaccaatcaggctacccagatgagatttttgacgtagaactaaattcctgccccgttcctcacagggcgatctcatgaaagttctacctggacaccacgtgtaaacaagcagcggaggtggttctgtgtctgcaggcttaatccagggtgggaacaggcggcgcttgtcggcttcataccacaggtactggtccaggtaagcatcagttatcttctccaggggctcaacatcatatactggaacgaggtggctatacagatccatgaactcaatgcccacctgtggaacaaggaggctggttcacaccaatccaccaactgctacctttggtagaaccaaaggcaactgctacccttggtagaaccaaaaagaaaacttgggaggcctcactcacctctttgaaggctctctgtgtgaggaggtgacgcttgatgcgggacagcgcctcgtggggtaggaggt

SEQ ID NO: 162640 - DNA, 727 bp, Homo Sapiens
ggggaccgagtgggtcctgcccaatgttaccagattggctctggcctggcgagttcagagccccctccactcacctttggattcatctcggagcactcggcacaatgggctggtggaacgggtgcagcgagatcctcgaagaatggtgtccccacttcgccgatacacccgccacattgacagctctccctatagtcctgcctacttatctcctcccccagagtctagctggcgaaggacggtggcctggggcaatttccctgcagagaaggggcagttgtttcgactaccatctgcacttaacaggacaagctctgactctgcccttcatacaagtgtgatgaaccccagtccccaggatacctacccaggccccacacctcccagcatcctgcccagccgacgtgggggtattctagatggtgaaatggaccccaaagtctttctctttcaagtacctgctattgaggagaacttgctagatgacaagcatttgctgaagccatgggatgctaagaagctatcctcatcctcttcccgacctcggtcctgtgaagtccctggaattaacatctttccatctcctgaccagcctgccaatgtgcctgtcctcccacctgccatgaacacggggggctccctacctgacctcacaaactgcactttccccaacactgccaccccctggacctgaggagaaggctacctagctgagtgtggcacagtc

SEQ ID NO: 162641 - DNA, 310 bp, Homo Sapiens
ctgagtgactgctcagtggaagcctggaggttgggattgcttagggaggactgcagggatgggtggctgagaggtgaatgaagtcctggtgcatcatagcctgtggcccaggcccatgcccctgctgatgcccaggtgagtcatggtgtgggtcaaattggaggtactgttgcccccactcaggctagggtagtgctgtctcttcagggtccagggggggtgggcagtggtgggggaaagtgcagtgttggtgagtgtcaggtagggagccccccgtgttcatggcaggtgggaggacaggcacataggc

SEQ ID NO: 162642 - DNA, 846 bp, Homo Sapiens
ctgcatatctgacccgtcgtggcccaagtgaattgcaggataccctatatggggtgagccccacccagataacccccaggtgaaggagatccgctgcattgtgatggtcccgcagtgggcacttcaccagaccgtgcacctgcctggccaagctgccccagcatgagtacctcaaggagatggaacccttaggttggatccacactcagcccaatgagtccccgcagttatcaccccaggatgtcaccacccatgccaagatcatggctgacaacccatcttgggatggcgagaagaccattatcatcacatgcagcttcacgccaggctcctgtacactgacggcctacaagctgacccccagtggctacgaatggggccgccagaacacagacaagggcaacaaccccaagggctacctgccttcacactatgagagggtgcagatgctgctgtcggaccgtttccttggcttcttcatggtccctgcccagtcctcgtggaactacaacttcatgggtgttcggcatgaccccaacatgaaatatgagctacagctggcgaaccccaaagagttctaccacgaggtgcacaggccctctcacttcctcaactttgctctcctgcaggagggggaggtttactctgcggatcgggaggacctgtatgcctgaccgtttccctgcctcctgcttcagcctcccgaggccgaagcctcagcccctccagacaggccgctgacattcagcagtttggcctctttccctctgtctgtgcttgtgttgttgacctcctgatggcttgtcatcctgaataaaatataataataaattttgtataaatagg

SEQ ID NO: 162643 - DNA, 4491 bp, Homo Sapiens
  misc_feature (4454)..(4454): n is a, c, g, or t
  misc_feature (4479)..(4479): n is a, c, g, or t
tccgataggcggaattgttcacgagggatgtctggctgtggcttctgggctgcggttggcgagtctggctgtttttcatgcgtggcattacccctttattagagcgatggcttggcaacctcctggcccggcagtttgaaggtcgacactcaaagggggtggcaaagacagtaacaaagcagcgagtggagtcacattttgaccttgagctgcgggcagctgtgatgcatgatattctggacatgatgcctgaggggatcaagcagaacaaggcccggacaatcctgcagcacctcagtgaagcctggcgctgctggaaaggccaacattccctggaaggtccctgggctgccgacgcccatagagaatatgatccttcgatacgtgaaggccaaggctgactggtggaccaacactgcccactacaaccgagaacggatccgccgaggggccactgtggacaagactgtttgtaaaaagaatctgggccgcctcacccggctctatctgaaggcagaacaggagcggcagcacaactacctgaaggacgggccttacatcacagcggaggaagcagtggcagtatataccaccacagtgcattggttggaaagccgcaggttttcacccatcccattccccccactctcctataagcatgacaccaagttgctcatcttggcattggagcggctcaaggaagcttatagtgtgaagtctcggttgaaccagtctcagagggaggagttaggtctgatcgagcaggcctacgataacccccacgaggcgctgtcccgcatcaagcgtcacctcctcacacagagagccttcaaagaggtgggcattgagttcatggatctgtatagccacctcgttccagtatatgatgttgagcccctggagaagataactgatgcttacctggaccagtacctgtggtatgaagccgacaagcgccgcctgttcccaccctggattaagcctgcagacacagaaccacctccgctgcttgtttacaagtggtgtcaaggcatcaataacctgcaggacgtgtgggagacgagtgaaggcgagtgcaatgtcatgctggaatcccgctttgagaagatgtatgagaagatcgacttgactctgctcaacaggctgctgcgcctcatcgtggaccacaacatagccgactacatgacagccaagaacaacgtcgtcatcaactataaggacatgaaccatacgaattcatatgggatcatcagaggcctgcagtttgcctcattcatcgtgcagtattatggcctggtgatggatttgcttgtattgggattgcaccgggccagtgagatggctgggccccctcagatgccaaatgactttctcagtttccaggacatagccactgaggctgcccaccccatccgtctcttctgcagatacattgatcgcatccatatttttttcaggttcacagcagatgaggctcgggacctgattcaacgttacctgacagagcaccctgaccccaataatgaaaacatcgttggctataataacaagaagtgctggccccgagatgcccgcatgcgcctcatgaaacatgatgttaacttaggccgggcggtattctgggacatcaagaaccgcttgccacggtcagtgactacagttcagtgggagaacagcttcgtgtctgtgtacagtaaggacaaccccaacctgctgttcaacatgtgtggcttcgagtgccgcatcctgcctaagtgccgcaccagctatgaggagttcacccacaaggacggggtctggaacctgcagaatgaggttactaaggagcgcacagctcagtgtttcctgcgtgtggacgatgagtcaatgcagcgcttccacaaccgcgtgcgtcagattctcatggcctctgggtccaccaccttcaccaagattgtgaataagtggaatacagctctcattggccttatgacatactttcgggaggctgtggtgaacacccaagagctcttggacttactggtgaagtgtgagaacaaaatccagacacgtatcaagattggactcaactccaagatgccaagtcggttccccccggttgtgttctacacccctaaggagttgggtggactcggcatgctctcaatgggccatgtgctcatcccccaatccgacctcaggtggtccaaacagacagatgtaggtatcacacactttcgttcaggaatgagccatgaagaagaccagctcattcccaacttgtaccgctacatacagccatgggagagcgagttcattgattctcagcgggtctgggctgagtacgcactcaagaggcaagaggccattgctcagaacagacgcctgactttagaagacctagaagattcatgggatcgtggcattcctcgaatcaataccctcttccagaaggaccggcacacactggcttatgataagggctggcgtgtcagaactgactttaagcagtatcaggttttgaagcagaatccgttctggtggacacaccagcggcatgatgggaagctctggaacctgaacaactaccgtacagacatgatccaggccctgggcggtgtggaaggcattctggaacacacactctttaagggcacttacttccctacctgggaggggcttttctgggagaaggccagtggctttgaggaatctatgaagtggaagaagctaactaatgctcagcgatcaggactgaaccagattcccaatcgtagattcaccctctggtggtccccgaccattaatcgagccaatgtatatgtaggctttcaggtgcagctagacctgacgggtatcttcatgcacggcaagatccccacgctgaagatctctctcatccagatcttccgagctcacttgtggcagaagatccatgagagcattgttatggacttatgtcaggtgtttgaccaggaacttgatgcactggaaattgagacagtacaaaaggagacaatccatccccgaaagtcatataagatgaactcttcctgtgcagacatcctgctctttgcctcctataagtggaatgtctcccggcccccattgctggctgactccaaggatgtgatggacagcaccaccacccaggaatactggattgacatccagttgcgctggggggactatgattcccacgacattgagcgctacgcccgggccaagttcctggactacaccaccgacaacatgagtatctacccttcggccacaggtgtactcatcgccattgacctggcctataacttgcacagtgcctatggaaactgggtcccaggcagcaagcctctcatacaacaggccatggccaagatcatgaaggcaaaccctgccctgtatgtgttacgtgaacggatccgcaaggggctacagctctattcatctgaacccactgagccttatttgtcttctcagaactatggtgagctcttctccaaccagattatctggtttgtggatgacaccaacgtctacagagtgactattcacaagacctttgaagggaacttgacaaccaagcccatcaacggagccatcttcatcttcaacccacgcacagggcagctgttcctcaagataatccacacgtccgtgtgggcgggacagaagcgtttggggcagttggctaagtggaagacagctgaggaggtggccgccctgatccgatctctgcctgtggaggagcagcccaagcagatcattgtcaccaggaagggcatgctggacccactggaggtgcacttactggacttccccaatattgtcatcaaaggatcggagctccaactccctttccaggcgtgtctcaaggtggaaaaattcggggatctcatccttaaagccactgagccccagatggttctcttcaacctctatgacgactggctcaagactatttcatcttacacggccttctcccgtctcatcctgattctgcgtgccctacatgtgaacaacgatcgggcaaaagtgatcctgaagccagacaagactactattacagaaccacaccacatctggcccactctgactgacgaagaatggatcaaggtcgaggtgcagctcaaggatctgatcttggctgactacggcaagaaaaacaatgtgaacgtggcatcactgacacaatcagaaattcgagacatcatcctgggtatggagatctcggcaccgtcacagcagcggcagcagatcgctgagatcgagaagcagaccaaggaacaatcgcagctgacggcaacacagactcgcactgtcaacaagcatggcgatgagatcatcacctccaccaccagcaactatgagacccagactttctcatccaagaactgagtggagggtcaagggccattctctgctgccaaacctgcaccctaagggacccaatcacatcctatggttttccatctggnacggacatcaaagggagaactgggncctaacacccta

SEQ ID NO: 162644 - DNA, 854 bp, Homo Sapiens
  misc_feature (15)..(15): n is a, c, g, or t
  misc_feature (613)..(613): n is a, c, g, or t
  misc_feature (619)..(619): n is a, c, g, or t
  misc_feature (691)..(691): n is a, c, g, or t
  misc_feature (732)..(732): n is a, c, g, or t
  misc_feature (805)..(805): n is a, c, g, or t
  misc_feature (827)..(827): n is a, c, g, or t
  misc_feature (840)..(840): n is a, c, g, or t
ggaaattgccccagnccatcgtccttcgccagctagactctgggggaggagataagtaggcaggactatagggagagctgtcaatgtggcgggtgtatcggcgaagtggggacaccattcttcgaggatctcgctgcacccgttccaccagcccatggtgccgagtccgctgcattaatgcagcggactcggcaacacagactcgcactgtcaacaagcatggcgatgagatcatcacctccaccaccagcaactatgagacccagactttctcatccaagactgagtggagggtcagggccatctctgctgccaacctgcacctaaggaccaatcacatctatgtttcatctgacgacatcaaggagactggctacacctacatccttcccaagaatgtgcttaagaagttcatctgcatatctgaccttcgggcccaaattgcaggatacctatatggggtgagcccaccagataacccccaggtgaaggagatccgctgcattgtgatggtgccgcagtggcactcaccagaccgtgcacctgcctggccagctgccccagcatgagtacctcaaggagatggaacccttaggttggatccacactcagnccaatnagtccccgcagttatcaccccaggatgtcaccacccatgccaagatcatggctgacaacccatcttgggatngcgagaagaccattatcatcacatgcagcttcacgccaggntcctgtacactgacggcctacaagctgacccccagtgggttacgaattgggccgccagaacacagacaagggnaacaaccccaaggggttactgnctttaacattttnaggagggttcagat

SEQ ID NO: 162645 - DNA, 1155 bp, Homo Sapiens
  misc_feature (286)..(286): n is a, c, g, or t
cggattgggagccctgtgatagtgtaaggcagtagccctgggtgttgcctgtccgggttcggcgccccattggtagccatggggtcagcttgtagcccgtcagtgtacagggagcctggcgtgaagctgcatgggatgataagggtcttgctcccccattccaagatgggttgtcaacaatgatcttggcatggtggtgacatcctggggtgataactgcggggactcattgggctgagtgtggatccaacctaagggttccatctccttgaggtactcatgctgnggcagctggccaggcaggtgcacggtctggtgagtgccccactgcggcaccatcacaatgcagcggatctccttcacctgggggttatctggtgggctcacccccatataggtatcctgcaatttgggcccgaaggtcagatatgcagatgaacttcttaagcacattcttgggaaggatgtaggtgtagccagtctccttgatgtcgtcagatgaaacatagatgtgattggtccttaggtgcaggttggcagcagagatggccctgaccctccactcagtcttggatgagaaagtctgggtctcatagttgctggtggtggaggtgatgatctcatcgccatgcttgttgacagtgcgagtctgtgttgccgtcagctgcgattgttccttggtctgcttctcgatctcagcgatctgctgccgctgctgtgacggtgccgagatctccatacccaggatgatgtctcgaatttctgattgtctcagtgatgccacgttcacattgtttttcttgccgtagtcagccaagatcagatccttgagctgcacctcgaccttgatccattcttcgtcagtcagagtgggccagatgtggtgtggttctgtaatagtagtcttgtctggcttcaggatcacttttgcccgatcgttgttcacatgtagggcacgcagaatcaggatgagacgggagaaggccgtgtaagatgaaatagtcttgagccagtcgtcatagaggttgaagagaaccatctggggctcagtggctttaaggatgagatccccgaatttttccaccttgagacacgcctggaaagggagttggagctccgatcctttgatgacaatattggggaagtccagtaagt

SEQ ID NO: 162646 - DNA, 1011 bp, Homo Sapiens
gatgcaagccgcagatcctggaggtgaacttcaaccccgactgtgagcgagcctgcaggtaccaccccaccttcttcaacgacgtcttcagcaccttgtttctggaccagcccggtggctgccacgttacctgccttgtctaggcactcgctgtccccaaaacctgtgcttggggcaggattccaacctcagttctctgagctgcttctgcaaaggcccccatgtccctccccacaccggccctgggcatagcctcagccccaggcctctgtcctgccgagccatcctcccggcgccacactccgggagcacagcatcctcctctcacctgtgggtcagagcaggacagtgatggtgtccccagggctgagcaccaccccacgccctgccctcacccctcaccaccatctgtgcactgatgagtctccagtttagccaagggcttcgttcctggcatggagaatttgttcctggctgctgtgtttccagggggtgctgggggaagggttccgtggagcgagacaaggtgtcctcgggagcagggttccaccgggaagcgtttgggagccctgtatcacacggggcaggcgggtttctcttccggggtctctgctcttatgcatcaggacgaccccgggacggctgtggggccccacactgcacccacagggctctatgcgacaggggcccaggaacagcctgaggccaccagccagcaagcccgccttatcacccattccagctcacccagaaccttcaccagcaaacctcctgctgaggtcctggcaggaggccaccgtcttgttaccgtttccttttcgtttgctgagggtcacagaccccaacagggaaatcagtatctgtcttcccagtggttgccctgctcgccgggcactccacggggtcccgcccttgtgtgagatgggccaggatccttcggcaaggggcgcctggggctggggctgattgtgggcggtggagcgccagacagaacaggattccaatgagaag

SEQ ID NO: 162647 - DNA, 2238 bp, Homo Sapiens
aattatgagggctcagctcccaacctctttgtctggaatgacatgaacgaacaatctgtgttcaatggtcctgaggtcaccatgctcaaggatgcccagcattatgggggctgggagcaccgggatgtgcataacatctatggcctttatgtgcacatggcgactgctgatgggctgagacagcgctctgggggcatggaacgcccctttgtcctggccagggccttcttcgctggctcccagcgctttggagccgtgtggacaggggacaacactgccgagtgggaccatttgaagatctctattcctatgtgtctcagcttggggctggtgggactttccttctgtggggcggatgtgggtggcttcttcaaaaacccagagccagagctgcttgtgcgctggtaccagatgggtgcttaccagccattcttccgggcacatgcccacttggacactgggcgacgagagccatggctgttaccatctcagcacaatgatataatccgagatgccttgggccagcgatattctttgctgcccttctggtacaccctcttatatcaggcccatcgggaaggcattcctgtcatgaggcccctgtgggtgcagtaccctcaggatgtgactaccttcaatatagatgatcagtacttgcttggggatgcgttgctggttcaccctgtatcagactctggagcccatggtgtccaggtctatctgcctggccaaggggaggtgtggtatgacattcaaagctaccagaagcatcatggtccccagaccctgtacctgcctgtaactctaagcagtatccctgtgttccagcgtggagggacaatcgtgcctcgatggatgcgagtgcggcggtcttcagaatgtatgaaggatgaccccatcactctctttgttgcacttagccctcagggtacagctcaaggagagctctttctggatgatgggcacacgttcaactatcagactcgccaagagttcctgctgcgtcgattctcattctctggcaacacccttgtctccagctcagcagaccctgaaggacactttgagacaccaatctggattgagcgggtggtgataataggggctggaaagccagcagctgtggtactccagacaaaaggatctccagaaagccgcctgtccttccagcatgaccctgagacctctgtgttggtcctgcgcaagcctggcatcaatgtggcatctgattggagtattcacctgcgataacccaagggatgttctgggttagggggagggaaggggagcattagtgctgagagatattctttcttctgccttggagttcggccctccccagacttcacttatgctagtctaagacccagattctgccaacatttgggcaggatgagagggctgaccctgggctccaaattcctcttgtgatctcctcacctctcccactccattgataccaactctttcccttcattcccccaacatcctgttgctctaactggagcacattcacttacgaacaccaggaaaccacagggcccttgtcgccccttctctttcccttatttaggagccctgaactcccccagagtctatccattcatgcctcttgtatgttgatgccacttcttggaagaagatgagggcaatgagttagggctccttttccccttccctcccaccagattgctctcccacctttcatttcttcctccaggctttactcccctttttatgccccaccgatacactgggaccaccccttaccccggacaggatgaatggatcaaaggagtgaggttgctaaagaacatccttttccctctcattctacccttttcctctccccgattccttgtagagctgctgcaattcttagaggggcagttctacctcctctgtccctcggcagaaagacgtttccacacctcttaggggatgcgcattaaacttcttttgcccccttcttgtcccctttgaggggcacttaagatggagaaatcagttgtggtttcagtgaatcatggtcacctgtatttattgctaggagaagcctgagggtggggggagatgatcatgtgtgctcggggttggctggaagccctgggtggggggttgggggaggactaatggggagtcggggaatatttgtgggtattttttttacttcctcttggttcccagctgtgacacgttttgatcaaaggagaaacaataaagggataaaccataaat

SEQ ID NO: 162648 - DNA, 1287 bp, Homo Sapiens
  misc_feature (1106)..(1106): n is a, c, g, or t
ggctgctagagcgatgccgggccggagttgcgtcgccttagtcctcctggctgccgccgtcagctgtgccgtcgcgcagcacgcgccgccgtggacagaggactgcagaaaatcaacctatcctccttcaggaccaacgtacagaggtgcagttccatggtacaccataaatcttgacttaccaccctacaaaagatggcatgaattgatgcttgacaaggcaccaatgctaaaggttatagtgaattctctgaagaatatgataaatacattcgtgccaagtggaaaagttatgcaggtggtggatgaaaaattgcctggcctacttggcaactttcctggcccttttgaagaggaaatgaagggtattgccgctgttactgatatacctttaggagagattatttcattcaatattttttatgaattatttaccatttgtacttcaatagtagcagaagacaaaaaaggtcatctaatacatgggagaaacatggattttggagtatttcttgggtggaacataaataatgatacctgggtcataactgagcaactaaaacctttaacagtgaatttggatttccaaagaaacaacaaaactgtcttcaaggcttcaagctttgctggctatgtgggcatgttaacaggattcaaaccaggactgttcagtcttacactgaatgaacgtttcagtataaatggtggttatctgggtattctagaatggattctgggaaagaaagatgccatgtggatagggttcctcactagaacagttctggaaaatagcacaagttatgaagaagccaagaatttattgaccaagaccaagatattggccccagcctactttatcctgggaggcaaccagtctggggaaggttgtgtgattacacgagacagaaaggaatcattggatgtatatgaactcgatgctaagcagggtagatggtatgtggtacaaacaaattatgaccgttggaaacatcccttcttccttgatgatcgcagaacgcctgcaaagatgtgtctgaaccgcaccagccaagagaatatctcatttgaaaccatgtatgatgtccctgtcacaaaacctgtccttncacagctgaccgtatacccaaccttgatagatggtaccaaaaggtcaattcgaaactttactgcggggactgccctgaccccttgtaataggttggggagcacacgtctggccctacagaatgcggcctctgaacacatgaaaaccccctcttcaggtgaccgaaccactgcaactgtctg

SEQ ID NO: 162649 - DNA, 566 bp, Homo Sapiens
  misc_feature (48)..(316): n is a, c, g, or t
  misc_feature (338)..(348): n is a, c, g, or t
aaatacccgttgatacaatagcacaccacccataatgaaatacaagannnnnnnnnnnnnnnnnnnnnnnnnnnnnnnnnnnnnnnnnnnnnnnnnnnnnnnnnnnnnnnnnnnnnnnnnnnnnnnnnnnnnnnnnnnnnnnnnnnnnnnnnnnnnnnnnnnnnnnnnnnnnnnnnnnnnnnnnnnnnnnnnnnnnnnnnnnnnnnnnnnnnnnnnnnnnnnnnnnnnnnnnnnnnnnnnnnnnnnnnnnnnnnnnnnnnnnnnnnnnnnnnnnnnnnnnnnnnnnnnnnnnnnnnnnnnnnnnnnnnnnnnnnnncttgtaaaagaatttaattacnnnnnnnnnnnaaaagcttctaagtgaaactttacctaaaggtatatcagtaacagcggcaatacccttcatttcctcttcaaaagggccaggaaagttgccaagtaggccaggcaatttttcatccaccacctgcataacttttccacttggcacgaatgtatttatcatattcttcagagaatcactataacctttagcatgggtgcctgtaagcatcattcatgca

SEQ ID NO: 162650 - DNA, 1851 bp, Homo Sapiens
  misc_feature (831)..(831): n is a, c, g, or t
  misc_feature (1431)..(1431): n is a, c, g, or t
gggaagaacaccagcgctccaatgagagggtaagagagaaggcgaagtagcaacagctgctgcccacttcccacctcaactcttccaccctcttccaggttgttttggacataggctggtcttcaactctggatcctccagcctccaacttcaaactactcgttttacatagcaggagccgccacgcccagtgtgctctatggaccatgtgctgctatggatgcctgaagttgttgacctgcaggttgggaagactcagccatctccatgctgggctggattaagtgcctgatgaggatgtggtttcagcgagttggagtaagcatgcaatcggtactttggtctagaaagccatatggttcgtctcgaagtatcgtaaggaaaattggtaccaatttgtctctgattcagtgtccaagagttcagtttcagattaacagccatgcaacagaatggagtcccagcacacccaggagaggatgcagtggcatcttttgctgatgttggatgggtagccaaagaagaaggagagtgctcaacaagactaaggacagaagtcagatcaaagccaccccttcaggatgaccttcttttctttgagaaggccccaagcagacagatttccttaccagacttgtctcaagaagagcctcagcatgaagaccccagcgctggcaaatgaggaagcactgcagaagatttgcgctctcgaaaatgaacttgctgctctcagagctcagattgccaaaattgtgacccagcaggagcagcaaaatctcactgcaggtgacttagattctaccacatttggtaccataccaccacaccctncacctcccccaccgcccctgcctccccctgcactggggctccaccaaagtacatctgctgttgatctgattaaagaacgaagagagaaaagagccaatgctggaaagactttggttaagaacaatccaaagaaacctgaaatgccaaatatgctagagatccttaaagagatgaacagtgtaaaacttcggtcagtgaagaggtcagagcaagatgtgaagcccaagccagtggatgctactgaccctgctgccctcatagcagaggctctgaaaaagaaatttgcttatcggtatcgaagtgatagccaagatgaagttgaaaaaggaattccaaagtctgaatcagaggccacctcagagagagtgttgtttgggccacacatgttgaagccaacaggaaaaatgaaggctttaattgaaaatgtatcagactcctaatagacaatgagctgcgaaaagactcctggttcccctgttgatttgtgagggccaagtttgctagtagaaatcgacactgtttagtaaatacctctttagtattcagtggtcttcttttcaggctaattagtggattaagcaataatgaaagcactaagtntggttttgcttttgtgagatggtcagctttggtgctctccacaacatgtgtgttctgacatgtttctaatatgtggccagggcgttcagatttccagttttgaaaacaattgtatagatttcacaacacaaaaaggacatttgtggatgttactgcacattttaaattcttaacactaatttatctgtataagtgttttatatgcatatttatggacataaacagtttatgtaaaattagtaatgaatgatggcaacgagggcactgttatcttcgttgttttcaatgatcatttagcattcaatgatggaacagctggtataacataagctgtggcatgaaatatttgagattgggaaacttcttggcttgaacagaattatatcttagattctctctcacattttctggggagctggg

SEQ ID NO: 162651 - DNA, 1916 bp, Homo Sapiens
gaggaggaggaggagatgactggggagcgggagctcgagaatactgcccagttactctagcgcgccaggccgaaccgcagcttcttggcttaggtacttctactcacagcggccgattccgaggccaactccagcaatggcttttgcaaatctgcggaaagtgctcatcagtgacagcctggacccttgctgccggaagatcttgcaagatggagggctgcaggtggtggaaaagcagaaccttagcaaagaggagctgatagcggagctgcaggactgtgaaggccttattgttcgctctgccaccaaggtgaccgctgatgtcatcaacgcagctgagaaactccaggtggtgggcagggctggcacaggtgtggacaatgtggatctggaggccgcaacaaggaagggcatcttggttatgaacacccccaatgggaacagcctcagtgccgcagaactcacttgtggaatgatcatgtgcctggccaggcagattccccaggcgacggcttcgatgaaggacggcaaatgggagcggaagaagttcatgggaacagagctgaatggaaagaccctgggaattcttggcctgggcaggattgggagagaggtagctacccggatgcagtcctttgggatgaagactatagggtatgaccccatcatttccccagaggtctcggcctcctttggtgttcagcagctgcccctggaggagatctggcctctctgtgatttcatcactgtgcacactcctctcctgccctccacgacaggcttgctgaatgacaacacctttgcccagtgcaagaagggggtgcgtgtggtgaactgtgcccgtggagggatcgtggacgaaggcgccctgctccgggccctgcagtctggccagtgtgccggggctgcactggacgtgtttacggaagagccgccacgggaccgggccttggtggaccatgagaatgtcatcagctgtccccacctgggtgccagcaccaaggaggctcagagccgctgtggggaggaaattgctgttcagttcgtggacatggtgaaggggaaatctctcacgggggttgtgaatgcccaggcccttaccagtgccttctctccacacaccaagccttggattggtctggcagaagctctggggacactgatgcgagcctgggctgggtcccccaaagggaccatccaggtgataacacagggaacatccctgaagaatgctgggaactgcctaagccccgcagtcattgtcggcctcctgaaagaggcttccaagcaggcggatgtgaacttggtgaacgctaagctgctggtgaaagaggctggcctcaatgtcaccacctcccacagccctgctgcaccaggggagcaaggcttcggggaatgcctcctggccgtggccctggcaggcgccccttaccaggctgtgggcttggtccaaggcactacacctgtactgcaggggctcaatggagctgtcttcaggccagaagtgcctctccgcagggacctgcccctgctcctattccggactcagacctctgaccctgcaatgctgcctaccatgattggcctcctggcagaggcaggcgtgcggctgctgtcctaccagacttcactggtgtcagatggggagacctggcacgtcatgggcatctcctccttgctgcccagcctggaagcgtggaagcagcatgtgactgaagccttccagttccacttctaaccttggagctcactggtccctgcctctggggcttttctgaagaaacccacccactgtgatcaatagggagagaaaatccacattcttgggctgaacgcgggcctctgacactgcttacactgcactctgaccctgtagtacagcaataaccgtctaataaagagcctacccccaactc

SEQ ID NO: 162652 - DNA, 1309 bp, Homo Sapiens
  misc_feature (1042)..(1042): n is a, c, g, or t
  misc_feature (1142)..(1142): n is a, c, g, or t
ggcgcgcggcgctctggctctggctgtgcgcgctggcgctgagcctgcagccggccctgccgcaaattgtggctactaatttgccccctgaagatcaagatggctctggggatgactctgacaacttctccggctcaggtgcaggtgctttgcaagatatcaccttgtcacagcagaccccctccacttggaaggacacgcagctcctgacggctattcccacgtctccagaacccaccggcctggaagctacagctgcctccacctccaccctgccggctggagaggggcccaaggagggagaggctgtagtcctgccagaagtggagcctggcctcaccgcccgggagcaggaggccaccccccgacccagggagaccacacagctcccgaccactcatcaggcctcaacgaccacagccaccacggcccaggagcccgccacctcccacccccacagggacatgcagcctggccaccatgagacctcaacccctgcaggacccagccaagctgaccttcacactccccacacagaggatggaggtccttctgccaccgagagggctgctgaggatggagcctccagtcagctcccagcagcagagggctctggggagcaggacttcacctttgaaacctcgggggagaatacggctgtagtggccgtggagcctgaccgccggaaccagtccccagtggatcagggggccacgggggcctcacagggcctcctggacaggaaagaggtgctgggaggggtcattgccggaggcctcgtggggctcatctttgctgtgtgcctggtgggtttcatgctgtaccgcatgaagaagaaggacgaaggcagctactccttggaggagccgaaacaagccaacggcggggcctaccagaagcccaccaaacaggaggaattctatgcctgacgcgggagccatgcgccccctccgccctgccactcactaggcccccacttgcctcttccttgaagaactgcaggccctggcctcccctgccaccaggccacctccccagcatntccagcccctctggtcgctcctggcccacgaggtccctggggggtggtgctggggaagctcccactctggcttctctggacttctgcctgggagacttangggcaaccaaggggttttcctcgcaatagggaccttttccacccacaggccaggcaacctgggcatcgccaccaatttcctgaacctcggggttttctcccaaaacctgaaaagcaagcccttctccccagggtccccaggctttcctgggaaagaggggggaaagc

SEQ ID NO: 162653 - DNA, 945 bp, Homo Sapiens
gatgcctggccaccatgaaacctcaacccctgcaggacccagccaagctgaccttcacactccccacacagaggatggaggtccttcgtgccaccgagagggctgctgaggatggagcctccagtcagctcccagcagcagagggctctggggagcaggacttcacctttgaaacctcgggggagaatacggctgtagtggccgtggagcctgaccgccggaaccagtccccagtggatcagggggccacgggggcctcacagggcctcctggacaggaaagaggtgctgggaggggtcattgccggaggcctcgtggggctcatctttgctgtgtgcctggtgggtttcatgctgtaccgcatgaagaagaaggacgaaggcagctactccttggaggagccgaaacaagccaacggcggggcctaccagaagcccaccaaacaggaggaattctatgcctgacgcgggagccatgcgccccctccgccctgccactcactaggcccccacttgcctcttccttgaagaactgcaggccctggcctcccctgccaccaggccacctccccagcattccagcccctctggtcgctcctgcccacggagtcctggggtgtgctgggagctccactctgcttctctgacttctgcctggagacttagggcaccaggggtttctcgcataggacctttccacacagccagcacctggcatcgcaccattctgactcggtttctccaaactgaaacagcctctccccaggtcccgctctggaggggagggggatcggactggcttgggacctaaatggccttctgtgggctggaagatcctgcgggtgggggcttgggggctcacacacctgtaacacttactggatagaccaaccttcttggggggggtgggccctgaatggcaagggaaaggaatcccctttggttt

SEQ ID NO: 162654 - DNA, 1801 bp, Homo Sapiens
  misc_feature (49)..(76): n is a, c, g, or t
  misc_feature (96)..(116): n is a, c, g, or t
  misc_feature (721)..(743): n is a, c, g, or t
  misc_feature (1508)..(1523): n is a, c, g, or t
  misc_feature (1546)..(1645): n is a, c, g, or t
  misc_feature (1647)..(1648): n is a, c, g, or t
  misc_feature (1652)..(1653): n is a, c, g, or t
  misc_feature (1664)..(1678): n is a, c, g, or t
ggcagtggtgctgggagtgtcgtggacgccgtgccgttactcgtagtcnnnnnnnnnnnnnnnnnnnnnnnnnnnnatagcgcacagcgcgccttnnnnnnnnnnnnnnnnnnnnnggcatcggaggtacccccgccgtcgcagcccccgcgctggtgcagccaccctcgctccctctgctcttcctcccttcgctcgcaccatggctgatcagctgaccgaagaacagattgctgaattcaaggaagccttctccctatttgataaagatggcgatggcaccatcacaacaaaggaacttggaactgtcatgaggtcactgggtcagaacccaacagaagctgaattgcaggatatgatcaatgaagtggatgctgatggtaatggcaccattgacttccccgaatttttgactatgatggctagaaaaatgaaagatacagatagtgaagaagaaatccgtgaggcattccgagtctttgacaaggatggcaatggttatatcagtgcagcagaactacgtcacgtcatgacaaacttaggagaaaaactaacagatgaagaagtagatgaaatgatcagagaagcagatattgatggagacggacaagtcaactatgaagaattcgtacagatgatgactgcaaaatgaagacctactttcaactcctttttcccccctctagaagaatcaaattgaatcttttacttacctcttgcnnnnnnnnnnnnnnnnnnnnnnngttcatttattcattctgtttctatatagcaaaactgaatgtcaaaagtaccttctgtccacacacacaaaatctgcatgtattggttggtggtcctgtcccctaaagatcaagctacacatcagttttacaatataaatacttgtactaccttaatgataaggactccttaaagttccatttgctaatgattaatacactgtttgggctggccagtttttcatgcatgcagcttgacgattgagcacagtcaggcctttgtattaaaaatgaaaaatgataaaacaaattccaaaacctattcaaatgggttctagttcaatttgtttagtataaattgtcatagctggtttactgaaaacaaacacatttaaaattggtttacctcaggatgacgtgcagaaaaatgggtgaaggataaaccgttgagacgtggccccactggtaggatggtcctcttgtacttcgtgtgctccgacccatggtgacgatgacacaccctggtggcatgcccgtgtatgttggtttagcgttgtctgcattgttctagagtgaaacaggtgtcaggctgtcactgttcacacaaatttttaataagaaacatttaccaagggagcatctttggactctctgtttttaaaaccttctgaaccatgacttggagccggcagagtaggctgtggctgtggacttcagcacaaccatcaacattgctgttcaaagaaattacagtttacgtccattccaagttgtaaatgctagtcnnnnnnnnnnnnnnnnccaataaaaagaccattaacttnnnnnnnnnnnnnnnnnnnnnnnnnnnnnnnnnnnnnnnnnnnnnnnnnnnnnnnnnnnnnnnnnnnnnnnnnnnnnnnnnnnnnnnnnnnnnnnnnnnnannaaanntttttgggggnnnnnnnnnnnnnnntaaaaaatttttctaaaactttcctttgggcggccggggccccaaaagggaaaggaaaagggggcaaacgttgtttccataagaaaacccggggcaataaaaaggggtttgaaattccccacc

SEQ ID NO: 162655 - DNA, 1031 bp, Homo Sapiens
  misc_feature (49)..(76): n is a, c, g, or t
  misc_feature (96)..(120): n is a, c, g, or t
gggagtggtgctgggagtgtcgtggacgccgtgccgttactcgtagtcnnnnnnnnnnnnnnnnnnnnnnnnnnnnatagcgcacagcgcgccttnnnnnnnnnnnnnnnnnnnnnnnnntcggaggtacccccgccgtcgcagcccccgcgctggtgcagccaccctcgctccctctgctcttcctcccttcgctcgcaccatggctgatctgctgaccgaagaacagattgctgaattcaaggaagccttctccctatttgataaagatggcgatggcaccatcacaacaaaggaacttggaactgtaatgaggtcactgggtcagaacccaacagaagctgaattgcaggatatgatcaatgaagtggatgctgatggtaatggcaccattgacttccccgaatttatgactatgatggctacaaaaatgaaagataccagatagtgaagaacaaatccgcggaggcattccgcagtctattgacaagggatgggcaatggattatatccacctggcaacaacaaacttaccgcccacgttccttggaccaaaatttttacgcacacaaacacctccaacgagaatgcgaaagaaagtttaaaaatggaaaactggtatccagcgacgacggccaggaagaaatttggaatggggaagtacacgggaaccacagtgttcaattcttaatgaaaaataaaattcctgtttaccaggaatgggaatggaccttggtctataaattcggaacggacaccttgatttctgtgcgaaacttccccttttctttccccaccctctccttagagaacgaaatctccaatttggggagatccctcccacacctttatcctttcttgggcgcttgccgcccacctcacccgttcaatcgcctccgagctacacaaaaccccgggtgtcttgatttgccttcccgcgctctcttgtaaaaaaactcttctcctaccacacacctaccccttttggcggggcggcgcggggccaccaataaaaggtaaatagctggcaa

SEQ ID NO: 162656 - DNA, 984 bp, Homo Sapiens
  misc_feature (26)..(26): n is a, c, g, or t
  misc_feature (43)..(43): n is a, c, g, or t
  misc_feature (48)..(48): n is a, c, g, or t
  misc_feature (81)..(81): n is a, c, g, or t
  misc_feature (119)..(119): n is a, c, g, or t
  misc_feature (140)..(140): n is a, c, g, or t
  misc_feature (559)..(584): n is a, c, g, or t
acccaaaaggcaaggcaaggcccttngggttcccttcttaaanccttnaaaaagccttcctcccctgggcaaattctgggncagggcccgaatgtctggggcccacagctaatcccaancctgtcattgaaagaccccantcaaagcttcctgtcctgaaaattcccaccttcttctgtccccaagtggttgtggacacccccgggcgctggtactgaggaccagcagcagccgagggaggcagacaggctcagagcacgcttcccatttatagggaacagaacgcaggcctccgagtgtccacggagcaatgtgcaaatcgcagtgatgagtagagtaaaacctctacttcgagcacagtatctctggcaaacacaggggactgcagtcgacaatgctgcggagtacacccgagtacacagtcagacatttgttcggtaaacagtaaatgcgtaagatcaatgaccttgagaggcctgtctgtgctccagacgtgtggttcacgtggagagaatggctgccactcaaagtatcttcacaggaaaacagggcttgaggnnnnnnnnnnnnnnnnnnnnnnnnnnggctcacccaaaaagtcactgtgtacggacttaactttgttcaacatggattttggttttgtggaatctaaatgcagacactcgtttacctcacacccttggatttgtctgtttttggacatatatatatattttttgtttgtttctttctttcttccataacatcaatgcttcgtctgaatatcatcatcgttcaagagttgggggaagaacgacttcatatgcacagggccgggtggggaatgtttgttttggctgtttgctgcctccattcagattttcctatcgcagctcagctggtgacctgaaggcgagcaacaggcacaagggtccccagggccttccggatggccgctttcacctcctgcctgggccaccgagtctctacacagaaaaatcg

SEQ ID NO: 162657 - DNA, 809 bp, Homo Sapiens
  misc_feature (619)..(656): n is a, c, g, or t
taagcaacatggcggctgccgtggtgcagcgcccgggctgagcgacagcaagtgcagcgggctcctaccccgggtgaggggtggcctccgcgtgggatcgtgccctcttcagcccgctcctgtccccgacatcacgtgtattccgcacgtcccctccgcgctgtgtgtctactgagacggggaggcgtgacagggcccgggtcccttctcagtggtgctctgtgcttcagggcaagctccccgtctccgggcgcacttccctcgcctgtgttcggtccatcctcctttctccagcctcctcccctcgcaggtgggatcgtcggtgggaccggagcgcgggcgggcgcggccccccggcgaccatggccgggtccgacaccgcgccccctcctcagccaggcggcatgaccccggacgaactggccattgccttggcccccccggggttggccagggttccaccggggggaaccccgaaagttccctatggaccctccaagggtctcccgggaccctagggaaggggggctttgcccaccgtccattcccccccggggcctctgggccccttcttcggggcgcgggtttccgggttttcttccccctaacggggccgggnnnnnnnnnnnnnnnnnnnnnnnnnnnnnnnnnnnnnntggaaattaaacttgggaaaccgctttttcataaccccctgggcccgggccgttccctttcccccgaaccctctccacgccgattttccttccccaccacttgtggcgaaaccgcccaattttcctggggccctcccatttacgacaccgccg

SEQ ID NO: 162658 - DNA, 828 bp, Homo Sapiens
  misc_feature (32)..(32): n is a, c, g, or t
  misc_feature (48)..(48): n is a, c, g, or t
  misc_feature (62)..(62): n is a, c, g, or t
  misc_feature (86)..(86): n is a, c, g, or t
  misc_feature (106)..(106): n is a, c, g, or t
  misc_feature (192)..(192): n is a, c, g, or t
ccaccagcatgtccagcttcccatcacactgntgcaggatctcatcancggtggtgtcgtantaaggcagggggttgctggcgttncggtactggtctaggatgtnagaattggggatttcgttcttcagccgccaggccacccccacgtgtgactccggggagtcgaacctggcattggtgggcgtcctcncaatctcagcccccagtgcccgcagcacgtccaccttctcggagctcatcttctctggcatcacgatgatgcagcgatagcccctcactgccgcagccagggccagcccgatcccggtgttcccggatgtcggctcgataatcgtgtccccgggcttcagcgtcccgtcgcgctcagcatcctcaatcatccgcaggctgacgcggtccttcacgctcccgcccgcgttgaagaactcacacttggccaagagctcacacttcaggccgaacttcttcccaatcttgttgattctgaccataggggtgtccccgattttcttcagaatatctggcaagatttttggagattttgccggggcagtgtggtgatgtggggactcggaggcaggccggcccagctgccaggtgcacctgctcggagcatcgggccggatccacaggggctccttggcttccttatcctctggggaccccttctccaggctccccttcgccgagtgtggccctgagcggtgggggcagcctgtgggccccacttctgcctggggggtctcagaaggcatgctgggaccggacagatggtgctgacagttcagcaccgctcaaactctaggagacgtgaccaacagaatct

SEQ ID NO: 162659 - DNA, 814 bp, Homo Sapiens
ctctaaggatctctactaaatggctgtagggggactttgtatagaaggtttgggggctgtggggaaggagagtcccctgaaggtctgacacgtctgcctacccattcgtggtgatcaattaaatgtaggtatgaataagttcgaagctccgtgagtgaaccatcattataaacgtgatgatcagctgtttgtcatagggcagttggaaacggcctcctagggaaaagttcatagggtctcttcaggttcttagtgtcacttacctagatttacagcctcacttgaatgtgtcactactcacagtctctttaatcttcagttttatctttaatctcctcttttatcttggacagacatttagcgtagctaagtgaaaaggtcatagctgagattcctggttcgggtgttacgcacacgtacttaaatgaaagcatgtggcatgttcatcgtataacacaatatgaatacagggcatgcattttgcagcagtgagtctcttcagaaaacccttttctacagttagggttgagttacttcctatcaagccagtacgtgctaacaggctcaatattcctgaatgaaatatcagactagtgacaagctcctggtcttgagatgtcttctcgttaaggagatgggccttttggaggtaaaggataaaatgaatgagttctgtcatgattcactattctagaactggcatgacctttactgtgttagctctttgaatgttcttgaaattttagactttctttgtaaacaaataatatgtccttatcattgtataaaagctgttatgtgcaacagtgggaga

SEQ ID NO: 162660 - DNA, 1743 bp, Homo Sapiens
  misc_feature (592)..(679): n is a, c, g, or t
  misc_feature (1407)..(1407): n is a, c, g, or t
  misc_feature (1416)..(1416): n is a, c, g, or t
  misc_feature (1466)..(1466): n is a, c, g, or t
  misc_feature (1483)..(1483): n is a, c, g, or t
  misc_feature (1499)..(1499): n is a, c, g, or t
tcctgaattttacgcccccactggaatgggccactacccagggcctcttaaacctcagagtttaaccttaaacccccccttttaacctggaccgacattttggctagccaagttaaaaggtcatagctgagaatcctggttcgggtgttacgcacacgtacttaaatgaaagcatgtggcatgttcatcgtataacacaatatgaatacagggcatgcattttgcagcagtgagtctcttcagaaaacccttttctacagttagggttgagttacttcctatcaagccagtacgtgctaacaggctcaatattcctgaatgaaatatcagactagtgacaagctcctggtcttgagatgtcttctcgttaaggagatgggccttttggaggtaaaggataaaatgaatgagttctgtcatgattcactattctagaacttgcatgacctttactgtgttagctctttgaatgttcttgaaattttagactttctttgtaaacaaatgatatgtccttatcattgtataaaagctgttatgtgcaacagtgtggagattccttgtctgatttaataaaatacttaaacactgnnnnnnnnnnnnnnnnnnnnnnnnnnnnnnnnnnnnnnnnnnnnnnnnnnnnnnnnnnnnnnnnnnnnnnnnnnnnnnnnnnnnnnnngaaacacgtggcgcccccccacgcccctccaagaaactttcccaaacccatgcgtttgggccccccaggcccccttaaggtaaccggaccggtggtccaaacccggtttccctaagaaaacccctgtcccttggccatagggcctgggattccccccccacaaacaaaaaacctcccgccgccgcgaaaccagagatgtgtatctgtaaacaaatgcccgcggagtgggggttttccgcaggcgcgcattcaccgtgggattcctctctccgagcggggcgccccccacgcggggaggcccgggggagaaataggagtgtgagaaacggcccgcggccgcgcggacactggtggtgtgggcggaacgtcactggggtatggaacatctcaattatataatggagtctcctccgcgcccaaataccgggggagatatgccctcctccccagaaatggtgggtgacttggtcgggtgttagaccgtcgtcgtgaactgtcgcgccccctggcgcctgtgggttaacactattttactccactcgtgtgtctctacgacgcctctctttcgccgcgagcaattcataacattatcgtttctggcccgccgcccatggcgcagagggcacaacaacaaaactagggtgagggtccccatatacccaaacaactgctccttcttgcgtgtaacaagaatggtgggcgcgaccacaaacctgttcctcataatnaatttatangtgaataatgtgtaggggcgtggaagaattcacccactcaccccgcgagngtgaggatattttttgnctgcgtcgtccctacntggcccgctacaacacacaatgtgatctttctctccgcgactactaacaccgccaccctctgtatgagaggtgtgtaatatgatgcgcgcgcacccactgtgtttctccgcggctagagtaatcgcgggcgctgaattgcagtccatgtgtggtggggactgtatgtgtgagtggggatgacaaaaacacttaattgtcgcgtgttatcactacgaggcgtccgagatgggtgagatcgttcaa

SEQ ID NO: 162661 - DNA, 668 bp, Homo Sapiens
gatctttgccacaaccgttgcaccagacatgactccaagtggccgatgcggttgaccgatggcttcaccttgtgattggccacactgcatgaacgtgatcttggtttgtatggcctcgatagcactgactggatcctccagcagtcacctggcaggcagactttagttctagagaacccacaggttgggtaccacgacgaggaagggtttggggaggcaccaggtggggaggcccagtggtagttttggtgaagtgactctgctgtggtacttgactgttactcttctcatgagttccttgctctggggaaagggtaagaccactgagtacttcctccagcgcctggatttgtttgatcaacttctgacccttgtctggaagagcctggatgttcactgatgccagtgtgctcttcttttgtttcacgttgtgttgtaaggtgagacacgcacgggctacatgggtctgacgggttctaccttcgttggaaacaccgtgaggcgaggagacaccatttcggtgcacacttcgatcagggaattggagattttccttcgtctctaagtcacagagtcgagtcaaagagtagagggctcccaggcttagaggaaacacaacgactgtcactcgggttgcggatacgaggtacatcagaacagcagccaga

SEQ ID NO: 162662 - DNA, 1084 bp, Homo Sapiens
gttctagaggatcccggacgaggaaaagatagtgatcacgatgtcatatgtagagaggactctggcacgtgaatcccggtttggcccatggtagagatagactcttagtttgttgctgttcacccgtttctccacctcatttttccaatgatggatcagggaggcaggacagatgattagtgttccatgggaagtaaagtcacaagagtcatctttggagagccacgtcaaagctgtgcttttctccttttcttcctttttctcttgattcttctgggtcaggatgagcgcaatcattgtcagggtttttcctaagcccatatcatccagaattcctccttgtggcttctgactttctcgccatagtaaccaagccaatgcctgcttctggtgtagtagcaaagggaccttcagcccggcgggatcttctgccacaaccgtctcaccaggacatgactcaagtgagcgatgcagttgaccgatggcttcacttgtgattttccacactgcatgaacgtgatcttggtttgtatggcctcgatagcactgactggatcctccagcagtcacctggcaggcagactttagttctagagaacccacaggttgggtaccacgacgaggaaggggttggggaggcaccaggtggggagggccagtggtagttttggtgaagtgactctgctgtggtacttgactgttactcttctcattagttccttgctctggggaaagggtaagaccactgagtacttcctccagctcctggatttgtttgatcaacttctgacccttgtctggaagagcctggatgttcactgatgccagtgtgctcttcttttgtttcagttgtgttgtaaggtagacacgccgggctactgggtctgagggttctaccttcttggaaacacctgaggcaggagacacctttctttgcacacttcgatcagggaattggaggttttccttcgtctctaagtccagagtcgagtcaaagagtagggggctcccaggcttagaggaaacaaaacacatcatctttacctcgtgccggggatactctagaacagccatcacctacccg

SEQ ID NO: 162663 - DNA, 846 bp, Homo Sapiens
aaaagtgcttgtcaagaatatcagaatctagaatttatggcaaattgtatatattttaataaaaaccttaaaataaattctaattttaattgctacccatagaaactcctcaagagaagacattagccaaccagacatgaaatatccacagcatttagctactcccttcgtcttcagtactgtctctaacttcagttgcagtatatgtgctgctgaagagcagtctgcttccaatttcaacacagcattaaggtaccctatagccatcatccaatatacttgctttaaaaacagcactactctgatttagcctggctttctaagaatgattctctggagagaaagaccatgtgaatggtctgtggaagaccagaacaatcctgctgcagtccaagtggattttcctagagacaagcctttgttaaaatattctaaaagtatatgtggcaccttccaattctgggaacctggcctttctaagcacatgcaacacaaccccctcgcttaagccacctgtgagagagctacaaatggcaaaacttcttttgctactctaaatattaatgcattaaaagatctgtctagatagggagcagatccctgctttaaaaaaagtagatagattactatctattgcatatttgtttactaaagagcaaagcatattactagcatgcaggcttaaaaagttacatttattctgcactgtagaaacactggaaatgaagagccaacaaatccaattcccacagctccatgcaaggaagaagcatatcaccactttctctggaaaagttagacaatcgtgattaaccatataccctacaataactgcctgccaatgtc

SEQ ID NO: 162664 - DNA, 755 bp, Homo Sapiens
agcggacacatcctcaagccgccctggctctcgagttcccactgagccaccagccactagtgtggctgctcggagcagctccctgccttctggccgctggggtaggcctgaagcccaccgcagggtggaagccaggccgcggctgaggaacactggctggacctgccaggagtgccaggagtgggttacagatcgggagagctacgtgtcccacatgaaaaagagccacggtcggacattgaagcggtacccatgccggcagtgtgaacagtccttccacacccccaacagcctgcgcaaacacatccgcaacaaccatgacacagtaaagaagttctacacctgccggtactgcacagaggacagccccagctttcctcggccctcccttctggagagccacatcagccctatgcatggcatcagaaaccctgatttgagccagacgtccaaagtgaaacctccgggtggaacattcccctcaggtgaaccatctgaaaaagaccagtcagtggagtgggggacgctccaggcaccagaaatggcgcaactgtctcttccaccaaaaggcacaagtccctttttcagtgcgcgaaatgtagttttgccacagactcggggcccgagtttcagagccacatacctcagcaccaggtggacagctccacagcccaatgtctcctctgtggtttgtgctacacctctggcagctccctcagccgccaactcttcattgtccacaaggtgagagacca

SEQ ID NO: 162665 - DNA, 1188 bp, Homo Sapiens
cgggtggcaagtgagcctcgccccgccctccctgcgccggcccatgatgtgtcagtcagaggcgcggcaaggaccagagctccgcgcggcgaaatggttgcacttcccccagctggccctgaggcggaggctggggcagctgagctgcatgtccagacccgctctgaaactgcgctcctggcccttgaccgtcctctactacctcctgcccttcggcgccctcagaccgctcagccgggtgggatggaggcccgtaagcagggtggctttgtacaagtcagtgccaacgcgcttgctgtcacgggcctggggtcgcctcaatcaggtggagctgccacactggctgcgcaggcccgtctacagcctgtacatctggacgtttggggtgaacatgaaagaggccgctgtggaggacctgcatcactaccgcaacctcagcgagttcttccggcgcaagctgaagccgcaggcccggcctgtctgtggcctgcacagcgtgattagcccatcggatggaaggatcctcaactttgggcaggtgaagaactgtgaggtggagcaggtaaagggggtcacctactccctggagtcgttcctgggcccgcgtatgtgcacagaggacctgcccttcccaccagccgcgtcgtgtgactccttcaagaaccagctggtcacccgggaagggaatgagctctatcactgtgtcatctacctggcccctggggactaccactgcttccactcccccaccgactggactgtgtcccaccggcgccacttcccaggctccctgatgtcagtgaaccctggcatggctcgctggatcaaagagctcttctgccataacgagcgggtggtcctgacgggggactggaaacatggcttcttctcactgacagctgtggggggccaccaacgtgggctccattcgcatctactttgaccgggacctgcacacaaacagccccaagggacagcaagggctccctacaatgaacttcagcttcgttgacgccacaccaatagagaagggcggcccccttgccgtaaagggcgagccacctggggggagtttcaacctggggctccacccatcgtgggttaatttttccaagggcccccccagggaacttcaaattttccggccttgaaaaaccgggaacagaaaaatccccgttttttggggga

SEQ ID NO: 162666 - DNA, 1439 bp, Homo Sapiens
agcaaatgccaaatcatgtggagaatgtatacaagcagggccaaattgtgggtggtgcacaaattcaacatttttacaggaaggaatgcctacttctgcacgatgtgatgatttagaagccttaaaaaagaagggttgccctccagatgacatagaaaatcccagaggctccaaagatataaagaaaaataaaaatgtaaccaaccgtagcaaaggaacagcagagaagctcaagccagaggatattactcagatccaaccacagcagttggttttgcgattaagatcaggggagccacagacatttacattaaaattcaagagagctgaagactatcccattgacctctactaccttatggacctgtcttactcaatgaaagacgatttggagaatgtaaaaagtcttggaacagatctgatgaatgaaatgaggaggattacttcggacttcagaattggatttggctcatttgtggaaaagactgtgatgccttacattagcacaacaccagctaagctcaggaacccttgcacaagtgaacagaactgcaccagcccatttagctacaaaaatgtgctcagtcttactaataaaggagaagtatttaatgaacttgttggaaaacagcgcatatctggaaatttggattctccagaaggtggtttcgatgccatcatgcaagttgcagtttgtggatcactgattggctggaggaatgttacacggctgctggtgttttccacagatgccgggtttcactttgctggagatgggaaacttggtggcattgttttaccaaatgatggacaatgtcacctggaaaataatatgtacacaatgagccattattatgattatccttctattgctcaccttgtccagaaactgagtgaaaataatattcagacaatttttgcagttactgaagaatttcagcctgtttacaaggagctgaaaaacttgatccctaagtcagcagtaggaacattatctgcaaattctagcaatgtaattcagttgatcattgatgcatacaattccctttcctcagaagtcattttggaaaacggcaaattgtcagaaggagtaacaataagttacaaatcttactgcaagaacggggtgaatggaacaggggaaaatggaagaaaatgttccaatatttccattggagatgaggttcaatttgaaattagcataacttcaaataagtgtccaaaaaaggattctgacagctttaaaattaggcctctgggctttacggaggaagtagaggttattcttcagtacatctgtgaatgtgaatgccaaagcgaaggcatccctgaaagtcccaagtgtcatgaaggaaatgggacatttgagtgtggcgcgtgcaggtgcaatgaagggcgtgttggtagacattgtgaatgcagcacagatgaagttaaca

SEQ ID NO: 162667 - DNA, 404 bp, Homo Sapiens
ggggtgactagcaggaccccctttgagtgaataatttatacttatttggttaatgtctggtgctttctatcacctcttctaatcttttaatgtatttgtttgcaattttggggtaagacttttttatgagtactttttctttgaagttttagcggtcaatttgcctttttaatgaacatgtgaagttatactgtggctatgcaacagctctcacctacgcgagtcttactttgagttagtgccataacagaccactgtatgtttacttctcaccatttgagttgcccatcttgtttcacactagtcacattcttgttttaagtgcctttagttttaacagttcactttttacagtgctatttactgaagttatttattaaatatgcctaaaatacttaaatcgg

SEQ ID NO: 162668 - DNA, 2054 bp, Homo Sapiens
gaggatcccccagcccctcacgatacctggagagggataatacaaatgaaatttattctggcaaattctgcgagtgtgataatttcaactgtgatagatccaatggcttaatttgtggaggaaatggtgtttgcaagtgtcgtgtgtgtgagtgcaaccccaactacactggcagtgcatgtgactgttctttggatactagtacttgtgaagccagcaacggacagatctgcaatggccggggcatctgcgagtgtggtgtctgtaagtgtacagatccgaagtttcaagggcaaacgtgtgagatgtgtcagacctgccttggtgtctgtgctgagcataaagaatgtgttcagtgcagagccttcaataaaggagaaaagaaagacacatgcacacaggaatgttcctattttaacattaccaaggtagaaagtcgggacaaattaccccagccggtccaacctgatcctgtgtcccattgtaaggagaaggatgttgacgactgttggttctattttacgtattcagtgaatgggaacaacgaggtcatggttcatgttgtggagaatccagagtgtcccactggtccagacatcattccaattgtagctggtgtggttgctggaattgttcttattggccttgcattactgctgatatggaagcttttaatgataattcatgacagaagggagtttgctaaatttgaaaaggagaaaatgaatgccaaatgggacacgggtgaaaatcctatttataagagtgccgtaacaactgtggtcaatccgaagtatgagggaaaatgagtactgcccgtgcaaatcccacaacactgaatgcaaagtagcaatttccatagtcacagttaggtagctttagggcaatattgccatggttttactcatgtgcaggttttgaaaatgtacaatatgtataatttttaaaatgttttattattttgaaaataatgttgtaattcatgccagggactgacaaaagacttgagacaggatggttactcttgtcagctaaggtcacattgtgcctttttgaccttttcttcctggactattgaaatcaagcttattggattaagtgatatttctatagcgattgaaagggcaatagttaaagtaatgagcatgatgagagtttctgttaatcatgtattaaaactgatttttagctttacaaatatgtcagtttgcagttatgcagaatccaaagtaaatgtcctgctagctagttaaggattgttttaaatctgttattttgctatttgcctgttagacatgactgatgacatatctgaaagacaagtatgttgagagttgctggtgtaaaatacgtttgaaatagttgatctacaaaggccatgggaaaaattcagagagttaggaaggaaaaaccaatagctttaaaacctgtgtgccattttaagagttacttaatgtttggtaacttttatgccttcactttacaagattcaagccttagataaaaagaaccgagcaattttctgctaaaaagtccttgatttagcactatttacatacaggaccatactttacaaagctatttgcgtgaagtggaggacctattatgagcttgaatttattgttatatcatctttcacttatacgtttaactgtctggttgcgtttctagtcaccctcttctaaatcttcttaaatgtatttgtctacgcaattcttggggctaagaactttttttattgacgtactacttatctctcttgacagtttctacgcgggtcaacttatgcctttctttttaattgaaacatcgttgaaagtctcatactgattgggcatactggcaaaaccaaagagaccaactacagaagaaagaacaaaagacccaccgacaacaaaaggcgagggaagcgagcacgaacctactaaaaagaattcaccaaccgcaagggagcacaccaagacgattagcccgaggcaacgacagcagacacacgtgagaaaacaaagcggggcccaccccaaagaggacgcacgacaaaaaaacagcaaagg

SEQ ID NO: 162669 - DNA, 1022 bp, Homo Sapiens
tggcatcttaaaaacaaagcaggcgggtacggcccggaattcccgggatatcgtcgaccacgcgtccgcaaggagctgaaaaacttgatccctaagtcagcagtaggaacattatctgcaaattctagcaatgtaattcagttgatcattgatgcatacaattccctttcctcagaagtcatttggaaaacggcaaattgtcagaaggagtaacaataagttacaaatcttactgcaagaacggggtgaatggaacaggggaaaatggaagaaaatgttccaatatttccattggagatgaggttcaatttgaaattagcataacttcaaataagtgtccaaaaaaggattctgacagctttaaaattaggcctctgggctttacggagggaagtagaggttattcttcagtacatctgtgaatgtgaatgccaaagcgaaggcatccctgaaagtcccaagtgtcatgaaggaaatgggacatttgagtgtggcgcgtgcaggtgcaatgaagggcgtgttggtagacattgtgaatgcagcacagatgaagttaacagtgaagacatggatgcttactgcaggaaagaaaacagttcagaaatctgcagtaacaatggagagtgcgtctgcggacagtgtgtttgtaggaagagggataatacaaatgaaatctattctggcaaattctgcgagtgtgataatttcaactgtgatagatcaatggttattcgtggcaggaaactggtgttcgccagtgtcgtgtgtgtgagtgcaaccccaataaactggggatggcctgtgacgttccttggcaaatagtcactgttgaaagccagcacggacgattccggaaggcccggaactgcacagcggcgtcctggacgtcacaccgcaatacgggcaacgtggactgtcccaacctcgggccgcggcatctaaaacggtccagcacccaaggaaaaaaacacgcgagggcttttaaccgagagcgaacacgaaccaccaaacaaaaaatataa

SEQ ID NO: 162670 - DNA, 839 bp, Homo Sapiens
  misc_feature (183)..(183): n is a, c, g, or t
gggaccctgaggaagggcccctctcctggcatctgtctcttgctacctaagcctgtgcctctccctaaagagctgcctccctgctgccgagccctggtctggccacgagccactactgcctcccacaggcaccactgcctcccgctgctgcccacaggtggtgccgccaatgggcagtgcctncaggccgaagccttcaatcccccatctgagccaggcctaatcctctaatagtgatggttggtttgtcctcccataactgcaggtggattccacctgggggaatgaggctgcgtgtcgggcgtctgctggccctgagacatccagtcttccacactcaactgtgggatgggagggtggcgtggccttaccccatggaggctgttccaggcttctgggcacacagctgtgctcacaaaatactgggtggcttggtttagagctaattgtagtggagcctgcaggtgagggtgagggagggggctgcaggtcaggtaagatctggaagacagacgtacagcttggagggcagggggactctaaggcaaggagatttacagttgggaaggaggcagtggcagaggggtgagggacaggggcccttaagtccagcgaggaaagctcggtgtgggcccgctctacgctccgtttggggtgacctggaacgcctcttctcccagctccctccagccatcagcagcctcttgtcaagcttctgcctcgccccagtctatccccaaccccaaatcaagaccacctttcttcacggtcactatttattctttgttcctttttctttttgtaagaaacattcacaaaaaccagtgcaaaaccatcaa

SEQ ID NO: 162671 - DNA, 1670 bp, Homo Sapiens
  misc_feature (1575)..(1575): n is a, c, g, or t
  misc_feature (1656)..(1656): n is a, c, g, or t
ttccatcgaccgggagctgagccctgagggcccaggcaaggagaaggagctgcctggacagaccctgcactgggggcccgaggccacagaagccgcaggtcggggtctgcagcccctgaagctggactaccgcgccctggccgccgtgcccagcgctggcagcgtgcagagggtaccgtctggagcagctggagggaagatggctgaatctccctgctcccctagtggccagcagccgccctccccaccttctccggatgagctgcccgccaatgtgaagcaggcctacagggccttcgcggccgtgcccacttctcacccgcctgaggatgcccctgcccagccccccacgcctgggcctgcagcctccccggagcagctgtccttccgggagcggcagaagtactttgagctggaggtgcgcgtgccccaggccgagggcccccctaagcgcgtgtccctggtgggtgctgacgacctgcggaagatgcaggaggaggaagccagaaaactacagcagaagagagcgcagatgctgcgggaggcggcagaggctggggccgaagcgaggctcgccctggacggggagacgctgggcgaggaggaacaggaggatgagcaagccaccctgggccagcccgagccccacctcaaggcagagcccggcgtcccccccgcccctgggaggtggcgccccggtgcggacggccaaagctgaacggcgccaccaggagcggctgcgcgtgcagagtccggaaccaccggcacccgagcgtgccctgtcccctgccgagctccgggccctggaggccgagaagcgtgcgctgtggagggcagccaggatgaagtcattggaacaggacgctctccgagcacagatggtcctcagcaggtcccaggaaggccggggcacgcgggggcccctggagcgactggccgaggccccttcccctgcgcccaccccgtcgcccacccctgtggaagtcaccggactttgctgaggagttgaggtccctggaaccatctcccagccctggcccgcaggaggaggatggagaagtggctctggtgcttctgggcaggccctcacccggcgctgtgggccctgaagatgtggcactgtgcagcagccgccgccccgtaaggcctgggcgccgtggcctgggccctgtgccctcctagaggagcaggcacctcccccagacttggggtgggggccctgccagctccagcaccacccttgccccaagtcttttaacctgggtgttagcattttaaagagaccccacaggagttctggcctgtgactaactaactgccccaccccagccgagacctcggcgagactgtaactagtgatgtttgcacaaccaaagaacccatttcgctggtttcagcgacaatcacgctcgccacctctttttctctccacccctacagaacacccccagcggctattatcgcccgttgcccgctaatacgaggtcctccccacccgccttcttcggccccctcgcctgttctttaccaacctctcccttcttcttgtcgcctcgcgtgcatatcctcctccgnccgggcctccccgtcctgggagaagcacctcaaaataaagtgttgctgtcgagacgctcaattctcccagcccgccatctntctccccctaccct

SEQ ID NO: 162672 - DNA, 631 bp, Homo Sapiens
tggagggcagccaggatgaagtcattggaacaggacgctctccgagcacagatggtcctcagcaggtcccaggaaggccggggcacgcgggggcccctggagcgactggccgaggccccttcccctgcgcccaccccgtcgcccacccctgtggaagacctcggcccccagaccagcacctccccgggacgcctgtcaccggactttgctgaggagttgaggtccctggaaccatctcccagccctggcccgcaggaggaggatggagaagtggctctggtgcttctgggcaggccctcacccggcgctgtgggccctgaagatgtggcactgtgcagcagccgccgccccgtaaggcctgggcgccgtggcctgggccctgtgccctcctagaggagcaggcacctcccccagacttggggtgggggccctgccagctccagcaccacccttgccccaagtcttttaacctgggtgttagcattttaaagagaccccacaggagttctggcctgtgactaactaactgccccaccccagccgagacctcggcgagactgtaactagtgatgtttgtacaaccaaagactctattttgtggtttaaggagaataaagttgactacatttta

SEQ ID NO: 162673 - DNA, 730 bp, Homo Sapiens
  misc_feature (230)..(315): n is a, c, g, or t
  misc_feature (405)..(423): n is a, c, g, or t
cggcaagaagcgtggattcggcttcgtgtatttccagaatcacgacgcggcagacaaggccgcggtggtcaagttccatccgattcagggccatcgcgtggaggtgaagaaagcagtccccaaggaggatatctactccggtgggggtggaggcggctcccgatcctcccggggcggccgaggcggccgggggcgcggcggtggtcgagaccagaacggcctttccaagnnnnnnnnnnnnnnnnnnnnnnnnnnnnnnnnnnnnnnnnnnnnnnnnnnnnnnnnnnnnnnnnnnnnnnnnnnnnnnnnnnnnnnttcgtcctacggtgggagcgactacggtaacggcttcggcggcttcggcagctacagccagcatcagtcctcccatgggcccatgaagannnnnnnnnnnnnnnnnnntggaggcagtagctggggcggtcgcagtaatagtggaccttacagaggcggctatggcggtgggggtggctatggaggcagctccttctaaaagaaaatttaaaatgcctgggagtggctataggggtagctctttcaaacagcccaagtggggtcaactcctaagccccaccccctcacacacaccggcttccctgtattgcccttgggggagccacttctaaggctgcttacccttaggggtgtacctctatttgcctgccacctctcttgtctctccctctgaagatggactcggaagcccccg

SEQ ID NO: 162674 - DNA, 473 bp, Homo Sapiens
  misc_feature (311)..(329): n is a, c, g, or t
cggccgggggcgccgaggccatctccagagggagagacaagagaggtggcaggcaaatagaggaacacccccaagggtaagcagccttagaagtggctcccccaagggcaaaacagggaaggcggtgtgtgtgagggggtggggcttaggagttgaccccacttgggctgttggaaagagctacccctatagccactcccaggcattttaaattttcttttagaaggagctgcctccatagccacccccaccgccatagccgcctctgtaaggtccactattactgcgaccgccccagctactgcctccannnnnnnnnnnnnnnnnnntcttcatgggcccataggaggactgatgctggctgtagctgccgaagccgccgaagccgttaccgtagtcgctcccaccgtaggacgaaccgccgccgccgcctccgtaggcattgtagccgccgcctcggcgcccccggcccg

SEQ ID NO: 162675 - DNA, 1081 bp, Homo Sapiens
  misc_feature (145)..(207): n is a, c, g, or t
ggcctgggtggcgaattcggcacgaggcgcgttcagcggcctctttgtgtggtgcccagataggggagcggaggtggcggcggcggcggtagcggtggccttggttgtcttccagtctcctcggctcgccctttagccggcaccnnnnnnnnnnnnnnnnnnnnnnnnnnnnnnnnnnnnnnnnnnnnnnnnnnnnnnnnnnnnnnngtcggtgagcggcgggggtggctccagcaacggctgggcccaagctgtgtagaggccttaaccaacgataacggcggcgacggcgaaacctcggagctcgcagggcgggggcaaggcccgggccttggagatggagaattctcagttgtgtaagctgttcatcggcggcctcaatgtgcagacgagtgagtcgggcctgcgcggccactttgaggcctttgggactctgacggactgcgtggtggtggtgaatccccagaccaagcgctcccgttgctttggcttcgtgacctactccaatgtggaggaggcggacgccgccatggccgcctcgccccatgccgtggacggcaacactgtggagctgaagcgggcggtgtcccgggaggattcggcgcggcccggtgcccacgccaaggttaagaagctctttgtcggaggccttaaaggagacgtggctgaaggcgacctgatcgagcacttctcgcagtttggcaccgtggaaaaggccgagattattgccgacaagcagtccggcaagaagcgtggattcggccttcgtgtatttccagaatcacgacgcggcagacaaggccgcggtggtcaagttccatcccgattcaggccatcgccgtgggaggggagaaagcattcccccaagaggatatctactcccggtggggggtggaaggccgctccccattctccccggggcggcccaaaggcggcccgggggacccgaccgtggctccaaaaccaaaaacgggccttttccaaggacgcctgtcggcggtttcaaaacaactaggggggggttaaacggcggtagtatgaaagctgcggactaacatgccctaaggaaggagcgttgcgg

SEQ ID NO: 162676 - DNA, 919 bp, Homo Sapiens
  misc_feature (88)..(149): n is a, c, g, or t
  misc_feature (708)..(708): n is a, c, g, or t
  misc_feature (737)..(737): n is a, c, g, or t
  misc_feature (742)..(742): n is a, c, g, or t
gataggggagcggaggtggcggcggcggcggtagcggtggccttggttgtcttccagtctcctcggctcgccctttagccggcaccgnnnnnnnnnnnnnnnnnnnnnnnnnnnnnnnnnnnnnnnnnnnnnnnnnnnnnnnnnnnnnngtcggtgagcggcgggggtggctccagcaacggctgggcccaagctgtgtagaggccttaaccaacgataacggcggcgacggcgaaacctcggagctcgcagggcgggggcaaggcccgggccttggagatggagaattctcagttgtgtaagctgttcatcggcggcctcaatgtgcagacgagtgagtcgggcctgcgcggccactttgaggcctttgggactctgacggactgcgtggtggtggtgaatccccagaccaagcgctcccgttgctttggcttcgtgacctactccaatgtggaggaggcggacgccgccatggccgcctcgccccatgccgtggacggcaacactgtggagctgaagcgggcggtgtcccgggaggattcggcgcggcccggtgcccacgccaaggttaagaagctctttgtcggaggccttaaaggagacgtggctgagggcgacctgatcgagcacttctcgcagtttgggaccgtgggaaaaggccgagattattgccgacaagcaggccgggcaagaagcgtggaattcggncttcctgcaatttccgaaatcgcgaaagncggantacagagggcggcgggggctcatattcaactacaaacctacgggctgagaccctggtctaggtgcccaacacaggcgcagcagcacgggcgcgactacgctactttcagcactcgtactctttgatgacagcaacacgcgggccgcagaccagtcaaataatccagcatcgcgcgca

SEQ ID NO: 162677 - DNA, 787 bp, Homo Sapiens
ggtactggtctgatcctcagtgaagtccagcggaacctcaatagctgggatcgggcccgggttcagcgacaccttgagctcctactgcgggatctggaagatagccggggtgccacccttaatccttggcgcaaggcccagctgctgcgagtggagggcgaggtcagggccctcctggagcagctgggaagctctggaagctgagacactggcggcaggcacctagctatgtgaccactggccctaaaccttttccctctgtggcctcctggcttgcactgctccctctagaaagattccttcaggtctggaggcagaggaatggcatagctgagccagttgccctcctagggcatgtttgaccaggactgagtctggaatctccaagttaaagatggtgaatcaatgcttcgggcttggagatggaacatgcctcctctccattcagctagaaggaccaaagcatgtggcatttggatggccagagtgccctgaagcaccactaccaaccttgcctccccctcctctcaaagagcctctgactgtgtcaccaaggggctcacatcttatgtctgccatgcccaggggtgtcgccatccagatgtgttggaagcttcccctcctgccctatgctcacctgtggacaccgaggatgccctcacattgggtgctttctcctcatcctcatgccccctttgccacaatggtatgatggcttggtagcccctcgaagcagatgcacctgaacttgctgctattaaaaagccgtgtgcctttctaccaaaaa

SEQ ID NO: 162678 - DNA, 1004 bp, Homo Sapiens
  misc_feature (909)..(909): n is a, c, g, or t
cttagttgtgtggtccaggtcttggtgaggacctccttgactccttccttagcaacattccacaggactgcaggcaccacctgtgtgaaccggacatgaaactggtgcggcctagtaccaagctgttgcaggcagctgcaggtgcatctgcccgggcctgtgactctgtcaccagcaatgtactgcctttactgctggaacagttccacaagcacagtcagagcagccagcggcggacaatccttgaaatgctcctgggtttcttgaagctgcagcagaaatggagctatgaagacaaagatcaaaggcctctgaatggcttcaaggaccagctgtgctcactggtattcatggctctaacagaccccagcacccagcttcagcttgttggcatccgtacactgacagtcttgggtgcccagccagatctcctatcttatgaggacttggagctggcagtgggtcacctgtacagactgagcttcctgaaggaggattcccagagttgggtggcagcactggaagcatcaggaaccctggctgctctctaccctgtggccttcagcagccacctcgtacccaagctcgctgaggagctgcgtgtaggggagtcaaatttgactaacggagatgagcccacccaatgctcccggcatctgtgctgtctgcaagccttgtcagctgtatcaacacatcccagcatcgtcaaggagacactgcctctgctgctgcagcatctctggcaagtgaacagagggaatatggttgcacaatccagtgacgttattgctgtctgtcagagcctcagacagatggcagaaaaatgtcagcaggaccctgagagttgctggtatttccaccagacagctataccttgcctgcttgccttggctgtgcaggcctcttatngccagaagaagggagccctcagttctgagaaaagtactattgggaggatgaggtggtgggctgcccatggttgtctgttcattgggcactgcctc

SEQ ID NO: 162679 - DNA, 269 bp, Homo Sapiens
cgcgtcgacaagcagtccctgcccccatcctgcccctctgctgggagggtgtctgcttctccccgccagccctcgatcccctaaacctccttctttcagaaggctggggaagcgaggcctggggagggaagggactcacctgcccggcagatggggtcctcacctgcccgctgctgccagctacacctccgttgcccaggccctgggatcaaaccctgcccaccagctccccgttgatccggccgcgaatttagtagtagtagtcgacc

SEQ ID NO: 162680 - DNA, 1060 bp, Homo Sapiens
gtttaaatggtagagtagcttaaaaagttgtcatagtttcagtaggtcatagggagatgagtttgtatgctgtactatgcagcgtttaaagttagtgggttttgtgatttttgtattgaatattgctgtctgttacaaagtcagttaaaggtacgttttaatatttaagttattctatcttggagataaaatctgtatgtgcaattcaccggtattaccagtttattatgtaaacaagagatttggcatgacatgttctgtatgtttcagggaaaaatgtctttaatgctttttcaagaactaacacagttattcctatactggattttaggtctctgaagaactgctggtgtttaggaataagaatgtgcatgaagcctaaaataccaagaaagcttatactgaatttaagcaaagaaataaaggagaaaagagaagaatctgagaattggggaggcatagattcttataaaaatcacaaaatttgttgtaaattagaggggagaaatttagaattaagtataaaaaggcagaattagtatagagtacattcattaaacatttttgtcaggattatttcccgtaaaaacgtagtgagcacttttcatatactaatttagttgtacatttaactttgtataatacagaaatctaaatatatttaatgaattcaagcaatatatcacttgaccaagaaattggaatttcaaaatgttcgtgcgggtatataccagatgagtacagtgagtagttttatgtatcaccagactgggttattgccaagttatatatcaccaaaagctgtatgactggatgttctggttacctggtttacaaaattatcagagtagtaaaactttgatatatatgaggatattaaaactacactaagtatcatttgattcgattcagaaagtactttgatatctctcagtgcttcagtgctatcattgtgagcaattgtcttttatatacggtactgtagccatactaggcctgtctgtggcattctctagatgtttcttttttacacaataaattccttatatcagccagggta

SEQ ID NO: 162681 - DNA, 812 bp, Homo Sapiens
  misc_feature (606)..(606): n is a, c, g, or t
  misc_feature (695)..(695): n is a, c, g, or t
  misc_feature (723)..(723): n is a, c, g, or t
  misc_feature (740)..(740): n is a, c, g, or t
  misc_feature (753)..(753): n is a, c, g, or t
  misc_feature (767)..(767): n is a, c, g, or t
  misc_feature (776)..(776): n is a, c, g, or t
  misc_feature (779)..(779): n is a, c, g, or t
attctcagcagcctgcagttttggaagaagtagagtgcatgatagctcatgttcatccacaggaagtctacaatgaatatgtacccagagggtgcaagaataaatgccattcacatttccacgatacactcggccagtcagacgatctcattcaccaccatcatgactaccatcatattctccatcatcaccaccaccaaaaccaccatcctcacagtcacagccagcgctactctcgggaggagctgaaagatgccggcgtcgccactctggcctggatggtgataatgggtgatggcctgcacaatttcagcgatggcctagcaattggtgctgcttttactgaaggcttatcaagtggtttaagtacttctgttgctgtgttctgtcatgagttgcctcatgaattaggtgactgtgctgttctacgaaaggctggcatgaccgtgaagcaggctgtcctgttataatgcattgtcagccatgctgggcgtatcttggaatggcaacaggaattttcattggtcattatgctgaaaatgtttctatgtggatatttgcacttactgctggcttattcatgtatgttgctctgggtgatatggnacctgaaatgctgcacaatgatgcctagtgaccatgggatgtagccgtgggggggtatttctttttacaaaaatgctgggatgcttttngggttttgggaattatgttacttatttncatatttgacataaaanccgggtttcgatnaatttctagttaanggttaaatnttngagtagctaaaaagtgcatagtttaggagggct

SEQ ID NO: 162682 - DNA, 1931 bp, Homo Sapiens
  misc_feature (1063)..(1063): n is a, c, g, or t
  misc_feature (1073)..(1073): n is a, c, g, or t
  misc_feature (1080)..(1080): n is a, c, g, or t
  misc_feature (1096)..(1096): n is a, c, g, or t
  misc_feature (1113)..(1113): n is a, c, g, or t
  misc_feature (1195)..(1195): n is a, c, g, or t
  misc_feature (1244)..(1244): n is a, c, g, or t
  misc_feature (1253)..(1253): n is a, c, g, or t
aagctactgacatctcatggcatgggcatccaggttccgctgaatgcaacagagttcaactatctctgtccagccatcatcaaccaaattgatgctagatcttgtctgagttcatacaagtgaaaagaagggctgaaatccctccaaaggacctagttcattacaaatagcctgggttggtggttttataaccatttccatcatcagtttcctgtctctgctgggggttatcttagtgcctctcatgaatcgggtgtttttcaaatttctcctgagtttccttgtggcactggccgttgggactttgagtggtgatgcttttttacaccttcttccacattctcatgcaagtcaccaccatagtcatagccatgaagaaccagcaatggaaatgaaaagaggaccacttttcagtcatctgtcttctcaaaacatagaagaaagtgcctattttgattccacgtggaagggtctaacagctctaggaggcctgtatttcatgtttcttgttgaacatgtcctcacattgatcaaacaatttaaagataagaagaaaaagaatcagaagaaacctgaaaatgatgatgatgtggagattaagaagcagttgtccaagtatgaatctcaactttcaacaaatgaggagaaagtagatacagatgatcgaactgaaggctatttacgagcagactcacaagagccctcccactttgattctcagcagcctgcagtcttggaagaagaagaggtcatgatagctcatgctcatccacaggaagtctacaatgaatatgtacccagagggtgcaagaataaatgccattcacatttccacgatacactcggccagtcagacgatctcattcaccaccatcatgactaccatcatattctccatcatcaccaccaccaaaacaccatcctcacagtccccggcccaggggctaatccctgcggaaggagcgtgaagagagtgcgcgggtgtcgccatcttgtggcccgtggtagtgtgttataagtggggtgagtggcctgcacaaatttcagcgatggcctagcaatntggtgctgcnttttacntgaaggcttatcaagntggtttaacgtacttcntgttgcttgtgttccttgtcatgagttgcctccatgaattagcgtgactttgcttgttcttaactaaaggctggcattgacncagttaacgcaggctgtcctttataaatgcatttgtcagccatgctggncgtatcttnggaatggcaacagcgaattttcattcggtcattatgcgtgaaaattgttctatgctggatatttgcacttacttgctggcttattcatgtatgtcgctctggttgatatggtacctgaaatgctgcacaatgatgctagtgaccatggatgtagccgctgggggtatttctttttacagaatgctgggatgcttttgggttttggaattatgttacttatttccatatttgaacataaaatcgtgtttcgtataaatttctagttaaggtttaaatgctagagtagcttaaaaagttgtcatagtttcagtaggtcatagggagatgagtttgtatgctgtactatgcagcgtttaaagttagtgggttttgtgatttttgtattgaatattgctgtctgttacaaagtcagttaaaggtacgttttaatatttaagttattctatcttggagataaaatctgtatgtgcaatacaccggtattaccagtttattatgtaaacaagagatttggcatgacatgttctgtatgtttcagggaaaaatggccttaatgctttttcaagaactaacacagttatttctatactggattttaggccctgaggaactgctggtgtttaggaataggaatgtgcagaaggccaaaataccaggagagctatactgatttaagcc

SEQ ID NO: 162683 - DNA, 865 bp, Homo Sapiens
tgggtcttggggaccttcgaaatcgccgccgctctcacaatggcttgggtccagactgcgccacagcctctcgggagacgtgggccctcggaacctttttagtgccggactccgggccgcaggcagtcccgcggcagcaggatcacagaacctctggatggactcttcctgggaagctttgctactttgcagcagctggaccatgttcctcattaacatctgtctgtccgcttagtcatcacatcatttcactgtggtggcagggactcagctcggaattctgtatagaaaaagcacctggatcccagtctttcaatggcttcaagacaaccagaagtgcctgctcttgaggctagtgcgcctctaggcaagatgtccctgcccatcgggatataccgccgggcagtcagctatgatgataccctcgaggaccctgcgcccatgactcctcctccatcggacatgggcagcgtcccttggaagccagtgattccagagcgcaagtatcagcacctcgccaaggtggaggaaggagaggccagtctaccctcccctgccatgaccctgtcatcagccattgacagtgtggacaaggtcccagtggtgaaggctaaagctacccatgtcatcatgaattctctgatcacaaaacagacccaggaaagcattcagcattttgagcgacaggcagggctgagagatgctggctacacaccccacaagggcctcaccaccgaggagaccaagtaccttcgagtggccgaagcactccacaaactaaagttacagagtggagaggtaacaaaagaagagaggcagcctgcatcagcccagtccaccccaagcagcatctccgctttggaaa

SEQ ID NO: 162684 - DNA, 1090 bp, Homo Sapiens
  misc_feature (32)..(32): n is a, c, g, or t
agggagagaggagagactcctggctacccggncagcagagtacagtccagccacacagtggggacacctctgatctccataaacatggacactgctgccccgacacaggtggccccatcggagggcaggaaggacaaggaaaagagctccagctgccagaacactctcaacctcctctctttgcatagttaaactaaagagagaatgaggctggagccagggaaggtggacgggcagagtggggagctgctcggggccccgcaatctgagggccatctataccaccttccctggccagtgccctcccagggccttgcaccctgcacctactgtgggctctgccttctctgacaccaggcacgagaggcctgagctcaaccacatagcttttattgttttacctcgggtagcggtggggactgttaccccaggggctttggcctcttacctggtgcaggcaactctctgcctggtgatctcaagatggagacatccctcacttactcatcagcgtggctaagccaagccagcctccgttcacggtaagaccaaacgtttcaaaactggctctaacgagcttaagaacaggacattaaacaaagcatcatgctgcaactgtttacatgtattggaaaaataactagatgcacataataaccttgcgcaggcactaggcaacaatttaaaatcgattttaaaaaggatcctattgtggaattcatccttacggtctacagggagaagtttgaaaaactggatcaagaaagtattaaacttctgtaccctgacaataagcaggcgatgttggaccagtatagctgtcaccttaaaataaattcttctcattatcttgcatgttattaactatggaaagtgaaaacaaagatcaattctaatctggggatccaagccatagggaaacccactgccaatgcccaaggttaccttcctggatgagaaactgaaactgaaggccaccaggggcctctgccgaagtcatgagagacgaacatgcccgggtggaaacgggccgtggacagggcaggctccagctgctccgtggtttgacagcaggcagtctggggagggg

SEQ ID NO: 162685 - DNA, 903 bp, Homo Sapiens
  misc_feature (100)..(100): n is a, c, g, or t
gcaagccaatatgtccaaaaattgtccatcagaaatgaacataaaggacctccagagcaagtgggactgtctgtcaaaagactctgtatatcttttgtgnatgagttttgtgagagaacagagagaccattgtacctggcacaagggctgttcatgaaaagggagacttactgggaggtgcaagacagtggcatttctcctctcctcttgctgctcagcacagccctggattgcagccccgaggctgagaccagacaaagcccgggaggcagaaagatgctccaagaaccaacactatcaatgtctttgcaaatcctcacaggattcctgtgggtccagctttggaactgggaaacctttcttcggatccgcactcattccactgatgccagctgcccctgaaggatgccagtactgtggtgtgtgagtctcagcagccgcccacacgctcctaactctgctgcatggcagatgcctaggtggaaatagcaaaaacaaggcccaggctgggccagggccagaggggaaggccctggattctcactcatgtgagatcttgaatctctttctttgttctgtttgtttagttagtatcatctggtaaaatagttaaaaaacaacaaaaaactctgtatctgtttctagcatgtgctgcattgactctattaatcacatttcaaattcaccctacattcctctcctcttcactagcctctctgaaggtgtcctggccagccctggagaagcactggtgtctgcagcacccctcagttcctgtgcctcagcccacaggccactgtgataatggtctgtttagcacttctgtatttattgtaagaatgattataatgaagatacacactgtaactacaagaaattataaatgtttttcacatcaaaacg

SEQ ID NO: 162686 - DNA, 301 bp, Homo Sapiens
  misc_feature (131)..(131): n is a, c, g, or t
agctggcatccagtggaaagaagtgcggatccagaagaaaaggtttcccagttccaaaagctgggaccccacaggaatcctgtgaggattttgcaaagacattgatagtgttggttcttgaagcatctttntgcctcccgggctttgtctggtctcagctcggggctgcaatccagggctgtgctgagcagcaagaggagaggagaaatgccactgtcttgcacctcccagtaagtctcccttttcatgaacagcccttgtgccaggtacaatggtctctctgttctctcacatcaaaacg

SEQ ID NO: 162687 - DNA, 1500 bp, Homo Sapiens
  misc_feature (858)..(966): n is a, c, g, or t
  misc_feature (1068)..(1105): n is a, c, g, or t
ccagccctcacataccttagggaatggcaggttcaagttccacttcttggtggggatgagaagggagagagagctagagggacaaagagaatgagaagacatggatgatctgggagagtctcactttggaatcagaattggaatcacattctgtttatcaagccataatgtaaggacagaataatacaatattaagtccaaatccaacctcctgtcagtggagcagttatgttttatactctacagattttacaaataatgaggctgttccttgaaaatgtgttgttgctgtgtcctggaggagacatgagttccgagatgacccaatctgcctttgaatctggaggaaataggcagaaacaaaatgactgtagaacttattctctgtaggccaaatttcatttcagccacttctgcaggatccctactgccaacctggaatggagacttttatctacttctctctctctgaagatgtcaaatcgtggtttagatcaaatatatttcaagctataaaagcaggaggttatctgtgcagggggctggcatcatgtatttaggggcaagtaataatggaatgctactaagatactccatattcttccccgaatcacacagacagtttctgacaggcgcaactcctccattttcctcccgcaggtgagaaccctgtggagatgagtcagtgccatgactgagaaggaaccgacccctagttgagagcaccttgcagttccccgagaactttctgattcacagtctcattttgacagcatgaaatgtcctcttgaagcatagctttttaaatatctttttccttctactcctccctctgactctaagaattctctcttctgnnnnnnnnnnnnnnnnnnnnnnnnnnnnnnnnnnnnnnnnnnnnnnnnnnnnnnnnnnnnnnnnnnnnnnnnnnnnnnnnnnnnnnnnnnnnnnnnnnnnnnnnnnnnnttattctgtaccatcacaacttttcacaacgatggcaagccttatgtcttgggagcctgttttgctaggcaaagttacaagtgacctaatgggagctcaaannnnnnnnnnnnnnnnnnnnnnnnnnnnnnnnnnnnnncactcaagacctctaacagcctcgaagcctggggtggcatcccggccttgccattagcatgcctcatgcatcatcagatgacaaggacaaccctcatgacgaagcaacatgaattagggggcctcttggccttgggtcaaaattgtcaatcagaaatgaacataaaggactccagagcagtgggactgtctgtcaaaagactctgtatatctttttgtggatgagttttgtgagaagacagagagaccattgtacctggcacaagggctgttcatggaaagggagacttactgggaggtggcagacaggggcatttctcctctcctcttgctggctcagcacagccccgggattgcagcccccgaggcctgagaacaagaccaagcccccgggag

SEQ ID NO: 162688 - DNA, 504 bp, Homo Sapiens
agactgtcacacgcggctaggactggttccacggacacacgattttgtggcattgacacaccacgatgcgatgccaggccacagtgggtgccaggaggggagtgaagcagctaatgctatgcccacactcgccttcaggcagtgctgccgggagggaggcccggcagtgtctgctggtaataatacatttcacacagggagggggaaccccaaggatgggctttggaggcccagaaggcctgtcaggtggtgttgattttccatctccagccaataaataactctgttggatgaatgcatacattagaaatggatgccactacacttcacacgtgggggaccaggtcaaaatcaaaccatgcaaagtggcagggcaagtgaggaggtcttgacctcctagccccacggacacacgattttgtggcattgacacaccacgatgcgatgccaggccacagtgggtgccaggaggggaggaagcagctaatgctatgcccacaatcg

SEQ ID NO: 162689 - DNA, 1250 bp, Homo Sapiens
  misc_feature (1208)..(1208): n is a, c, g, or t
  misc_feature (1222)..(1222): n is a, c, g, or t
  misc_feature (1228)..(1228): n is a, c, g, or t
aggatagcccggacccggacgcaagtcctagacgatcaactgtcgattctggagaaaagaaacttgggtctctgaagatgcccccggatactacagcgtattcagagatctggcccttcggaaagaggaatcccttcattggtgaaagtccgattaaagatgtttgcggacgagtttcacccaggtacataaccactggatcatcttctcatacctttgtttgcccagcatttagggaatattcggtccaccagtctgtcgtagtgtgtcctgatatcagtccagacacccgttgtccccgaaggccccccactccatgttgatgcacatctgcccctggtccccctccaccatctccacgttcttcatctcctccatgtagcaggcattgctgccggtcccaacaatgagtccaacctcacaggtgggctcctcataagcacaggtcatcatggtgcccactgtgtcgttgaccacagccaccacgtccaggtcaaattcctctctccttgtttatcgcatcccttagtaaggtgactacatcgtggcccacgcagtctgttgccttaaaaccctttgtccacgtgatcaagattcccgcgtccagactcgtctgctggcagggaaatgagaacgtgaagcccagaggcatcctggggcctttgatccccatgtagtccaagaagtcagagatgcaggagacaatgtgatcaaacagctcttccccagtgccctgcatgatttcaataggaatggcgtagatcttgttgtgcatttccaccgttctctttttcccactacggattttcaccagcagcacacggaaattggttcctccaagatccagggccaagaagtcaccattctcggtcccgtcgggagttctccggacgaaggagggcagcatcttaaccacggcattgttgtgctctgcttcctcagccccagctccatctcggcccgcatcctcttcttcacctccagcagcatgtctttggtgaggtggaaatgagccagggtctcctctatctgccggtgctgctcggccaagcgggaggccaccgccgtcaccatggcagcccccttgccgctgccactctccgagaggaggaagcgcacatcggagtctggcaccaagcgccttagagtcttgtggaaacgccgggaatactgtgggtgcgtcttgtaaagagatccgtcgacaccanccgggtccgctgcnggaatnctcaaaagacgagctcgaattg

SEQ ID NO: 162690 - DNA, 1865 bp, Homo Sapiens
  misc_feature (19)..(19): n is a, c, g, or t
  misc_feature (89)..(89): n is a, c, g, or t
  misc_feature (98)..(98): n is a, c, g, or t
gaacggttttgttaaaaancggacgggcccaaggttgcccaaaggcttttggcaatggccttgcaagggttcgaactttttaaaaaggnattcccccnggtcaagcattttcccaagcaaggcggcacgggaaaatttgggttccctcccaaagatcccaggggcccaaagaaagtcacccatttcttcggtcccgtcgggaagttcttccggacgaaggagggcagcattttaaccacgggcattgttgtgctctgcttcctcagccccagctccatctcgggcccgcatcctcttcttcacctccagcagcatgtctttggtgaggtggaaatgagccagggtctcctctatctgccggtgctgctcggccaagcggtaggccaccgccgtcaccatggcagcccccttgccgctgccactctccgagaggaggaagcgcacatcggagtctggcaccaagcgccttagagtcttgtggaaacgccgggaatactgtgggtgcgtcttgtaaagagatccgtcgacaccaaccgtggtccgcagcctgggtgtgcccttgttatcacgcaggcggttcaagatggcgcccagtgtggcagccaccaagttggctgagcgaaatgagacaatggtgcaaacgtgctggactgagacacagtcatcatcggacggctccactcccaggcgggtcaggatttctttggcattgtggaggccttccttattcctttcgatggctgacacatcactggtgttaaacttccctcgggtgagcagctccggggtgatccgcccttcaaataagaggccctccttggccatcttgactaggatcagtcgaaccagctctcccaagtacatgccactgaccatcttctcaaacagctgttttccagggttgagggatccccggtctatctccctgtcaaactctgtccggatgtcttctaatgatccatcgtctccaaaggctccccattctgtattgatacacatcctcccctcgtctccttccaccagatcaatgtgcctcagttcctccatgtagcaagcattggtgccagtgccgatgatcaggccgacttcacagtgctggtcgtcatagccacaggtcatcatggtgcccactgtgtcattcaccacagctacgatgttggcatcatagtcccctcgctttttgatggctttgttaagcagtttgaccacatctgctccttccactccgctcgctttaaatcgctttgtccaggtgatcaggatggcctcatctattttggattgttggcaaggaaaagaaaacgtgaatcccacaggtaacttcttgtccttgatcttccttttctccatgaaatctcccaggcactcagcaacatgatcaaaaagctggcttccactgccgtgcacgatgttctctggggtgtcataaacctcggactccatgtgaacattctggtttttctcatgattcacttgcacccgcagaattcgaaaggaagacccaccaagatccagggcaatgaaatctcccttttcagagccatcaggaatggaccttacgaatgttgacaacatctcgactgcgactgcttggattaaaatcccgggagaggccattcgtaatctccttcctgaagcgagtcatgatatctatgagagtttcatcggagagccgcatggcatagagatacttgtcaatctttttgacctggtcatccttcagctccgtgaagtaataggccaggagctgcgcggcgatcatgctggcggtcggggtcgcggggcggcaggcgtggggacggtcggtcctccgcagccctggcgagccgtggtcctccggcggctgctcggcggctcctcctccc

SEQ ID NO: 162691 - DNA, 1168 bp, Homo Sapiens
  misc_feature (420)..(561): n is a, c, g, or t
caccaccttgaacagggcctttggggccttacaaaagccccattcttggggtttcccccctccttgtgtgaaattgtattaccacaggcagacactgccgggcctcctcccgggggcactgcctgaaggcgagtgtgggcatagcattagctgcttcctcccctcctggcacccactgtggcctggcatcgcatcgtggtgtgtcaatgccacaaaatcgtgtgtccgtggaaccagtcctagccgcgtgtgacagtcttgcattctgtttgtctcgtggggggaggtggacagtcctgcggaaatgtgtcttgtctccatttggataaaaggaaccaaccaacaaacaatgccatcactggaatttcccaccgctttgtgagccgtgtcgtatgacctagtaaactttgtaccaattcnnnnnnnnnnnnnnnnnnnnnnnnnnnnnnnnnnnnnnnnnnnnnnnnnnnnnnnnnnnnnnnnnnnnnnnnnnnnnnnnnnnnnnnnnnnnnnnnnnnnnnnnnnnnnnnnnnnnnnnnnnnnnnnnnnnnnnnnnnnnnnttggacagtcataatgacagacaggagagtcgaggagtagtgaatgcacgatatgaagagcctggtaaagattatcgagctcctcgtactgcaagtctgaaatagggcccagcatagagggtgataaagaagaacatctctatgaactggaccagtaaaagtgtatgcatatgtttaacgaaacaagcatatatggacatctggataaacatgaacctttacaaaatgcgtaaaaactataaaaactaatatacggagacacgttactgaaaaaaagaattcgtcatcagatgcatcctgagttgttacaccctttaatcacacttgattgcacccggtcagagggccctcactgaaccaattacttgaggtacagtaaaaatatggttaaaaacttaacaatggtccaaacaacatcccagatctatcccttagcgccaaacgttcattaataacgcgggaagacctggtggattcataggacagaattgagccacactgaacctttggatcaaggtacagtactcaggggtataaaaccatttatatcttcctttcattgccccaaggacgtggtatttttggtgaaagaaggtctcatacatat

SEQ ID NO: 162692 - DNA, 1254 bp, Homo Sapiens
gggaccgagaatggtgacttcttggccctggatcttggaggaaccaatttccgtgtgctgctggtgaaaatccgtagtgggaacaaagagaacggtggaaatgcacaacaagatctacgccattcctattgaaatcatgcagggcactggggaagagctgtttgatcagcagtgggtcgtccgtggccatcgtgcgtgcaccgtttcgtgtgccgcaccttaacaagtgggagttcattcaaagaaggggcgcgcggaaaagggggaattggcacgtttcattgtggggggccttttacaaacggattttcctttccgagtttttcttccgccgccctttggacccccaaagaccaaaggaaacccttgaatggcttccctaagggagccgctggcgaaagtcttgagtcacgtggacaaagggttttaaggcaacagactgcgtggtgccacgatgtagtcaccttactaagggatgcgataaaaaggagagaggaatttgaccctgtgacgtggtggctgtggtcaacgacacagttgggcaccatgatgacctgtgcttatgaggagcccacctgtgaggttggactcattgttgggaccggcagcaaatgcctgctacatggaggagatgaagaacgtggagatggtggagggggaccaggggcagatgtgcatcaacatggagtggggggcctttggggacaacgggtgtctggatgatatcaggacacactacgacagactgggtggacgaatattccctaaatgctgggaaacaaaggtatgagaagatgatcagtggtatgtacctgggtgaaatcgtccgcaacatcttaatcgacttcaccaagaagggattcctcttccgagggcagatctctgagacgctgaaaacccggggcatctttgagacccagtttctctctcagatcgagagtgaccgattagcactgctccaggtccgggctatcctccagcagctaggtctgaatagcacctgcgatgacagtatcctcgtcaagacagtgtgcggggtggtgtcccagagggccgcacagctgtgtggcgcaggcatggctgcggttggggataaaatccgcgagaacagaggactggaccgtctgaatgtgactgtgggaattggcacggaacattctataagccttcttccacactttctccaaaatcctgccaccataaccgttaaaggaactgttcaccaaaaatgtaaccttgttcccctcccttcct

SEQ ID NO: 162693 - DNA, 923 bp, Homo Sapiens
ggacgggacactctacaagcttcatccacacttctccagaatcatgcaccagacggtgaaggaactgtcaccaaaatgtaacgtgtccttcctcctgtctgaggatggcagcggcaagggggccgccctcatcacggccgtgggcgtgcggttacgcacagaggcaagcagctaagagtccgggatccccagcctactgcctctccagcacttctctcttcaagcggcgaccccctaccctcccagcgagttgcgctgggagacgctggcgccagggcctgccggcgcggggaggaaagcaaaatccaactaatggtatatattgtagggtacagaatagagcgtgtgctgttgataatatctctcacccggatccctcctcacttgccctgccactttgcatggtttgattttgacctggtcccccacgtgtgaagtgtagtggcatccatttctaatgtatgcattcatccaacagagttatttattggctggagatggaaaatcacaccacctgacaggccttctgggcctccaaagcccatccttggggttccccctccctgtgtgaaatgtattatcaccagcagacactgccgggcctccctcccgggggcactgcctgaaggcgagtgtgggcatagcattagctgcttcctcccctcctggcacccactgtggcctggcatcgcatcgtggtgtgtcaatgccacaaaatcgtgtgtccgtggaaccagtcctagccgcgtgtgacagtcttgcattctgtttgtctcgtggggggaaggtggacagtcctgcggaaatgtgtcttggctccatttggataaaaggaaccaagcaacaaacaatgccatcactggaatttcccaccgctttgtgagccgtgtcgtatgacctagtaacttggtaccaattcaaac

SEQ ID NO: 162694 - DNA, 1131 bp, Homo Sapiens
  misc_feature (12)..(12): n is a, c, g, or t
  misc_feature (61)..(61): n is a, c, g, or t
  misc_feature (79)..(79): n is a, c, g, or t
  misc_feature (98)..(98): n is a, c, g, or t
  misc_feature (383)..(524): n is a, c, g, or t
ggggtccccccncccctgtgtgaaaatgtattatccccaagcagaaaactgccggggcctncctcccgggggcaactgnctgaaggcgaagtgtgggncatagcattagctgcttccctcccctccctggcaccccactgtggccctggcatcgcatcgtggtgtgtcaatgcccacaaaatcgtgtgtccgtggaaccagtcctagccgcgtgtgacagtcttgcattctgtttttctcgtggggggaggtggacagtctgcggaaatgtgtcttgtctccatttggataaaaggaaccaaccaacaaacaatgccatcactggaatttcccaccgctttgtgagccgtgtcgtatgacctagtaaactttgtaccaattcnnnnnnnnnnnnnnnnnnnnnnnnnnnnnnnnnnnnnnnnnnnnnnnnnnnnnnnnnnnnnnnnnnnnnnnnnnnnnnnnnnnnnnnnnnnnnnnnnnnnnnnnnnnnnnnnnnnnnnnnnnnnnnnnnnnnnnnnnnnnnnttggacagtcataatgacagacaggagagtcgaggagtagtgaatgcacgatatgaagagcctggtaaagattatcgagctcctcgtactgcaagtctgaaatagggcccagcatagagggtgataaagaagaacatctctatgaactggaccagtaaaagtgtatgcatatgtttaacgaaacaagcatatatggacatctggataaacatgaacctttacaaaatgcgtaaaaactataaaaactaatatacggagacacgttactgaaaaaaagaattcgtcatcagatgcatcctgagttgttacaccctttaatcacacttgattgcacccggtcagagggccctcactgaaccaattacttgaggtacagtaaaaatatggttaaaaacttaacaatggtccaaacaacatcccagatctatcccttagcgccaaacgttcattaataacgcgggaagacctggtggattcataggacagaattgagccacactgaacctttggatcaaggtacagtactcaggggtataaaaccatttatatcttcctttcattgccccaaggacgtggtatttttggtgaaagaaggtctcatacatat

SEQ ID NO: 162695 - DNA, 395 bp, Homo Sapiens
  misc_feature (19)..(19): n is a, c, g, or t
  misc_feature (31)..(31): n is a, c, g, or t
aacttcccccccaacgaanaaaaaacagaangcaaagactgtcaacacgcggcctaggaactggttccccacggaacaacacgattttgtggccattgaacaacacccacgaatgcgaatgcccaggcccacagtgggtgcccaggaggggaggaagcagctaatgctatgccccacactcgcctttcaggcagtgcccccgggagggaggcccggcagtgtctgctggtgataatacatttcacacagggagggggaaccccaaggatgggctttggagcccagaaggcctgtcaggtggtgtgattttccatctccagccaataaataactctgttggatgaatgcatacattagaaatggatgccactacacttcacacgtgggggaccagg

SEQ ID NO: 162696 - DNA, 724 bp, Homo Sapiens
ctgcccacgaagtgatgaactcgtcccaccaatctccatataattgtaggctccaatctgaatgccagtactagtgtatatggtatattttatagattcatctgttggtagcaaggagctgaatggcatggtgggtgtatttcctagatagttgttctcaggcactgggatattatgcagactaggcatatgacttggaattggcctgtaccaaactaaaggacctgctgttcctggatccagtggtcttgttccaaagccatgtgagctatataatccattgttctgatacagtacttgaggttggctggtgaaccctgagggctggtgcactgcattaccatgactggctgcactggaataagcagtgccttttccctctgtattctgaaaattctcgtaaggtctttgctgtgcaaaagggtcatgggagaacctgcgtctcctttcctcctctctgttgtaagccacattctgtctgggctgctgtttcgtctgcctgtccatgcggctgccataaagatggtagttggcttcgtcttggagtttactctgcaggctgggctcattctcttcttgtgggtgctccagggaaggagcaaaccaggactcctccacaggacccatcccaagtccctgggaactgtgcagtgaaccaggctgttctgtggctgaatttgaccggcttgaaggtactgccacacaatcaagttgaagagactgc

SEQ ID NO: 162697 - DNA, 1117 bp, Homo Sapiens
ggcctgggtggcgaattcggcacgagggtcttctgggcctgtggagtttcttggacaggggccgcggggctccaggacggcgcccttagcgacaccatggcccgaaatgcagaaaaggccatgacggccttagcaagatttcgccaggctcagctggaagagggaaaagtgaaggaacgaagaccctttctggcctcagaatgtactgaactgcctaaagctgagaagtggagacgacagatcattggagagatctctaaaaaagtggctcagattcagaatgctggtttaggtgaatttcgaattcgtgacctgaatgatgaaattaacaagctgctaagggagaaaggacactgggaggtccggataaaggagctgggaggtcctgattatggaaaagttggccctaaaatgctggatcatgaaggaaaagaagtcccaggaaaccgaggttacaagtactttggagcagcaaaagatttgcctggtgttagagagctgtttgaaaaagaacctcttcctcctcccagaaagacacgtgctgagctcatgaaggcaatcgattttgagtactatggttacctagatgaagatgatggtgttattgtgcctttggaacaggaatatgaaaagaaactcagagccgagttagtggaaaagtggaaagcagagagagaggctcggctggcaagaggagaaaaggaataggaaggagaaaaagaaggagagatcaacatctatgccgtcaccgaggaggagtccggaccaggaaagccacccaggaagaaaggaggggaagacggccagcagaaattcattggcttccgtcccctggttcctccccagcaaagagaatggagggaggcgcctggtggccaaagggaagaaaatggggacctcctcccaaaaattattgcaagccgagacccctggcaggggcccaaagaggaacaaaagcccaaaggggtccctgtgggggtatttaggaacccagctggggggctcccccttgggagatttcttccaatcccccccaggggttaccttcagggacccccgggtttgccaaaacacaaggcctgggtgcgttccaaaggggttccctggcccccttttt

SEQ ID NO: 162698 - DNA, 885 bp, Homo Sapiens
  misc_feature (194)..(194): n is a, c, g, or t
  misc_feature (208)..(208): n is a, c, g, or t
atttctttccctttgcgccccccaaagtggccttcccctccaatttttcttgctggcgaagggaacccggggaccttgaagcaaatgaacttttctggtgggcgtgtcgtccccctccttttcctccttggctgcccttcttcgtccgacttcctccctcggtgactgcatagatgttgatctcttcctccctnttcctccttcctcnttccttttctcctcttgccagccgagcctctctctctgctttccacttttccactaactcggctctgagtttcttttcatattcctgttccaaaggcacaataacaccatcatcttcatctaggtaaccatagtactcaaaatcgattgccttcatgagctcagcacgtgtctttctgggaggaggaagaggttctttttcaaacagctctctaacaccaggcaaatcttttgctgctccaaagtacttgtaacctcggtttcctgggacttcttttccttcatgatccagcattttagggccaacttttccataatcaggacctcccagctcctttatccggacctcccagtgtcctttctcccttagcagcttgttaatttcatcattcaggtcacgaattcgaaattcacctaaaccagcattctgaatctgagccacttttttagagatctctccaatgatctgtcgtctccacttctcagctttaggcagttcagtacattctgaggccagaaagggtcttcgttccttcacttttccctcttccagctgagcctggcgaaatcttgctaaggccgtcatagccttttctgcatttcgggccatggtgtcgctaagggcgccgtcctggagccccgcggcccctgtccaagaaactccacaggcccagaaga

SEQ ID NO: 162699 - DNA, 1163 bp, Homo Sapiens
  misc_feature (322)..(384): n is a, c, g, or t
  misc_feature (1071)..(1071): n is a, c, g, or t
  misc_feature (1079)..(1079): n is a, c, g, or t
  misc_feature (1083)..(1083): n is a, c, g, or t
ggggacactgggaggtccggataaaggagctgggaggtcctgattatggaaaagttggccctaaaatgctggatcatgaaggaaaagaagtcccaggaaaccgaggttacaagtactttggagcagcaaaagatttgcctggtgttagagagctgtttgaaaaagaacctcttcctcctcccagaaagacacgtgctgagctcatgaaggcaatcgattttgagtactatggttacctagatgaagatgatggtgttattgtgcctttggaacaggaatatgaaaagaaactcagagccgagttagtggaaaagtggaaagnnnnnnnnnnnnnnnnnnnnnnnnnnnnnnnnnnnnnnnnnnnnnnnnnnnnnnnnnnnnnnntcaacatctatgcagtcaccgaggaggagtcggacgaggaaggcagccaggagaaaggaggggacgacagccagcagaagttcattgctcacgtccctgttccctcgcagcaagagattgaggaggcactggtgcgaaggaagaaaatggaactcctccagaagtatgcaagcgagaccctgcaggcccaaagtgaagaagccagaaggctcctggggtattaggacccagctggggctctccttggagttcttccatcccccagtggtacctcaggacccagggctgcagacacaggctggtgctgcaagggctcctgccccattctcagccttccttccctctccttgtctcatgttgaccggagggtaggggtctgtccctggtcttcctggtaggttttgtacacatattttgctactgtgtggatccatttatttttattgtggagtgtatacaacaggttgcgaactggctgcctgtgtcttattttgacttgcactgccattttgaggggagaagaatcaattagtggcaaacatttaaaaatgcaattttttgcagaccaaagtataatttttaaaaatgcaaatttttctaaaagacacatcctctttgaaaaaatgagatgatgtgggcccaggcgcagtgggctcacgccctgtaaccccccagcacctttggggnaaggccgnaggncggggccgggggtccacgaagggttcaagggaggatgggaggaacccttccccttgggcccaaaacattggggtggaaat

SEQ ID NO: 162700 - DNA, 888 bp, Homo Sapiens
  misc_feature (187)..(248): n is a, c, g, or t
cgccagggtctcgcttgcatacttctgagggagttccatttctttccttcgcaccagtgcctcctcaatctcttgctgcgagggaacagggacgtgagcaatgaacttctgctggctgtcgtcccctcctttctccctggctgccttcctcgtccgactcctcctcggtgactgcatagatgttgannnnnnnnnnnnnnnnnnnnnnnnnnnnnnnnnnnnnnnnnnnnnnnnnnnnnnnnnnnnnngctttccacttttccactaactcggctctgagtttcttttcatattcctgttccaaaggcacaataacaccatcatcttcatctaggtaaccatagtactcaaaatcgattgccttcatgagctcagcacgtgtctttctgggaggaggaagaggttctttttcaaacagctctctaacaccaggcaaatcttttgctgctccaaagtacttgtaacctcggtttcctgggacttcttttccttcatgatccagcattttagggccaacttttccataatcaggacctcccagctcctttatccggacctcccagtgtcctttctcccttagcagcttgttaatttcatcattcaggtcacgaattcgaaattcacctaaaccagcattctgaatctgagccacttttttagagatctctccaatgatctgtcgtctccacttctcagctttaggcagttcagtacattctgaggccagaaagggtcttcgttccttcacttttccctcttccagctgagcctggcgaaatcttgctaaggccgtcatagccttttctgcatttcgggccatggtgtcgctaagggcgccgtcctggagccccgcggcccctgtccaagaaactccacaggcccagaaga

SEQ ID NO: 162701 - DNA, 763 bp, Homo Sapiens
ctgaacttcgtggccgcccaggagcgggaccagaagtgaagtccggagcgctgggcggtgcggagcgggcccgccacccttgcccacttctccttcgctttcctgagccctaaacacacgcgtgattggtaactgcctggcctggcaccgttatccctgcacacggcacagagcatccgtctcccctcgttaacacatggcttcctaaatggccctgtttacggcctatgagatgaaatatgtgattttctctaatgtaacttcctcttaggatgtttcaccaaggaaatattgagagagaagtcggccaggtaggatgaacacaggcaatgactgcgcagagtggattaaaggcaaaagagagaagagtccaggaaggggcggggagaagcctgggtggctcagcatcctccacgggctgcgccgtctgctcggggctgagctggcgggagcagtttgcgtgtttgggttttttaacttgagatgaacattcaaataacctaaaaatcaatcactagaaagtgaacaatcagcggcatttagtacatccagtaaagtcgtgtaggcaccacctctgtcacgttcctggaacattctgtcatcaccccgtgaagcaatcatttcccctcccgtcttcctcctcccctggcaacgtgctgatcgacttgggtgtctcatgtgtctaacaataggtttatcccgtgttctggacattttcatattaactggaatcacacaaatatcactatacacacaaaacaag

SEQ ID NO: 162702 - DNA, 1824 bp, Homo Sapiens
  misc_feature (977)..(977): n is a, c, g, or t
  misc_feature (1058)..(1058): n is a, c, g, or t
  misc_feature (1345)..(1363): n is a, c, g, or t
  misc_feature (1429)..(1460): n is a, c, g, or t
gctgattgccgctcggaaacacatggacaaggtggtgcagatcgtggagatcatgcagcaaggttctcagcttccttgcttccatggctccagcaccattcgaaacctcaaagagaggttccacatgagcatgactgaggagcagctgcagctgctggtggagcagatggtggatggcagtatgcggtctatcaccaccaaactctatgacggcttccagtacctcaccaacggcatcatgtgacacgctcctcagcccaggagtggtggggggtccagggcaccctccctagagggcccttgtctgagaaaccccaaaccaggaaaccccacctacccaaccatccacccaagggaaatggaaggcaagaaacacgaaggatcatgtggtaactgcgagagcttgctgaggggtgggagagccagctgtggggtccagacttgttggggcttccctgcccctcctggtctgtgtcagtattaccaccagactgactccaggactcactgccctccagaaaacagaggtgacaaatgtgagggacactggggcctttcttctccttgtaggggtctctcagaggttctttccacaggccatcctcttattccgttctggggcccaggaagtggggaagagtaggttctcggtacttaggacttgatcctgtggttggccactggcatggctgctgcccagctctacccctcccagggacctacccctcccagggaccgacccctggcccaagctccccttgctggcgggcgctgcgtgggccctgcacttgctgaggttccccatcatgggcaaggaagggaattcccacagccctccagtgtactgagggtactggcctagccatgtggaattccctaccctgactccttccccaaacccagggaaaagagctctcaattttttatttctaatttttgtttgaaataaagtccttagttagccacttgtgtcattncccaggttttctgggggagtgcagggggagatgggtgatgaggtatgaacggatgcctcagtgtccaagatacaaaaggcnccacatagaagtttgctttttccctgcctgtcttggtcactaccacctcttccctgagaagggcgggccttccatgttctctcacccgcttcaactccacattgtccaagtcacagaaaaagagaggcctgaatggagattcgaccacaaacagttttaatggtctggttttctccctagttccccaactgtttgttagtattattattactacaagaataaaggattcctgagagcctgtcccctcctctcctgtggcccccttgacaggactaatccctaccaannnnnnnnnnnnnnnnnnnggatttctggggaaaaaaagaagtgaaaggcactgcaggggtagggggcttgagtgccagtgagtnnnnnnnnnnnnnnnnnnnnnnnnnnnnnnnncactagggcagggcccggcctagaggaggaaagttccagtccatgcctgaaggaattgtggagaggtgtgtccatccatgacacccccatcagtccttccctgaacctgtctagcaggcatacctaagtcccatcctcccacccccaggcccacactgggggttctgcagcaggagcataaaattaattagtgttgggctcagaaaggaggaatggagggtccactctactaggactccagggccaaacccaaagggaggttgcaaataactagaataatcctcaaatgctcttcttcttcaggttggagagacaggaattaaccaaatactaatgttaatgaaaactccccagccgagggatc

SEQ ID NO: 162703 - DNA, 931 bp, Homo Sapiens
tcaagacgagctggtgggatcggacgagggaggctccccctacggcatctcccaattggcggctcctgtcagtcattgtcaagtgtggggatgaccttcggcaagagcttctggcctttcaggtgttgaagcaactgcagtccatttgggaacaggagcgagtgcccctttggatcaagccatacaagattcttgtgatttcggctgatagtggcatgattgaaccagtggtcaatgctgtgtccatccatcaggtgaagaaacagtcacagctctccttgctcgattacttcctacaggagcacggcagttacaccactgaggcattcctcagtgcacagcgcaattttgtgcaaagttgtgctgggtactgcttggtctgctacctgctgcaagtcaaggacagacacaatgggaatatccttttggacgcagaaggccacatcatccacatcgactttggcttcatcctctccagctcaccccgaaatctgggctttgagacgtcagcctttaagctgaccacagagtttgtggatgtgatgggcggcctggatggcgacatgttcaactactataagatgctgatgctgcaagggctgattgccgctcggaaacacatggacaaggtggtgcagatcgtggagatcatgcagcaaggttctcagcttccttgcttccatggctccagcaccattcgaaacctcaaagagaggttccacatgagcatgactgaggagcagctgcagctgctggtggagcaaatggtggatggcagtatgcggtctatcaccaccaaactctatgacggcttccagtacctcaccaacggcatcatgtgacacgctctcaacccagaaaatgggtgggggggcccggggcccccctccctaaagggcccctggttggaaaaaccccccaaccaggaaaa

SEQ ID NO: 162704 - DNA, 829 bp, Homo Sapiens
tgtcgctctagaggatcccctcatcttgggcctgtgttatccagttctgtgaagctgccacctccagcctcactctaaatagcttatacaaaatcaagttattcccatagctaacacaagtccagcaagctgtggtcctaaatgccatctacatttatatatttacttttttactgtgtacattaagaattttgttgtgcttttcacatatccgatgtatgttttcatattaaacattcctcagtttcttgggaaggaaagaaaaagatcatgaaaagaggtacatcaggagagtcggactgtaaagtaacattacacacacaactagccaaatctctttttaatttaaaagataatgtcatcacaaggcaacatatagaaatataaaagaaaataaagtatccaccctaaaatccctattattccatgatattttcacagcaactagtatatatatcaatatatttttcacaaaccattcagttacacattgtgtatgcttttagaatttaaaatatgtattaccatagcagtctaaacattgtacttttagggaaatgtgcggagacatggttcagtgatttgatcattgtgatgattatttacaatgctatctatttacgttagcaataaataatcctgatatcaaaaagagacaatactcatgcacaccaccaagatggctgcatgctcttaaaatatttacacatagctctgccatttatagctctcccattaagagtgaaagtgcgctttcttcaattctctccacatttccattagtcttgcttctgggggatgcatccttccatttctacaacttcaggcc

SEQ ID NO: 162705 - DNA, 1108 bp, Homo Sapiens
gggcacttgccggggtgaggggcagccggaggagtccgagaggaagcggaggcgcgagctggaggcggcggctcccgtcggcctccggcaggactgagcgctgggaggccggaaggcgggcgcgcacggcggagaggcgggcgggaggccggagcatattaatgaaaagtgccataaactgaaaaaccaaacatgagggtagcaggtgctgcaaagttggtggtagctgtggcagtgtttttactgacattttatgttatttctcaagtatttgaaataaaaatggatgcaagtttaggaaatctatttgcaagatcagcattggacacagctgcacgttctacaaagcctcccagatataagtgtgggatctcaaaagcttgccctgagaagcattttgcttttaaaatggcaagtggagcagccaacgtggtgggacccaaaatctgcctggaagataatgttttaatagagtggtgttaagaataatgttggaagagggatcaatgttgccttggcaaatggaaaaacaggagaagtattagacactaaatattttgacatgtggggaggagatgtggcaccatttattgagtttctgaaggccatacaagatggaacaatagttttaatgggaacatacgatgatggagcaaccaaactcaatgatgaggcacggcggctcattgctgatttggggagcacatctattactaatcttggttttagagacaactgggtcttctgtggtgggaagggcattaagacaaaaagcccttttgaacagcacataaagaacaataaggatacaaacaaatatgaaggatggcctgaagttgtagaaatggaaggatgcatcccccagaagcaagactaatggataatctggagagaattgtaagaaagcgcactttcactcttaatgggtagtagctattaatggcagagctatgtgctagatattttaagagcatgcagccatcttggtgttgtgcatgagtattgtctcttttgtatatctacggagttagtgtattgccgtgagctgtttatagattagcaattgaatatcgaggttgcccatgatcaaatcaatgagactatgtct

SEQ ID NO: 162706 - DNA, 2063 bp, Homo Sapiens
  misc_feature (1529)..(1620): n is a, c, g, or t
  misc_feature (1874)..(1882): n is a, c, g, or t
cagttacctgcatgcctaaaggagtaggcttgggggtggggagagagaaaacatagccttttctagttgttatataaagctgtgtaaaggcaaggctcgtttctactaaatggtcagctgtcactacaattatacttttgtatgccacaaaccctttcattcctccctgggaatcagggtagatcaggaggaactgggggggactagaacaccacgctcagtaaatccagtctaaactgggaggtaggggtattcctgttttctttaggacctcagagatgtaagcattttagcagccacacaaaatctctggctatgaaagggacttcatgaccatccagtccaatataacacttgcagacagagaaactgaggtcttccatgacttgcctagtctcccagctagtttgaggcaaaactggattcccactctggtattctttcttccctttacatcattttccctcctttataatgtcctgagagaccagaactcacaccagaatcgattattcctcaggtgaagcatagactctttcatggtagacagatttcacgactcagagatagaaatctcttgctatcatcaggtcacgggcagctcctgtggagtcctgcccaacttatgtggcttccataaaatggcaacagtccaggctccttgcctaattttagagcattaactccctaattgccagtaagcaaggaggtggatctctgcaaacctacactgtctatgacagctctagttgtacttggtgtgactaaatacctcaaaggcaacctgcttctgcaggttttgaagtgtcagcttcataagacactgaggtttagaattgtttgattctagaccataactgaagggcataaatggaaacaggatatgaagggaaacaagtagcatcatggagctgaaaagtggtgcatcacccaatggctagcacaaacaaggatacacactgtccattctcttgtctgctaaattaagcatgttctggcctcctttgcgtcatcttttcacaacagctggatagagggatcagaaatgactgtgtcatggtgctcattcactgcaaactcccagttgcaagctccttggctcccccggagggagcaagaatctcatagttcagagacacagagggccttttagccctaatgaccttttggatgggactgcaactcatgactatcctgatattggaagaaaggactttgttaatcttctcccccatagctctgctgcgtaggtctacatcttactcagaatcactacacattcctttagtcttcctccaagctccagagccattggtacaaatgctttattgaaactaaatacataatacacacaatgagatgaagacaatatagaagtccgcatagtcatcataatcccgttccttggccggttgaggcagctcagtggctgagcccagtcaagccaacccgcagcttcactcacgacttcaagatttgatgctaattcttttggatttctacagttattaaataagtgtctgagtggnnnnnnnnnnnnnnnnnnnnnnnnnnnnnnnnnnnnnnnnnnnnnnnnnnnnnnnnnnnnnnnnnnnnnnnnnnnnnnnnnnnnnnnnnnnntttgtggaaccccctggccccccaaaaaggttttcaaaaaatttctttaaaaactgggtcccggcgggaagggaaccaggaaattttttgtcccctgggggggccggccggggcccagggttgggatcccccccataaaaaaccccccggaggaacccgggggttataaaaagtgccgaaatggacccccaaagaaaataccgggggggcaacaaagggggttcccaaaacaaaccccaattgcaaatttgggnnnnnnnnnttgggtctttttccaaaagaggtggggaaaaccctttaaaaattttttggccgcccggggaaggccttccatataaggggtttgggggaaaccttaaattcccaaactggttcctccaaaacttgggacccccccctcccaaaataaatttttgccccacgtggggttaaccccggggggg

SEQ ID NO: 162707 - DNA, 552 bp, Homo Sapiens
cgactctagacgatacccataacacgtgtgtatcctggccttgggacaagccatctgtccaggcatttttggcacttcctttcctcacatctaacagtgttgcccctcccctagctacagattccagccactctctgtcattaaaacaagggtaactaatattagcaacaagctggattgaacgaaccagtgaaattggctttttcactgtttttctcctttgataccactctgccagctataaatctatccctataactctgcttcattgggattttattaattcaatagcagcttaatctaaaatctgatggtcctaatgataatgacgtttctagagccaagccacatggctctttctcaatcttgtctcttaagggtctcaaagtctctaaggagaaaactaaattaacaagttagccatgcatcgtgtaagcaactcgtatcatacatagaaactggatagacaagtacgattactgcacttgaaacatatctataaaggaaaaagacaaagtacgtcaacatatcaagttacggatcgtgatgaga

SEQ ID NO: 162708 - DNA, 689 bp, Homo Sapiens
ccctgggcgcgatatttctggtgaccatggtcctcctgggctgtgagctctggtctgcagtcatcatgtgtgccaccatcgccatggtcttggtcaacatgtttggagttatgtggctctggggcatcagtctgaacgctgtatccttggtcaacctggtgatgagctgtggcatctccgtggagttctgcagccacataaccagagcgttcacggtgagcatgaaaggcagccgcgtggagcgcgcggaagaggcacttgcccacatgggcagctccgtgttcagtggaatcacacttacaaaatttggagggattgtggtgttggcttttgccaaatctcaaattttccagatattctacttcaggatgtatttggccatggtcttactgggagccactcacggattaatatttctccctgtcttactcagttacatagggccatcagtaaataaagccaaaagttgtgccactgaagagcgatacaaaggaacagagcgcgaacggcttctaaatttctagccctctcgcagggcatcctgactgaactgtgtctaagggtcggtcggtttaccactggacgggtgctgcatcggcaaggccaagttgaacaccggatggtgccaaccatcggttgtttggcagcagctttgaacgtagcgcctgtgaactcaggtatacacacgt

SEQ ID NO: 162709 - DNA, 640 bp, Homo Sapiens
gtgtcagaggatcccaagatcaggtgtatccaattgattatctttctttatattctcaggtgaaaacttaaatatttaaaagtgttacgaaacaaagttttagtttttactctttaccaggtattttctacagtggtaaagagataggctaagccagggtgtagagttgaaccaagacgactctccaggcaccaaccgcacatcacacgctgggttctggcccgggctcccctgcattttaaatgggaaagactgccagctgtctcatgtttaacttgtctgttattttcctgcttcagcacactgccacctaaaaaggagccgtaccaacaggtacagttccacagaacgtccgttctgtccacgatgtggcagctaatccatgaattgcctgaaagcttgcaatccttagaagctgctttgtaagtacaggatccagactcttcagtcactgaggaggattactttgtggtgcgactctgccggcgtggccctgctcagggtactcacggagctgcccatgtgggcaagtgcctcttccgcgcgctccacgcggctgactttcatgctcaccgtgaacgctctggttatgtggctgcagaactccacggagatgccacagctcatcaccaggttgacc

SEQ ID NO: 162710 - DNA, 595 bp, Homo Sapiens
  misc_feature (18)..(18): n is a, c, g, or t
  misc_feature (32)..(32): n is a, c, g, or t
  misc_feature (40)..(40): n is a, c, g, or t
  misc_feature (46)..(46): n is a, c, g, or t
  misc_feature (55)..(55): n is a, c, g, or t
  misc_feature (585)..(585): n is a, c, g, or t
tagaggatcccccgcgtnctgagttccctcanctatgatntacggnctttaggtncttggtcgtcgtgaaaaagtgctgaacttggcttttgcgcagctcattcttggaatcccagaacaggccttaagtcttctccacatggccatcgagcccatcttggctgacggggctatcctggacaaaggtcgtgccatgttcttagtggccaagtgccaggtggcttcagcagcttcctacgatcagccgaagaaagcagaagctctggaggctgccatcgagaacctcaatgaagccaagaactattttgcaaaggttgactgcaaagagcgcatcagggacgtcgtttacttccaggccagactctaccataccctggggaagacccaggagaggaaccggtgtgcgatgctcttccggcagctgcatcaggagctgccctctcatggggtacccttgataaaccatctctagagaggacatccctgctgggctgctgtgcagagtataagattttggacttgttcatgtcccctctctccctataaatgatgtatttgtgacaccctatcttgtcaataaaatantaatctgatt

SEQ ID NO: 162711 - DNA, 829 bp, Homo Sapiens
  misc_feature (93)..(93): n is a, c, g, or t
  misc_feature (170)..(170): n is a, c, g, or t
acaagctgatggatcgcctaaaggactccgccctcctgcactggaaacacagcctgtcagacctcatcgatatcagcttcgcacagaaacgcnccatctggaggctgtatggccgcagcaccatgccctgcaacaggcccagatgtttctgagcatgaaccgcctggagncggtgaatccgggcgtgcagcagaaccacacagagtcctcgtgctgtcgcacatctgccatcctcgcagagctacacgcggagcagggctgttttgctgcagcttctgaagtgttaaagcacttgaaggaacgatttccgcctaatagtcagcacgcccagttatggatgctatgtgatcaaaaaatacagttggacagagcaatgaatgatggcaaatatcatttggctgattcacttgttacaggaatcacagctctcaatagcatagagggtgtttataggaaagcggttgtattacaagctcagaaccaaatgtcagaggcacataagcttttacaaaaattgttggttcattgtcagaaactgaagaacacagaaatggtgatcagtgtcctactgtccgtggcagagctgtactggcgatcttcctcccctaccatcgcgctgcccatgctcctgcaggctctggccctctccaaggagtaccggtttacagtacttggcctctgaaacagtgctgaacttggcttttgcgcagtcatttcttggaatcccagaacaggccttaaagtcttctccacatgggccatcgagcccatctttggctgacggggctatcctgggacaaaggttcgtgccatgttccttagttggcca

SEQ ID NO: 162712 - DNA, 1087 bp, Homo Sapiens
gggcaattcccaaacagcagcctttcaaaggaataatcagagctgtaaacacgagatacagtacaagtttttgacttcctaccagtcaggttccacaaatccacatactgtaccattcatagttgaggcttaagcctgtcacccatttctttagtttctataagtacacaagcataataaatacatctgattttaaaggtcacttaaaatgagtcataatttacagtacagtacgtttcagttcaagtgcaaaaaataactatttgcggaattctattttctttcagttattttatttttaaggcggtgttttattgtgaagcggagacatccaagggtagaatttcttatcccaaaatgcagtattgggcagaactatggtgtcatggagaagccctcactttacaattgatcctgtctaatcagggtcagagggtaaggtgagttgctcatttcgactgttcttttctttcctctctctcctgtgctcatccacagctattataaattatataattcacctttattcagctaaaacagttttcccttttccacactccccccaggtttcctgttaacctctgctttgatttttagtggcaagctttacgtgcgatccacccagccattgttctggctgcagttgtaacgtttgcagttgcatacattacattgtccagtgtctgactgtgtcttcatgagaacgaatatactgagattttctttctttagtcattggaaagtatagttgctacttattgccatccttcccattcatggtttcctatttaccaccttttcctcaccaaaaacaaaactaaactgacccaatatgtaatttctaaaaattgtatccttcccccaggcacttaaatcttatactgtgatttgtaactagtactgcttatttaaggaactcttaggaattcagtgatttttgtgtgtttcattccctcagctaattagagcctgaattactataagatagtaaatagcgagagaggctatttacagtatcaatatatttagtaaactcttgtctatcaatacacaggatacacacgtatcttggggactccttctagag

SEQ ID NO: 162713 - DNA, 1655 bp, Homo Sapiens
cgagttcctgcagtgcttcactgggtttgggaagaggatgtggtgccatgatcggaggcgtgttagtcaattattttggggctgctgcaacttccgaggaattggcatggcctgcttggtgatcctactgctctttgccctgatccagtggctggcagtgccagatgaggaagaagacaagacaatgttggcagaaagaattcctgttccctccagtcccgttcctatagcaaccatcgacttggtacagcaacagacagaagatgtcatgccacgcattgagcccagacttccacccaagaaaactaagcaccaggaagaacaggaagatgtgaacaaaccagcctggggagtcagctcttctccctgggtgacctttgtctatgcactctaccaaattaaagagatgatgcaactcacaagagacaaccgtgcttctgagatacagcctttacaggggaccaatgagaatagggaaaattctcctgctggtagagcccagcctgtcccatgtgagactcactctgacccatctagaaaccagccatcccctgacgcagcagcatctcagacgcagaccagccccgctcaccccagtgtggacccgtgcacagaggagagtgaagagcagcaggctcagctggccgcgggaggacactgagggcatcctgctcatctcacaccctgcatggaatcaggctcctcagccaggacacagggtgaggccccccagccaggatatgcctcccctggaggagcacagcactgcatatgcttctaaatatctaaactcattaacatggaaacacacacacaggagctacagctacagtattggcgaggacaaaggtaaacttacgtaagtctcatcggaattacaacagggaaatggaacttcaatgaggacttgcagtccttagcttggttaggttaaggatgatagcaatttctctgccagtgcagtaagagttgaaaccggcagttacactaagtaagtggagggaatgaaagtgtctcgaggtgaatggtggatataatttccctcttctgattatttattactgtgatgtggttcctaagcacaaactgggaagagatagaattcatcgtatactgtcttttttcttggagagaaccgtttaaaaaattacaagatatatttaaaggaagtaagccagataaggagtagcacgatgtgctatttgttaacacaataacagttcaagagttaaagtgtagataaatgagagttacaaagtttcatcagaaagtttacatatcttgagtcaaatatattgtttatatgtgtatgggcatataatggaaataatacttggaggcaacagaagcgtattattaactactgcaagctaagccgagcttagaaatgcctttggttttaaaggggcttggcagaaagagaacagaaacaagcgattatttcaacatctaatcaaccaagtcagaatcctgtgtttggatagacaagagtatacgaaagtatatcgatactgtacaagtaggcctctctcgctatttactatcttataggtaattcaggctctaattagctgagggaatgaaacacgcagaaatcactgagtcctaagaagttccttaactaagcgagactagttacaagtcagcagcataga

SEQ ID NO: 162714 - DNA, 1391 bp, Homo Sapiens
  misc_feature (485)..(485): n is a, c, g, or t
aaaatataacctcaagaggaccaggtttatttgtccgacagagcagctcaaaatgttgaggcatcatttgtttggattatgatgggttattctcgaagtttatttatttagaaggggaaagtgattatagaaaaatacttgaaataatttgccaatgaagttgcagattctaacaataatccacatcttagatttttaagtgtgtagtttcatagtttaaacaaattctgtcaaagaactattcaatatactttatcactttaactttccatgaaaaccaaataaaaatcacatccgaatgatttacttctatgcttttatctgattgtatacatatgatgtactacgcatccaagtacaagaggcagttatcttctctgagaggtgcaagagttgttctttcatgaatgccctctaatagtgaaaccagcaatttttatatatgcattcatgtgcatatacatgtacttcaaaaagcaaagcgncatctcttcgtccattgttaacttaatggtaagaatggggcccaccaagcattggtggaggcaccagaaggtcctggaaaggcacttggaaaggattactgggagtaggatagagtcctggtgtgggatacgatcctgtagggggcaggatatggtgctggtggtccccaggctcctggtggaacggtgccccatggaacaggtggtgctgccccaggggcttggggaggaggaggagcgggatatgggcctggagatggatatggcatattaggggtaggatactgccctcccattcctggcgcccaaggtccagaagacatggatccccatggacctaaaggaccagctgcagctggatctgtgggtgcaccatatggtctgggtagctctggaaagggcatatttggtgtaggatatggccctgtggggccagggcccggcacagttggggctggataaggaccaccaggtgggggacatgatggtccggaaggaggaaagggtgctgggggtcctggaggtggtccggtgggaggcacggagggatacattcctgttggtgctggtccaaaaggcacagtggagggtgttgcacttggtgggagtccagatggcactgaagatggagcactcggattattccaagggttggagcctggccagccttgaggaggttggccaggttttgtattgctcacagcagaggttttggcaggggagtgttcaggtagtgcatctgccaacgaaaattcatcagacattttcccggcaatatccgagaccgcagtagggtctagaagcggcgatgggtccgagggactgggccctgaagacgcgggcgcagcctgactgacggcagctagagcagcggcggcaacagcaccagcagcgcgcggctcctcc

SEQ ID NO: 162715 - DNA, 539 bp, Homo Sapiens
tgtatcctgggaagagctgttctctctgctcacagctgaataggagacatgcccattagctgaggcgctggcatgctctgtactcgagggacacagatgacagtgccaaaggacctcacgggaacatttggaccaatagaaataaatcccgatccccagcaggatcagaaaaaccaggattcccagaaccaggaagatgatggcgttacgggacatgcctgagtgctcactgggaggtccctctttgacctggacggtcagttctgcctggcgagctcctagggcattggtgacgttgcagattaaagttgtgttgattggtttgtccacaggacggatcaggagctgggcgccctgggccacagcaaagggtggcaggggacccatggtcgtgctccaattatagcctgtgggctctgggttgctgcgagcatcgcaggtcagggtggcctcattctggccaaggtaccagttgttatcatagccagagatgatacctctgggggatacacacgtgatcgggtatcctctagatcgcc

SEQ ID NO: 162716 - DNA, 2171 bp, Homo Sapiens
  misc_feature (69)..(69): n is a, c, g, or t
agatgaaaagaagagttattgttgcctggatcttatcttaagtggcttaccctgaggtttttgacaccnatacaagcgtcctgatgaaagcactagaatatttaaaattgctcttcaccttgctaagtgaagaagaatatcatcttactgagaatgaagcatcttccttcatcccctatcttgtcgtcaaggttggagaaccaaaggatgtcattcgtaaagatgttcgtgccatcctgaaccggatgtgccttgtctacccagctagcaagatgtttccctttatcatggaaggaaccaaatccaaaaactctaagcagagagcagagtgcctggaagagctgggatgtctggttgagtcctatggcatgaatgtttgccaaccaaccccaggaaaagccttaaaggaaatagctgttcacataggagaccgtgacaatgctgtacgcaatgctgcactcaacaccattgtaacggtgtacaatgtacatggggatcaggtgttcaaactgattggaaatctttctgaaaaggatatgagcatgctcgaggagaggattaagcgatcagcaaagagaccctctgctgcaccaataaaacaggtggaagagaaacctcagcgtgcacagaacataagctccaatgccaacatgttacgcaagggaccagctgaggacatgtcttccaaactcaaccaagcccgaagcatgagtgggcatcctgaggcagcccagatggtccgccgagaattccagctggatctagatgagattgagaatgacaatggtacagtccgatgtgaaatgccagaacttgttcagcacaaactggatgacattgttgagccagtccttattcctgaacccaagagccgggtctgtttctccacacttccgatgacatgcacagtaatacagcatccacatatcaagttcattatcttccaagtagccagtggtgacatcaacactcaagtaaccaagctaatgacacagatcgatgaggtcctgagacaggaagacaaagctgaagccatgtccggccatattgatcagtttctgatagccacttttatgcagctaagactcatctacaacacacacatggcagatgagaaattggagaaggacgagatcatcaagttgtatagctgtatcattggcaacatgatttcgctgtttcagatagagagccttgcccgggaggcctccactggagtactaaaagacctaatgcatggcctcatcaccttaatgctggattctcggattgaagatcttgaggaaggacaacaggtcatccgctctgtgaacctcttggtggtgaaggttctggagaagtcagaccagaccaacatcctgagtgccctacttgttttgctccaagacagcctgctagcaacagccagttctcccaaattctcagagcttgttatgaagtgtctctggagaatggttcgactgttgcctgataccatcaatagcattaacctagacagaattcttctggatatccacattttcatgaaggtcttccccaaagagaaactgaagcaatgcaaaagtgaatttcccataaggaccctaaagaccctgctacacaccttatgcaaattaaaagggcccaagatcctggaccacctaacgatgatcgacaacaaaaacgagtctgagctggaggcccatctctgccggatgatgaagcacagtatggaccagactgggagcaagtctgataaggaaacagaaaagggagcatctcgaatagatgaaaaatcatcaaaggccaaagtgaatgatttcttagctgagatttttaagaagattggctctaaagaaaacactaaagagggactagcagagttatatgaatataagaagaaatactcagatgctgacattgaaccatttctgaaaaattcctcacagttcttccagagctatgtcgaaagaagccttcgggtgattgagatggagagggagggcaaggtcctatttccacttcaacaggcatctcccctcagatggaagtcacatgtgtggcccacgccccacaaccacagtgtccccccttaaggcaaccacaaatgggggaaacaagtggggggccattccggtccataccttggaaaaaggcctaaaagaaaccttcccgaaaaggggaatggtggg

SEQ ID NO: 162717 - DNA, 1333 bp, Homo Sapiens
ggcaaaagtgaatttcccataaggaccctaaagaccctgctacacaccttatgcaaattaaaagggcccaagatcctggaccacctaacgatgatcgacaacaaaaacgagtctgagctggaggcccatctctgccggatgatgaagcacagtatggaccagactgggagcaagtctgataaggaaacagaaaagggagcatctcgaatagatgaaaaatcatcaaaggccaaagtgaatgatttcttagctgagatttttaagaacgattggctctaaagaaaacactaaagagggactagcagagttatatgaatataagaagaaatactcagatgctgacattgaaccatttctgaaaaattcctcacagttcttccagagctatgtcgaaagaggccttcgggtgattgagatggagagggagggcaaaggtcgtatttccacttcaacaggcatctcccctcagatggaagtcacatgtgtgcccacgcccacaagcacagtgtcctccataggtaacacaaatggggaagaagtggggccatctgtctacttggaaaggctaaagatcctccgacagcgatgtggtctggacaacacaaagcaagatgaccgacctcctttgacctctttgctctccaaaccagcagttcctactgtcgcctcttccacagacatgctccacagcaaactctctcagctccgggagtcacgggagcagcaccagcattcagacctggattctaaccagactcactcttcagggaactgtgacctcctcctcctccacagctaacatagacgacttgaaaaaaagactggagagaataaagagcagtcgcaaatgaagctgccccactcccccggcaccctgcagctttagtttactaaactagaagtcctcatagtttaaaatggcctcagcaggcctagtgtatacaaactggttgtatgtatcatgccgtggagctagggggaggagtcattgtggcacaagtatttgtacatactctgcttctctctgtcagcgtcctgctgctctagaagactgtccgtggatgagtttagtgtacagacttgtaaacagctgccccctctctgctcagtctagttcccagatccttttcttttctttttaattgctcatttgtaaaattgtcctaatctttcctagctttttaatagttaatattagaaactctttaatagttttcctttcagtttgtgagctcttctctgtcgccctgaagggtcactgtattctgtatgaatgcatggcatgatacaactaatttaagagtcttttataaataaagtttgcattaactat

SEQ ID NO: 162718 - DNA, 432 bp, Homo Sapiens
tgcttggtgatagcgctctagacgatccccaattatacgtgtgtatcctggttccaaattatctaatttagcctttcaccaaaactggtaatttttgagtcggctgcacatgaaaagaatgggtgtagcaagaggtgattaaaaaaatttgctaaacagtaacagaaaatcaccctttaagtagttttccaaaagacactataaggcagcagctcagttaaaagtattagccctgaagaggtagagaatttgagcccattatacaaagacagccttggaaccatcttctctctcatcaggatcaatattttcaagtaagacaatttcatggtaaaaggaaaccaggttccaccatttaaagaaaaggtgctggtcactcccatgtctcgataattcgtttattacgtgagaaacagaagacggtcaaggata

SEQ ID NO: 162719 - DNA, 568 bp, Homo Sapiens
ataagaaaattcacaagaaacagggagctggcttcctgggctgtgtgcggctgctctccaatgccatcagcagattaaaagataccggataccagcgtttggatctatgcaaactagacccctcagatactgatgcagttcgtggccagatagtggtcagtttacagacacgagacagaataggaaccggcggctcggtggtggactgcagaggactgttagaaaatgaaggaacggtgtatgaagactcggggcctgggaggccgctcagctgcttcatggaggaaccagccccttacacagatagcaccggtgctgctgctggaggagggaattgcaggttcgtggagtccccaagtcaagatcaaagacttcaggcacagcggcttcgaaaccctgatgtgcgaggttcactacagacgccccagaaccgaccacacggccatcagtccccggaactgcccgaaggctacgaacataagaacaacagtccagggccaagtttactttttgcatacacagactggagttagcacgtggcacgaccccaggatacacacgtgtcttg

SEQ ID NO: 162720 - DNA, 736 bp, Homo Sapiens
agaggatacccaagatcaccgtgtatccaaaagcaaaacagcagatatacaaaattaaagagacagaagatagacattaacagataaggcaacttatacattgagaatccaaatccaatacatttaaacatttgggaaatgagggggacaaatggaagccagatcaaatttgtgtaaaactattcagtatgtttcccttgcttcatgtctgagaaggctctcccttcaatggggatgacaaactccaaatgccacacaaatgttaacagaatactagattcacactggaacgggggtaaagaagaaattattttctataaaagggctcctaatgtagtactgcttgaaaatggtacatttttgttgtagattattttaaacataatgctatagtaatattttgaagatttgagctgttatttccatttgtttttacactgtgactaaatgattaggttttagttttagactctaaatggaacctgaattaataggaaataaacacggtactatagttgtcctatggtgcccctatgggtgatgggttccaagaaccccctaggatactaaagtccatgatgttcaagtcccttatagaaaatggtgtagtatttgcatataacctgtgcacatcctaccatacactttaaatcatctctagattacctataatagctaatacaatgtaaatgcttggtaaatagttgttatactatattgtgtctaaatgcaatca

SEQ ID NO: 162721 - DNA, 721 bp, Homo Sapiens
  misc_feature (131)..(152): n is a, c, g, or t
  misc_feature (246)..(288): n is a, c, g, or t
tccgccgtaaaagaatggggcacacttcccttcagtcacatcaaagcaccagcgggagatcattgctcggcacggccccgtctcggcttgttcagagcacacctctcgaaccacctcttccacagactctnnnnnnnnnnnnnnnnnnnnnncaatgctggtggttctctctgtggcttcttcgtagggttcctcagcctcttcctctacctcatcaccatcctcatcgtcctcgtcatcatcggnnnnnnnnnnnnnnnnnnnnnnnnnnnnnnnnnnnnnnnnnnnttctactactttgtcttcactcccacctgcatagtctgtgtctgctccgccccaccagacatccgagtcatcctcctccgcatcagcagaagccacattgccactttcgtcagccaggtgggcaacacacaaactcttacccctcggaacttgtcaattccgcagggcagcaacatgccgtagtcatgcaagttggtacgtcttctcactgcatgtctctttggcgacggtgtgccagtgaagatgagtgttcgcaaacatccatcctctcctggtgtaagaattttgcaccttgtcaggaacgagaagggcatcacttacaaactcacccaactaagcagcggtagggaatcacaaagtggggatgggtcttgcactgcttgcggccccgcttgcaccagttctggatggtcactggttggttggcttctac

SEQ ID NO: 162722 - DNA, 604 bp, Homo Sapiens
ggtgtacggatggatcgaaattcggtattcagcagttcatgtctgtatgcctgggatccatcttcactctcgaaagatctcctccgtctagatatttgtcaagcccagaaacctggtcgagtggtcagtcctcggtcggcagcagggcgggcatcaacaggctcaacttcgttttctgtgttggctggcacagagtcagccccaaaagaatgccacggctggagatcgtccaggctgaactctccattcacgggaaggagctccacggtggttttcgtttcggtcaaagatggcatgagagcatcgtttccgtaactgatccttggttcactaatcatgttggccaagacgtcatctgaatagttttgctctttctgaagcagctctacaacgtgcctgcagtggccgaggaggttcaggatgaagttggtaagtaagctgttcttttgatgctgcacatggacatgtattttcccccagaggaaaatggaggaagtgagttatctgtttgaggaatatggaagttaatagaacagcttgcctttaacgatgaaactgtcaggctggaactagctttctagccttagcaattgaatcagttctt

SEQ ID NO: 162723 - DNA, 884 bp, Homo Sapiens
agatctcctccgtcttgatatttgtcaacccagaaccttcgttttctgtgttggctggcacagagtcagccccaaaagaatgccacggctggagatcgtccaggctgaactctccattcacgggaaggagctccacggtggttttcgtttcggtcaaagatggcatgagagcatcgtttccgtaactgatccttggttcactaatcatgttggccaagacgtcatctgaatagttttgctctttctgaagcagctcatcaacttcatcctgaatctcctcggccactgcaggcacgttgtagagcagggagagagactgattcatgcgctcataaatcacacggaggtgtgtcataacctgggaccggatctgagcggctttcttgggatccaccatgcgcacatgctcgaaatgctttagggtgtgctgtctgtccttctgttctgcgcggacatacttctttagcatattgaacacgtgacgaggccgaggaggaacagcctgcagagcggtgatgtagttctccagggccaggcggcggcggtcattgagcatggcttccactctggccatgtgtgtctccaccagctgctgtctctcgttggctgcttcctgttccaaagattccactttctcctggaaatgctggataactgccttcttatcagctttaggcaagttctttgcttgacgttctgcctcttcccattctctcatgacctgggacattctctctcggtgcttggcctcaagcctctctttggctttctggaaatgggcatgttcattctcatccccaggtgtctcgagatacttgtcaacggcatcaggggtactggctgctgttgtaggaatggcgctgccacaaacagccatttaggta

SEQ ID NO: 162724 - DNA, 1034 bp, Homo Sapiens
  misc_feature (404)..(404): n is a, c, g, or t
  misc_feature (813)..(815): n is a, c, g, or t
caatcccttggagcctttcgcatcttcactggcacaccgtcgccaaagagacatgcagtgagaagagtaccaacttgcatgactacggcatgttgctgccctgcggaattgacaagttccgaggggtagagtttgtgtgttgcccactggctgaagaaagtgacaatgtggattctgctgatgcggaggaggatgactcggatgtctggtggggcggagaagacacagactatgcagatgggagtgaagacaaagtagtagaagtagcagaggaggaagaagtggctgaggtggaaagaagaagaagccgatgatgacgaggacgatgaggatggtgatgaggtagaggaagaggctgaggaaccctacgaagaagccacagagagaaccaccagtattgccancaacaacaacaacaacacagagtctgtggaagaggtggttcgagaggtgtgctctgaacaagccgagacggggccgtgccgagcaatgatctcccgctggtactttgatgtgactgaagggaagtgtgccccattcttttacggcggatgtggcggcaaccggaacaactttgacacagaagagtactgcatggccgtgtgtggcagcgccatgtcccaaagtttactcaagactacccaggaacctcttgcccgagatcctgttaaacgtacgttgtcattcacctgagggaagggaagaggggaggaggatgctgcttggttcacataactccagcatcatcaccttctttgcatgggttttgtgtttcttgaacacctgtcttagtaaaatggttcttcccattannnaggggggccgaggggccagaccggggggagaaccggcacacgcgcggggggcgcggccccctgatgacgtggggagaggcggggggagaggggccgcgcccccccgcggagagcggcgccgaggaggggggtttccttggtgggggggctgtcgggccctctgaaaaaagcttttcaaaaccattttctttggggcgcgcggcgcccccctttggtgaa

SEQ ID NO: 162725 - DNA, 1645 bp, Homo Sapiens
ttgtcaaagacccaaagatacgtggacaaaaaaagaaaagcttgaagtctcaatgcctaagtgtgtgcacataaaacaggcacgaagaaacaaacgtgtgtatcctcttaattcctatatcacaaatatagcagaagcagcaatctgtacagtaaaatgcagtcatggaaaaaaaatctctctaaagcatctgaaatacttaaaaatgtttaactttaaaatgcatagtgatcaggaaaggaatacttaggcaagagaagcagctgaactcccacgttcacatgaagcatcccccatcgattcttaaagcatatgtaaagtaggacttaattgggtcacaaaccacaagaataatatacaactggctaaggggctatgtgataaataatcaggagagaatctattcatgcactagtttgatacagctaaattctttacagtacacaaaacccattaataatgtagtatagagaccaaaatgtaaagagagatagaatacattactgatgtgtggattaattcaagttcaggcatctacttgtgttacagcacagctgtcaaaaggcgataatgagtaaatcataaaacgggtttgtttcttcccacattattctataaatggacaccgatgggtagtgaagcaatggttttgctgtccaacttcagaggctgctgtggcgggggtctagttctgcatctgctcaaagaacttgtaggttggattttcgtagccgttctgctgcatcttggacaggtggcgctcctctggggtgacagcggcgtcaacctccaccacaccatgatgaatggatgtgtactgtttcttcttcagcatcaccaaggtgatgacgatcactgtcgctatgacaacaccgcccaccatgagtccaatgattgcacctttgtttgaacccacatcttctgcaaagaacaccaatttttgatgatgaacttcatatcctgagtcatgtcggaattctgcatccatcttcacttcagagatctcctccgtcttgatatttgtcaacccagaacctggtcgagtggtcagtcctcggtcggcagcagggcgggcatcaacaggctcaacttcgttttctgtgttggctggcacagagtcagccccaaaagaatgccacggctggagatcgtccaggctgaactctccattcacgggaaggagctccacggtggttttcgtttcggtcaaagatggcatgagagcatcgtttccgtaactgatccttggttcactaatcatgttggccaagacgtcatctgaatagttttgctctttctgaagcagctcatcaacttcatcctgaatctcctcggccactgcaggcacgttgtagagcagggagagagactgattcatgcgctcataaatcacacggaggtgtgtcataacctgggaccggatctgagcggctttcttgggatccaccatgcgcacatgctcgaaatgctttagggtgtgctgtctgtccttctgttctgcgcggacatacttctttagcatattgaacacgtgacgaggtttagagattggactttcagctggaacgcttcacaagtttctgctataaagattctggtctcagcacccaccagcctatccttctctggcaaatgatcacacggc

SEQ ID NO: 162726 - DNA, 570 bp, Homo Sapiens
tgtatcgtcagtgtcagtggggaccccactctggcggtggtttggtattgaggggttggtccgttgggattggaggtctgccgggaggtgactgacccaatccgccgtatagctgttggggaggcgggtctctgtgagtacggagaggctgcccgtgcagcaggtaatgtggtggaggaatatgcactggggttcagaggtcgggggtcggtcactgacggagagccaaatccactacccagagaagttcccagagacccccttgaaggagacacgcctgtgctgataacataagaaggagactgtgctctagatggaactgaactaactcttctcatggcccgataggctactgatggctgaaccagtgtttgtccttcagctcttgaattcctcaccacatggttgtcagttgatcctatgaatgaatgctgctgtctgttggtctgccttgctcacgttctggctgttggggaaactccctgcttcctggtatccaccgtcggaataaggaattcatttgtgtagaacttctggagtaacccatgatccctcatttcatggagagat

SEQ ID NO: 162727 - DNA, 884 bp, Homo Sapiens
  misc_feature (163)..(163): n is a, c, g, or t
ggcaggttggaccatgcagctctccctttggcaacccgggtcgaaaagagccgatgccttctgcgaagttgggggtagaactcgtcagtgaaaggagggcctcggccagctcacgaaagtacagcttcagcgtgcctgcgagggcgttcacgtccatctcgcntcatcatcaccgaccacgtccttggtattgacgtcgaaggctgccttcagtgcctggatgtccgtggccacaccgaacacgcggtagatgcccacctcctccatgcctcggcgctcgatctcctccacgcactggcgcacgatgtagggcaccttggacctctctctcttggtgaccacagcaatcttgactccgaagacccctgtctgttttcgggacggcatcctcttcaagctgaactccctgctgttgaacttgaccgagagctttacttcgatcccattcatggcgatgacggtgcgctgccagtctctgtcctgcagggcctgcgggtccagctggacctggcccttccccatgagtctgtccgtgctctcgccgtcctccttggggatcttcgtcttgttgtaacacttttcatagcacagtatcctcagggtctgggagccctccagctctatctcaaattcctcgttccagtttggctcagctgtgtccctgtagacgcgcgtctttgctttattcacaaaatacccaaaggaatccacctccagggtgcagtacagatttgaactctgcttaaatccagtggctgagtggacgatgacattcagaaacccatagagccccggagactcatcatcttccttattgatggtcagcggaatgctgtggacagtctggagtttcacacacgagttggtcagcatctgcagctcca

SEQ ID NO: 162728 - DNA, 475 bp, Homo Sapiens
  misc_feature (442)..(442): n is a, c, g, or t
aggcacgctgaagctgtacttccgtgagctgcccgagcccctcttcactgacgagttctaccccaacttcgcagagggcatcgctctttcagacccggttgcaaaggagagctgcatgctcaacctgctgctgtccctgccggagcaaacctgctcaccttccttttccttctggaccacctgaaaagggtggcagagaaggaggcagtcaataagatgtccctgcacaacctcgccacggtctttggccccacgctgctccggccctccgagaaggagagcaagctccctgccaaccccagccagcctattcaccatgacttgacagctggtccttgggaggtcatgttcccagggtccaggtgcttgctgtaatttcctggcagctgggaggccattccctgccccgggacaggcaaggagacagagcatcctgtttttncaccgaagttttaaaggttccagttccatttct

SEQ ID NO: 162729 - DNA, 1048 bp, Homo Sapiens
accacagcacccgctgccaccactgctgccacaaaccttgcaaagactgttaatctccctgtcaccccttccccagcacccaggactctgcctgctgctcctgccagcactaacactactgctaccccaagcctcactcatatggttcccttccaagcagccccctatccctccccctaaaccagctcacagaaatagcaaccctgtcattgctgaactgtcccaagcaataaacagtggtacattgttatcaaaaccgtccccacccttaccacctaggagaggcattccatcaacctcagtacccaccttggagtctgctgctgccatcaccacaaaaacaccaagtgatgaaagagagaagagcacgtgttctatgggctcggaactactaccaatgatctcacctcgctctccgtcccccccactgcctactcatatacctccagagcctccacgcacccctccattccctgctaagacttttcaagttgtgccagaaattgagtttccaccatccttagatctacaccaggagattccccagcaggaagatcagaaaaaggaagtccccaagaggatactggaccagaactttggggagccccatataccctctaggctgactccactcccactgcatattcgaatccagcaggccctcaccagcccacttcccatgactcctattctggagggttctcacagagctcattcgttgctttttgaaaacagtgacagcttttctgaggacagcagtacgctgggtcggaccaggtctcttcccatcactattgaaatgctaaaagttccagacgatgaagaagaagaggagcaaacctgtccatccacattcagtgaagaaatgacacctacctcagtcattcctaaattaccacagtgtctacgggaggaagaagagaaggagagcgactctgattcagaaggtcccattcagtaccgagatgaagaagatgaagatgaaagctatcagagtgctctcgccaacaaagtgaagaggaaagaacactggccatgaagtgaacca

SEQ ID NO: 162730 - DNA, 513 bp, Homo Sapiens
  misc_feature (15)..(15): n is a, c, g, or t
aagatcaacgtgtgntattccatgctaatcttccaaggttgtgtaaataatttttttctaccatcccccatcatttgcatacatttttgtcaagtccaaacataatttgaagtgaggtaggtagtttctctctacttgtgccgttgtccttggggtgatgtcggggcctgtgccctgaacgcacttgtctcctgtgcaggggcagtgccagggctggcatcagtggctggtggagcttctcagttggctattttctcaatctcgtccaaatcatctgtgtccaatctttctatcttcttattaaaatgctcctggattctgttcaggatgttcatgctgtgcttgctgtccaccatgttcactgccaggcccctcttgccaaagcggcccgtgcgcccgatccggtgcaggtaggtctcattgtcaggattcccgtccttgtccacgggaagatcaaagttgatgacgacagacacttgttcaacatcaatgccgcggatacacacgtgactt

SEQ ID NO: 162731 - DNA, 988 bp, Homo Sapiens
  misc_feature (18)..(18): n is a, c, g, or t
gtcaaggagcgagcctgngtggcgattcggacgagggaagttttggtgaccccaacgtgtgtgcccgcggcattgatgttgaacaagtgtctgtcgtcatcaactttgatcttcccgtggacaaggacgggaatcctgacaatgagacctacctgcaccggatcgggcgcacgggccgctttggcaagaggggcctggcagtgaacatggtggacagcaagcacagcatgaacatcctgaacagaatccaggagcattttaataagaagatagaaagattggacacagatgatttggacgagattgagaaaatagccaactgagaagctccaccagccactgatgccagccctggcactgcccctgcacaggagacaagtgcatttagggcacaggccccgacatcaccccaaggacaacggcagaagtagagagaaactacctacctcacttcaaattatgtttggacttgacaaaaataggtgcaaatgatggggggcaatagaagaaaaaatttgcaatttggaaaattgggtcctttcccccacttttttaagccacattcccccatctttataataatctggtcacagtggtagtcgctggcccccaggaccccctcctgattttggctaggcatcgtggaaccagctccagcccctgaagaaacgatagatgtgcaggttgtgcggaagaggctgagtggaaaatggtgtgagccccaccgctgtgcatcgaatgagggaagtggcagcagagaggccagagctgccccctctctgtctcttcaatggacccttcacaagtgtttctccctgccttggggctgtcttccttctcctgaaatccagagactttcttgctcatcccttctccctttcacttctgttctctgctgcagaaagcagacttgcatatccctgatgagcagctcggctacttttgtaaacttcagatttggagagaaacacgaaagtctgaatcctga

SEQ ID NO: 162732 - DNA, 1026 bp, Homo Sapiens
  misc_feature (108)..(108): n is a, c, g, or t
  misc_feature (185)..(185): n is a, c, g, or t
agcaagttcttgcttttttgcaggcagaggaccagaaagttaaaggggagaaagggatgagccaagaaagtctcctggatttcaggagaaggaaggccagcccccaangccaggagaaacacttgtgaagggtccattgaagagacagagagggggcagctctggcctttctgctgccacttccntcattcgatgcacagcggtggggctcacaccattttccactcagcctcttccgcacaacctgcacatctatcgtttctccaggggctggagccgggttccacgatgcctagccaaaatcaggaggggggtcctggggccagcgactaccactgtgaccagattattataaagatgggggaaatgtggctttaaaaaagtggggaaaggacccaattttcccaaaatgcaaattttttcttctatgcccccccatcattggcacctatttttgtcaagtccaaacataatttgaagtgaggtaggtagtttctctctacttctgccgttgtccttggggtgatgtcggggcctgtgccctaaatgcacttgtctcctgtgcaggggcagtgccagggctggcatcagtggctggtggagcttctcagttggctattttctcaatctcgtccaaatcatctgtgtccaatctttctatcttcttattaaaatgctcctggattctgttcaggatgttcatgctgtgcttgctgtccaccatgttcactgccaggcccctcttgccaaagcggcccgtgcgcccgatccggtgcaggtaggtctcattgtcaggattcccgtccttgtccacgggaagatcaaagttgatgacgacagacacttgttcaacatcaatgccgcgggcacacacgttggtggtcaccaaaaccttctctttgccctctcggaagcgctcaatcaccgcagccctctgctccaccatcatctccccactcagcagagccacctggtggccttcttttgagagctctgctgccagccaactagctgttttgcgagtcc

SEQ ID NO: 162733 - DNA, 465 bp, Homo Sapiens
  misc_feature (80)..(80): n is a, c, g, or t
  misc_feature (341)..(341): n is a, c, g, or t
  misc_feature (349)..(349): n is a, c, g, or t
  misc_feature (371)..(371): n is a, c, g, or t
  misc_feature (401)..(401): n is a, c, g, or t
  misc_feature (417)..(417): n is a, c, g, or t
  misc_feature (452)..(452): n is a, c, g, or t
gagattggacacagatgatttggacgagattgagaaaatagccaactgagaagctccaccagccactgatgccagccctnggactgcccctgcacaggagacaagtgcatttagggcacaggcccgacatcaccccaaggacaacggcagaagtagagagaaactacctacctcacttcaaattatgtttggacttgacaaaaataggtgcaaatgatggggggcaatagaagaaaaaatttgcattttggaaaattgggtcctttccccacttttttaaagccacattcccccatctttataataatctggtcacagtggtagtcgctgggccccagggnccccttcntgattttggctaagggatcctnggaaccagtttccagccctgaaggaaacgntagatgttccaggttnttccggaagaaggtttaattgggaaattggttttnaggccccaccctt

SEQ ID NO: 162734 - DNA, 1133 bp, Homo Sapiens
cgacgagggcggggcctgtgacaccgcacgctgagctctgtgatgtagccgcttgcggagactgcaagcagccgcggcgcgcccggccctccctcttccgctgccgccgtgggaatggaaacatctgccccacgtgccggaagccaagtggtggcgacaactgcgcgccactccgcggcctacccgcgcagatcctctacgtgtgtcctcgcgagacaagctcaccgaaatggccgcgtccagtcaaggaaactttgagggaaattttgagtcactggaccttgcggaatttgctaagaagcagccatggtggcgtaagctgttcgggcaggaatctggaccttcagcagaaaagtatagcgtggcaacccagctgttcattggaggtgtcactggatggtgcacaggtttcatattccagaaggttggaaagttggctgcaacagctgtgggaggtggattttttctccttcagcttgcaaaccatactgggtacatcaaagttgactggcaacgagtggagaaggacatgaagaaagccaaagagcagctgaagatccgtaagagcaatcagatacctactgaggtcaggagcaaagctgaggaggtggtgtcatttgtgaagaagaatgttctagtaactgggggatttttcggaggctttctgcttggcatggcatcctaaggaagatgacctcatgttcattgttcctggttttttccagccagcagcctctacactccatcataggacatcgagtccctcctcctcttctcccatgccttcttccctgccatggcaaatctgagtggcttctctaagcatctgctggtacaagtcaatgtggcaccatgagcttcatggtggcagaagagacaatagtccttagctctcctcccagtacaccccctacttggccagtctgtaggccaacaagaaggttcctttacccccatgcaagacacttatgagaacacattacaagatggctgaccgtggaggatgagtggatcctgaaaggttgtcccaaactgttgatttggaaaagaaataagcacatagataaccttattgtgtgctgcatggaaaggaactgaatacatttgcctttaagcatgaacaaacaacacac

SEQ ID NO: 162735 - DNA, 670 bp, Homo Sapiens
ctcgagtatggcggtggggacagcagacagaagccgaggctcaggagctggaagagaggaagggttagtgggagaggcaggcttggctgaggtcactcaccgtgggaggagacggaggtgagggtggagtagtccctgggcagtgtggtcgagtgtgagtgttctgagcgggtcagtgagttgtagtcccgtgtgagggtggaggatgtgcttagcacgcggtggggcacgtgtgggctcaggtgggtgccataggcagcagcactggtcgtggtcatcctgtgcagggagttggtgctgcccgggaaggcaaagtccatccggccattcaccaggtgctctgcagggggagagcagggtcccttggtcaggcctgccccagacccgggccccgtggggcaggctgggccctgcacattcctggtcacccaccctctgggtggcttttgcttaaatacaaccagtttccctcaaaccactagggacagaggccctctgtccctgcaggagcccaagggccacccaggcttccacagcccatatcctctggccggccactctatcggtgtgagcactgctgaccctggcagtggcgggggtttgctgcgtctgcagtcagctctgcctggggagatcccaagccttcctgttctcgcgatgagtgtggtcg

SEQ ID NO: 162736 - DNA, 1450 bp, Homo Sapiens
  misc_feature (1364)..(1364): n is a, c, g, or t
  misc_feature (1419)..(1419): n is a, c, g, or t
cccggattgtcatccggcgtgtcctggacggcgggaagtccaggtctcctaccgcacacaggatggcaccgcgcagggcaaccgggactacatccccgtggagggtgagctgctgttccagcctggggaggcctggaaagagctgcaggtgaagctcctggagctgcaagaagttgactccctcctgcggggccgccaggtccgccgtttccacgtccagctcagcaaccctaagtttggggcccacctgggccagccccactccaccaccatcatcatcagggacccagatgaactggaccggagcttcacgagtcagatgttgtcatcacagccaccccctcacggcgacctgggcgccccgcagaaccccaatgctaaggccgctgggtccaggaagatccatttcaactggctgcccccttctggcaagccaatggggtacagggtaaagtactggattcagggtgactccgaatccgaagcccacctgctcgacagcaaggtgccctcagtggagctcaccaacctgtacccgtattgcgactatgagatgaaggtgtgcgcctacggggctcagggcgagggaccctacagctccctggtgtcctgccgcacccaccaggaagtgcccagcgagccagggcgtctggccttcaatgtcgtctcctccacggtgacccagctgagctgggctgagccggctgagaccaacggtgagatcacagcctacgaggtctgctatggcctggtcaacgatgacaaccgacctattgggcccatgaagaaagtgctggttgacaaccctaagaaccggatgctgcttattgagaaccttcgggagtcccagccctaccgctacacggtgaaggcgcgcaacggggccggctgggggcctgagcgggaggccatcatcaacctggccacccagcccaagaggcccatgtccatccccatcatccctgacatccctatcgtggacgcccagagcggggaggactacgacagcttccttatgtacagcgatgacgttctacgctctccatcgggcagccagaggcccagcgtctccgatgacactgagcacctggtgaatggccggatggactttgccttcccgggcagcaccaactccctgcacaggatgaccacgaccagtgctgctgcctatggcacccacctgagcccacacgtgccccaccgcgtgctaagcacatcctccaccctcacacgggactacaactcactgacccgctcagaacactcacactcgaacacactgcccagggactactccaccctcacctccgtctcctcccacggcctccctcccatctgggaacacgggaggagcaggcttccgntgttcctggggccctgggggtcccggagttcggggttcagatgaaagggtttccncctttccaggggcccaagagaatttataatt

SEQ ID NO: 162737 - DNA, 422 bp, Homo Sapiens
  misc_feature (356)..(356): n is a, c, g, or t
  misc_feature (404)..(404): n is a, c, g, or t
ggcaagccaatggggtacagggtaaagtactggattcagggtgactccgaatccgaagcccacctgctcgacagcaaggtgccctcagtggagctcaccaacctgtacccgtattgcgactatgagacgaaggtgtgcgcctacggggctcagggcgaggcaccctacagctccctggtgtcctgccgcacccaccaggaagtgcccagcgagccagggcgttctggccttcaatgtcgtctcctccacggtgacccagctgagctggcttgagccggctgagaccaacggttgaggttcacagcctacggaggtcttgctatggcctgggtcaacgatggacaaccgacctattngggcccttgaaggaaagttgttggtttgaacaaccttaaggaaccggntgttgtttattttgagaa

SEQ ID NO: 162738 - DNA, 434 bp, Homo Sapiens
  misc_feature (111)..(111): n is a, c, g, or t
  misc_feature (411)..(411): n is a, c, g, or t
  misc_feature (414)..(414): n is a, c, g, or t
accccagtcctaaatgtcatcggaaaaaagctggccctctggctgccccaaaggaaaaacgtaaaaacgtccatcgcttgtaacaaaaaggaaactgtcgtaatccctccnccgctctgggcgtcccacgaatagggatgtccagggatgatggggatggacatgggcctcttgggctgggtggcccaggttgatgatggcctcccgctcaggcccccagccggccccgttgcgcgccttcaccgtgtagcggtagggctgggactcccgaaggttctcaataagcagcatccggttcttagggttgtcaaccagcactttcttcatgggcccaataggtcggttgtcatcgttgaccaggccatagcagacctcgtaggctgtgatctcaccgttggtctcagccggctncangcagctcagctgggtcaccg

SEQ ID NO: 162739 - DNA, 439 bp, Homo Sapiens
  misc_feature (226)..(226): n is a, c, g, or t
  misc_feature (243)..(243): n is a, c, g, or t
  misc_feature (313)..(313): n is a, c, g, or t
  misc_feature (345)..(345): n is a, c, g, or t
  misc_feature (393)..(393): n is a, c, g, or t
  misc_feature (400)..(400): n is a, c, g, or t
  misc_feature (424)..(424): n is a, c, g, or t
gcttcgcaccgggcctccctgccagctcactctgagagatgtgggccccagggcaggagaacaccaggcgggtgggcgtgtcgggcacaccagcagtcaggcgagagtcgtgggaggagacggaggtgagggtggagtagtccctcggcagtgtggtcgagtgtgagtgttctgagcgggtcagtgagttgtagtcccgtgtgagggtggaggatgtgcttagcangcggtggggcacgtgtngggcttcaggtgggtgccataggaggcagcactggttcgtggtcatcctgttgcagggagtttggtgctncccgggaaggcaaagtccattccggccatttnaccaggtgcttagtgttcattcggagacgcttgggcctttttgctttncccgatnggagagcttaagaacttcattcgnttttaacattaagga

SEQ ID NO: 162740 - DNA, 511 bp, Homo Sapiens
  misc_feature (349)..(349): n is a, c, g, or t
  misc_feature (365)..(365): n is a, c, g, or t
  misc_feature (381)..(381): n is a, c, g, or t
  misc_feature (401)..(401): n is a, c, g, or t
  misc_feature (424)..(424): n is a, c, g, or t
  misc_feature (429)..(429): n is a, c, g, or t
  misc_feature (439)..(439): n is a, c, g, or t
  misc_feature (445)..(445): n is a, c, g, or t
  misc_feature (478)..(478): n is a, c, g, or t
ggccccaggcagagaacaccaggcgggtgggcgtgtcgggcacaccagcagtcaggcgagagtcgtgggaggagacggaggtgagggtggagtagtccctcggcagtgtggtcgagtgtgagtgttctgagcgggtcagtgagttgtagtcccgtgtgagggtggaggatgtgcttagcacgcggtggggcacgtgtgggctcaggtgggtgccataggagcagcactggtcgtggtcatcctgtgcagggagttggtgctgcccgggaaggcaaagtccatccggccattcaccaggtgctcagtgtcatcggagacgctgggcctcttgcttgcccgatggagagcntagaacgtcatcgctntacataaaggaagctntcctagtcctccccgttttngggcttccacgtaaggatttcanggatnattggggatngacatnggccttttggtttggttgccaaggttattaatngcctccctttaaggccccagcccgccccttttc

SEQ ID NO: 162741 - DNA, 1551 bp, Homo Sapiens
tcatgatctcatggaactgtttagaattggtggcaaatcaccagatacaaattacttgtttatgggagattatgttgacagaggatattattcagttgaaacagttacactgcttgtagctcttaaggttcgttaccgtgaacgcatcaccattcttcgagggaatcatgagagcagacagatcacacaagtttatggtttctatgatgaatgtttaagaaaatatggaaatgcaaatgtttggaaatattttacagatctttttgactatcttcctctcactgccttggtggatgggcagatcttctgtctacatggtggtctctcgccatctatagatacactggatcatatcagagcacttgatcgcctacaagaagttccccatgagggtccaatgtgtgacttgctgtggtcagatccagatgaccgtggtggttggggtatatctcctcgaggagctggttacacctttgggcaagatatttctgagacattgaatcatgccaatggcctcacgttggtgtctagagctcaccagctagtgatggagggatataactggtgccatgaccggaatgtagtaacgattttcagtgctccaaactattgttatcgttgtggtaaccaagctgcaatcatggaacttgacgatactctaaaatactctttcttgcagtttgacccagcacctcgtagaggcgagccacatgttactcgtcgtaccccagactacttcctgtaatgaaattttaaacttgtacagtattgccatgaaccatatatcgacctaatggaaatgggaagagcaacagtaactccaaagtgtcagaaaatagttaacattcaaaaaacttgttttcacatggaccaaaagatgtgccatataaaaatacaaagcctcttgtcatcaacagccgtgaccactttagaatgaaccagttcattgcatgctgaagcgacattgttggtcaagaaaccagtttctggcatagcgctatttgtagttacttttgctttctctgagagactgcagataataagatgtaaacattaacacctcgtgaatacaatttaacttccatttagctatagctttactcagcatgactgtagataaggatagcagcaaacaatcattggagcttaatgaacatttttaaaaataattaccaaggcctcccttctacttgtgagttttgaaattgttctttttattttcagggataccgtttaatttaattatatgatttgtctgcactcagtttattccctactcaaatctcagccccatgttgttctttgttattgtcagaacctggtgagttgttttgaacagaactgttttttccccttcctgtaagacgatgtgactgcacaagagcactgcagtgtttttcataataaacttgtgaactaagaactgagaaggtcaaattttaattgtatcaatgggcaagactggtgctgtttattaaaaaagttaaatcaattgagtaaattttagaatttgtagacttgtaggtaaaataaaaatcaagggcactaaaa

SEQ ID NO: 162742 - DNA, 912 bp, Homo Sapiens
  misc_feature (755)..(816): n is a, c, g, or t
aagcaccccgattagcggaggggaggggagataataaagcgcccgcaaaaacccacagccccaacgggtttcatttgtggggaattctgtgaccccaccaggccaaagttccaccgccattggggacccctttcatgggggggaactttccttgtaggggcgatcaaagtggtttctgaatatggatcccaggggtattttataggaagggcggagaggaccaaccatgtaggacagaagatttgccccatcccaccaaggcagtgagaggaaagatagtcaaaaagatcggaaaaatattccaaaacatttgcatttccatattttcttaaacattcatcatagaaaccataaactggtgtgatctgtctgctctcatgattccctcgaagaatggtgatgcgttcacggtaacgaaccttaagagctacaagcagtgtaactgtttcaactgaataatatcctctgtcaacataatctcccataaacaagtaatttgtatctggtgatttgccaccaattctaaacagttccatgagatcatgaaattgcccatgcacatctccacagacagtaactggacatcgaacctcttgcacgttggattcttttgtcaggatttctttagccttctcgcagaggctcttgacctgggactcggacagctgcttgcactcgttcagctgctcgatccactggtccagctccttggtgaacaccttctcgtccatgatgccacccgccccagccggctnnnnnnnnnnnnnnnnnnnnnnnnnnnnnnnnnnnnnnnnnnnnnnnnnnnnnnnnnnnnnnggttcctcgtgtacttctggcggctgttgaggctggcgctggcccgctggctctcaccgcagtactcggccgtcggccgctgcgcctccctcgtgg

SEQ ID NO: 162743 - DNA, 1095 bp, Homo Sapiens
  misc_feature (129)..(192): n is a, c, g, or t
gggacagagagccgagctctggagcctcagcgagcggaggaggaggcgcagcggccgacggccgagtactgcggtgagagccagcgggccagcgccagcctcaacagccgccagaagtacacgaggaannnnnnnnnnnnnnnnnnnnnnnnnnnnnnnnnnnnnnnnnnnnnnnnnnnnnnnnnnnnnnnnagccggctggggcgggtggcatcatggacgagaaggtgttcaccaaggagctggaccagtggatcgagcagctgaacgagtgcaagcagctgtccgagtcccaggtcaagagcctctgcgagaaggctaaagaaatcctgacaaaagaatccaacgtgcaagaggttcgatgtccagttactgtctgtggagatgtgcatgggcaatttcatgatctcatggaactgtttagaattggtggcaaatcaccagatacaaattacttgtttatgggagattatgttgacagaggatattattcagttgaaacagttacactgcttgtagctcttaaggttcgttaccgtgaacgcatcaccattcttcgagggaatcatgagagcagacagatcacacaagtttatggtttctatgatgaatgtttaagaaaatatggaaatgcaaatggtttggaaataatttacaggatctttttgactatcttcctctcactgccttggtggatgggcagatcttctgtctacatggtgggctctcgccatctatagatacacctggatcatatcaaagcacttggatcgcctacaagaagttccccatgagggtccaatgtgtgacttgctgtggtcagatccagatgaccgtggtggttggggtatatctcctcgaggagctggttacacctttgggcaagatatctctgagacatctaatcatgccaattggctcacgtaggtgtctagaagctcaccagctagtgatggaggggatataacttggtgccatgaccggaatgttcgtaacgatttcagtgctccaaactatagtatcgaagggtaaccaagctgcaatcatggcaccttggcgatacttctaaaataactctctcttgcagcttgaccc

SEQ ID NO: 162744 - DNA, 331 bp, Homo Sapiens
  misc_feature (220)..(269): n is a, c, g, or t
aatgatcacgtgtgtatcccatagcctcagaccactagtagaaatgtctaaaaatgagaatgtctgaactactaagcagataaaagagaaaagaaaaataatttgtcactaacttggataagttatcttgtagggcaacaggtaacattttcaaaaagatacagttatatagcatttccttgaacagtatgctgtacagtatacctaatgtgttcatgtnnnnnnnnnnnnnnnnnnnnnnnnnnnnnnnnnnnnnnnnnnnnnnnnnntaagatgcatcagagaataagacaaagatccttgccctgcaggagcttatattctgcataga

SEQ ID NO: 162745 - DNA, 566 bp, Homo Sapiens
  misc_feature (404)..(412): n is a, c, g, or t
ttcatgaatagattaatgtcctgtcctccctggggcggggaagagtgaatgagttctccctagtttagttcctaggagagctggtagttaaaaagagcctgactcttgttctctagcttcctctctggccaggtgatctctgcaaacaccacctcctcatcactttccactgtgagtagaagctgtgagaggccctcaccagaagcctagcaaatgctggcacggtgcttcttgtatagcccctgaatcatgagccaaataaacgtcttttctttataaattacccagcctcagatattcctttacagcaacacaaaacagattaagacacacacttatgatatttatgaaacaactggaaatttgaaccctaactacatatttgatattatagaattatatgnnnnnnnnnctttatagagtgtgatgatggtattgtgactgaccaaaaaattttttcttttaaaaatacattgaaatatttacaagtgaaatgttataacttggacttgcttcaacataatacagcacaagggtaagtagtctagggtgtaacacaaaaaact

SEQ ID NO: 162746 - DNA, 867 bp, Homo Sapiens
ccagctgatgccgtttgtgtatgtgctttggcttctttttgatctgtatcatatggtattttgtagattaaaaaaatgttaatgaatgttagcagagagatgcctcagacttgatcatgtctctcctaggtgacagattccgctctattattgatgatgcttggtggtttggaacagtgttaagtcaagagccatatcaaccacggtatcctgatagtcatttccagtgttatattgctaggtgggataatactgaaattgaaaaacttagcccatgggacatggaaccaattcctgataatgttgatccacctgaagaattaggagctagtatttctgtcacaacagatgagctagagaaattgctctataaaccacaagctggtgaatggggtcagaaatcaagagatgaagaatgtgatagaattatcagtggtatagatcaacttttgaatcttgatatagcagcagcttttgcaggccctgttgatttgtgtacatacccgatagtactgtactgtagtagcttatccaaccgatctttacacaattcgaatgagacttgttaatcgattttacaggaggctgtctgcgttagtttgggaagtcagatatatagaacataatgccagaacatttaacgaacctgagagtgtaattgcaagatcagctaaaaagataactgaccaacttttaaaatttatcaagaatcaacactgtacaaatatctcagaactttctaacacatctgaaaatgatgagcaaaatgctgaggatttggatgatagtgatcttcctaaaacatcttctggaagaaggagagtccatgatggtggaaagcatcagagctacgaactatgttgttgc

SEQ ID NO: 162747 - DNA, 652 bp, Homo Sapiens
atacgattcggccggtacccagatcaacgtgtgtatccggtttacactcctgttggcaaagcagagcaaggaaaatttgcgttagaggttgctgctaaaaccttgcctttttataaggactacttcaatgttccttatcctctacctaaaattgatctcattgctattgcagactttgcagctggtgccatggagaactggggccttgttacttatagggagactgcattgcttattgatccaaaaaattcctgttcttcatcccgccagtgggttgctctggttgtgggacatgaactcgcccatcaatggtttggaaatcttgttactatggaatggtggactcatctttggttaaatgaaggttttgcatcctggattgaatatctgtgtgtagaccactgcttcccagagtatgatatttggactcagtttgtttctgctgattacacccgtgcccaggagcttgacgccttagataacagccatcctattgaagtcagtgtgggccatccatctgaggttgatgagatatttgatgctatatcatatagcaaaggtgcatctgtcatccgaatgctgcatgactacattggggataaggactttaagaaagggatacacacttgatccttggggatcctcttagagt

SEQ ID NO: 162748 - DNA, 812 bp, Homo Sapiens
gggaaggttttgcatcctggattgaatatctgtgtgtagaccactgcttcccagagtatgatatttggactcagtttgtttctgctgattacacccgtgcccaggagcttgacgccttagataacagccatcctattgaagtcagtgtgggccatccatctgaggttgatgagatatttgatgctatatcatatagcaaaggtgcatctgtcatccgaatgctgcatgactacattggggataaggactttaagaaaggaatgaacatgtatttaaccaagttccaacaaaagaatgctgccacagaggatctctgggaaagtttagaaaatgctagtggtaaacctatagcagctgtgatgaatacctggaccaaacaaatgggatttcccctcatttatgtggaagctgaacaggtagaagatgacagattattgaggttgtcccaaaagaagttctgtgctggtgggtcatatgttggtgaagattgtccccagtggatggtccctatcacaatctctactagtgaagaccccaaccaggccaaactaaaaattctaatggacaagccagagatgaatgtggttttgaaaaatgtcaaaccagaccaatgggtgaagttaaacttaggaacagttgggttttatcggacccagtacagctctgccatgctggaaagtttattaccaggcattcgtggacctttccctgcccccctttgggatcgacttgggatttacgaatgaccttctttctccttggcttcgagcctggaattattaacccctgttaaaggttcctaaaagtcatgg

SEQ ID NO: 162749 - DNA, 1162 bp, Homo Sapiens
gggactcggcggacgcaagggcggcggggagcacacggagcactgcaggcgccgggttgggacagcgtcttcgctgctgctggatagtcgtgttttcggggatcgaggatactcaccagaaaccgaaaatgccgaaaccaatcaatgtccgagttaccaccatggatgcagagctggagtttgcaatccagccaaatacaactggaaaacagctttttgatcaggtggtaaagactatcggcctccgggaagtgtggtactttggcctccactatgtggataataaaggatttcctacctggctgaagctggataagaaggtgtctgcccaggaggtcaggaaggagaatcccctccagttcaagttccgggccaagttctaccctgaagatgtggctgaggagctcatccaggacatcacccagaaacttttcttcctccaagtgaaggaaggaatccttagcgatgagatctactgcccccctgagactgccgtgctcttggggtcctacgctgtgcaggccaagtttggggactacaacaaagaagtgcacaagtctgggtacctcagctctgagcggctgatccctcaaagagtgatggaccagcacaaacttaccagggaccagtgggaggaccggatccaggtgtggcatgcggaacaccgtgggatgctcaaagataatgctatgttggaatacctgaagattgctcaggacctggaaatgtatggaatcaactatttcgagataaaaaacaagaaaggaacagacctttggcttggagttgatgcccttggactgaatatttatgagaaagatgataagttaaccccaaagattggctttccttggagtgaaatcaggaacatctctttcaatgacaaaaagtttgtcattaaacccatcgacaagaaggcacctgactttgtgttttatgccccacgtctgagaatcaacaagcggatcctgcagctctgcatgggcaaccatgagttgtatatgcgccgcaggaagcctgacaccatcgaggtgcagcagatgaaggcccaggcccgggaggagaagcatcagaagcagctggagcggcaacagctggaaacagagaagaaaaggagagaaacccgtggagagaaaaagagcagatatgcgcgtgggtaaaa

SEQ ID NO: 162750 - DNA, 728 bp, Homo Sapiens
  misc_feature (269)..(289): n is a, c, g, or t
cgagtgggtccctgccttgcctcatgttctcgttgtggatgatgtcattgtgggtcctcttattctcatctcgggcctgggacagctcgctgctcagcgtcagcagctgccgctgcacacgctcgttcttctctgcctcagtgatgcgcttctcctcattgcggtcatcccggatgccctcactagacagctccgcgctgtagcccgtgggctctgcgccctcatcctgcaagctctcctggacatggtagctcaccggctcgtacacnnnnnnnnnnnnnnnnnnnnntgctgtcatcaccaggtgcagctcctccttggtcttcaccaggtcatcctgggcttctttggccctgtgctgccactcttcaacttcatcctccttgcgcctccgcgcctcttccaggagggcaatcttggcagtgtattctgcaagctccgcagccagctgctcctggctctttatctgatccaccgcctgtctctccagctcctccttagcccgcagtgcagccatacggtcagcctctaggcgctcggcctcctcctgtgcccgcttcctctcctcctccagctgcagggccctctgaatctgctccgagagctctctctctgccttctttgtcttctcctcatagtcctgcagccgcagcatcaactcctccttctcgcgcatcatctgctctttctctctctccacggtttctctcccatttccctttcgtggg

SEQ ID NO: 162751 - DNA, 1674 bp, Homo Sapiens
  misc_feature (1103)..(1123): n is a, c, g, or t
gcctgagagtctggagaaatcccctgccaagttgcccctctgaaagaggcgcgaaggcgcaagaagtataattttaaagagtgccagcacaggggcaaaagaagcccaggatgccctggtgaagaccaaggaggagctgcacctggtgatgcaagcaccaccgcccccaccaccccccgtgtacgagccggtgagctaccatgtccaggagagcttgcaggatgagggcgcagagcccacgggctacagcgcggagctgtctagtgagggcatccgggatgaccgcaatgaggagaagcgcatcactgaggcagagaagaacgagcgtgtgcagcggcagctgctgacgctgagcagcgagctgtcccaggcccgagatgagaataagaggacccacaatgacatcatccacaacgagaacatgaggcaaggccgggacaagtacaagacgctgcggcagatccggcagggcaacaccaagcagcgcatcgacgagttcgaggccctgtaacagccaggccaggaccaagggcagaggggtgctcatagcgggcgctgccagccccgccacgcttgtgtctttagtgctccaagtctaggaactccctcagatcccagttcctttagaaagcagttacccaacagaaacattctgggctgggaaccagggaggcgccctggtttgttttccccagttgtaatactgccaagcaggcctgattctcgcgattattctcgaatcacctcctgtgttgtgctgggagcaggactgattgaattacggaaaatgcctgtaaagtctgagtaagaaacttcatgctggcctgtgtgatacaagagtcagcatcattaaaggaaacgtggcaggacttccatctgtgccatacttgttctgtattcgaaatgagctcaaattgattttttaatttctatgaaggatccatctttgtatatttacatgcttagaggggtgaaaattattttggaaattgagtctgaagcactctcgcacacacagtgattccctcctcccgtcactccacgcagctggcagagagcacagtgatcaccagcgtgagtggtggaggaggacacttggatannnnnnnnnnnnnnnnnnnnnggcttaacagttttagaatacattgtacttatacaccttattaatgatcagctatatactatttatatacaagtgataatacagatttgtaacattagttttaaaaagggaaagttttgttctgtatattttgttaccttttacagaataaaagaattacatatgaaaaaccctctaaaccatggcacttgatgtgatgtggcaggagggcagtggtggagctggacctgcctgctgcagtcacgtgtaaacaggattattattagtgttttatgcatgtaatggactatgcacacttttaattttgtcagattcacacatgccactatgagctttcagactccagctgtgaagagactctgtttgcttgtgtttgtttgtttgcagtctctctctgccatgcgcttggcaggctgctggaaggcagcttgtggaggccgttggttccgcccactcattccttctcgtgcactgctttctccttcacagctaagatgccatgtgcaggtggattccatgccgcagacatgaaataaaagctttgcaaaggc

SEQ ID NO: 162752 - DNA, 626 bp, Homo Sapiens
  misc_feature (190)..(215): n is a, c, g, or t
aagtgccggggtttggggggtttttcatacctaattcttttattctgtaaaaggtaacaaaatatacagaacaaaactttccctttttaaaactaatgttacaaatctgtattatcacttgtatataaatagtatatagctgatcattaataaggtgtataagtacaatgtattctaaaactgttaagcnnnnnnnnnnnnnnnnnnnnnnnnnntccaagtgtcctcctccaccactcacgctggtgatcactgtgctctctgccagctgcgtggagtgacgggaggagggaatcactgtgtgtgcgagagtgcttcagactcaatttccaaaataattttcacccccctaagcatgtaaatatacaaagatggatccttcaaggaaattaaaaaatcaatttgagctcatttcgaatacaggacaagtatggcacagatggaagtcctgccacgtttcctttaaagatgctgactcttgtataccacaggccagcatgaagtttcttactcaggcttttacggcattttccgtaattcatcagtcctgctccacgaaaaccccgggggtgtttcgggataatcgcgagaacaggcctgttggggcatttaaactggggaaacaa

SEQ ID NO: 162753 - DNA, 987 bp, Homo Sapiens
taaaactgaatcatccagtacaaatgggacagttgttaaagatgaaacttcactcacaacattcagtaccaaattggaagttggtgaaacatatgcactgcctgcaacgaagatcagccgtgtagagacacatgctacagcaacgccgttttctaaagagactccttcaaatccagtggccacagtgaaagcgggagaacgacaatggtgtgatgtgggaatttttaaaaataatacagctttggtgagccagttttatttgctgccaaaagggaagcaaagcatctcaaaggtaggaaatgcagatgtacctgactacagcttgcttaagaaacaagatcttgttccaggcacaggatacagattcagggttgctgcaatcaatggttgtgggataggtcctttcagcaaaatcagtgaatttaaaacttgtattcctggttttcctggagctccttctgcagtcagaatttcaaagaatgttgaaggtatccacctttcctgggaacctccaacctcaccttctggaaatattttggaatattcagcctacttggctatccgcacagcacagatacaagataatccaagtcaacttgtgttcatgaggatttattgtggtcttaagacatcatgtatagtaactgctgggcaacttgcaaatgcacatattgattatacatccaggcctgccattgtgttcaggatatcagcaaagaatgaaaagggatatggaccagctacacaagttcggtggcttcaaggtaacaataagaaagcacctttaaattgaattggtttttttactgaagctattgtgatgatgattatttattagtaactggttatgaagatttgtcatttaaaagagtattctctggctgtatttccagcagttatgaacttgagtttgtaaattgttcttaaaatgtatttgctgaattatagatccaaataaaagaaaagaagcaaagactctctgtaaaa

SEQ ID NO: 162754 - DNA, 632 bp, Homo Sapiens
ttgtactgagtgccatgagaaaatttgcatactgcaaggtggtcctagccacctccttgatttgggtactcttggatatgttcctgctgctttacttcagtgaatgcaacaaatgtgatgaaaaaaaggagagaggacttcctgctggagatgttctagagccagtacaaaagcctcatgaaggtcctggagaaatggggaaaccagtcgtcattcctaaagaggatcaagaaaagatgaaagagatgtttaaaatcaatcagttcaatttaatggcaagtgagatgattgcactcaacagatctttaccagatgttaggttagaagggtgtaaaacaaaggtgtatccagataatcttcctacaacaagtgtggtgattgttttccacaatgaggcttggagcacacttctgcgaactgtccatagtgtcattaatcgctcaccaagacacatgatagaagaaattgttctagtagatgatgccagtgaaagagactttttgaaaaagcctttagagagttatgtgaaaaaactaaaagtaccagttcatgtaattcgaatggaacaacgttctggattgatcagagctagattaaaaggagctgctgtgtcttaaaggcaagtgatcact

SEQ ID NO: 162755 - DNA, 222 bp, Homo Sapiens
ggaaaggggaagttagataaaagcattatggcaggtgatacaccacgagtgcggctgctctcctggcactgagctcatgccctgctaccttcatcctggaccagctcctaacgacgtggcagggctagcgacggggctttctgtgctattccagtactcggacgggtgagctggatgtcaggcaaacatgcttagaaaggatgtggtagtgtgtaggcctct

SEQ ID NO: 162756 - DNA, 729 bp, Homo Sapiens
  misc_feature (653)..(653): n is a, c, g, or t
aaggcagcccagcccaggatggggggagcgagaaaggaagcagacgagtgagctggatgtcaggcaaacatgcttagaaaggatgtggtagtgtgtaggcctctgaagacagaaacagcaggggaaggctgaacagtggtgggtgctcttccagagacacttccaggtggcacttccaggtggcacttccagagacattgggtggttgcacttccagagacatcaacccatgtatgcaatgttcccagttctctttcttaggttttcttgaggtagttctgacaggctcttgccatgtctttcaagaagttaggaactccattcttggcggcccagttaatgagccaggacggaatttggccacccgggttatcgaagtaatacatgaaaactttgctccccttcttgccgtcactctcaatcgccaggctctgcttgtattgcttcacccggatcaccccagacctctcgccaagctgaggcatggaggtgctccgggccaggatcacatggatcttcctcccttccatgtccaggtctcgccgctgccgaaggtagacatagtctctgttggacatgggaaaagggtacttcacttcccagtagaccacagtctctccgttgcattcttgttcatagagttctttaaccgnacgcgtgggtcgacgatatcccggacttccggagctcccggggttaattcccaatgggccgcttttggctttttta

SEQ ID NO: 162757 - DNA, 692 bp, Homo Sapiens
aggcaactttgtattgtacttggcatcaatgaatatgcacttcagaaatctacagagaacttttttcactttgtatttgttccacagcattctagccaggagtacaaaataggagctcttcaagcagcacatgaagatggcccaggagccttcagccatccagagcagcagagcagcacctaaatctccacacacttcccagtataaccactaagaacacactagacccttggcattaggggatttatcatttccagttctattatctgggaatgactccaagggtttgtgacaagcttttgaaacgtaagtgctaagacgagtgtggacaagtcactgagctaatgaagaatagacccactgtctgcttggctctgatattttgtacctgtattcacatgtggggaaacttcataactgtgcccacaaatcagagaaattcgcaaaggactagacaatgtattgcctgtgaacttcagaggcagctggaaatagtgcaactggaaatcaactagattcatacataggcggatttgtttccagggaccaaaagcacagaagataagaaaacttttcaggtgatggccatattctcatcatatcctctctgtgtggagtgtgcctgttgtcacaaaaaccttgaccctacatcaagttacaccttaacaaagggaagatacaggcatcagtcc

SEQ ID NO: 162758 - DNA, 1074 bp, Homo Sapiens
  misc_feature (326)..(345): n is a, c, g, or t
accgccgccggcgtggcgcattccccacgagggggaagaaaggcaaagagtttgaattctcacagttgcccctcaaagtggagttcctggagtgcagtgccaagggtggaagaggggacgtgggctctgctgacatccaggacttggagaaatggctggctaaaattgcctgagaggcagctcaaaagcacaagacctggatgtgtgacacacagttttggaaaaaggtctgtggtagtctggagttgatgaggaaggggtacaagatgtggttagaaacatttctttgttctggaaacaaagtactgttgaaaccagcttggaannnnnnnnnnnnnnnnnnnnaagttcagttctcccttatggctgcctttcaaacaagtaccttttatctgatgcctgtatcttccctttgttaaggtgtaacttgatgtagggtcaaggtttttgtgacaacaggcagactccacacagagaggatatgatgagaatatggccatcacctgaaaagttttcttatcttctgtgcttttgggccctggaaacaaatccgcctatgtatgaagctagttgatttccagttgcactatttccagttgcctctgaagttcacaggcaatacattgtctagtcctttgcgaatttctctgatttgtgggcacagttatgaagtttccccccatgtgaaaacagggaacaaaatagcagagccaagccagacaggggggcctattccttcccttagcttccgtggacttggcccacacctccgccctaaacaccttaccgtttccaaaaagcttgtgccccaaaccccttgggaagtcttttccccagaaaaatagaaacctgggaaatggaaaaaatcccccccaaatggccaaaggggcctaagcgggggttcctctaaggggtaaataccgggggaaaccgtggtgggaaaaaatttaaggggggctggctcctgcctggcctcctggaatgggccttaaaaggttcccctgaggcccacccctctaagggggcccgctcttgaaaaaaacctccccatatttcggaacacgcccggggcac

SEQ ID NO: 162759 - DNA, 595 bp, Homo Sapiens
tatagtttattgaacagccacacccattcctttacacatgatctatggcagagttgaatagttgcaacagacactatgtggcctgcaaaatcggaaatttttactgtctggccttttacagaaaagtttgccagcccctgatctagaccagcagctcatctgatagaggcagaggtggccttaaagatgtggccttcttcattttctgttggtttggtttcgtttctatgagagatttcctctgatagctctgctttccccagcacttactctctgagcttttaaatgttctctctgggagcttcatataagctcggtgacatttgagccacagtttttagatcagcacctggaatacatgacacattcttactgaggtcatccagcactgccatggtggctgcccagtcttctggccagtgtgccaggcacatgtccctgtcacacaggttccaagaaacacatacgcagccatgcatagaccaacagatttaatattatattgcagttttcagcgatgcagaacgcagctgcaattgtgttttaaggagaagccaaatggggatggttgtccctgcaacatggcatcgtacaa

SEQ ID NO: 162760 - DNA, 2383 bp, Homo Sapiens
  misc_feature (174)..(174): n is a, c, g, or t
cgcgtaaggcgaaggcgggaccgggtatgcgccgaagcggttatacgtgtaaaccggaaacggtgggcgggcgaacggacgcggaccaggaagcgtaagaggggcgactaagaacagaaagtgttattggcgaatgaggggtacccgggagagggggggcgagccggaaagagnggcgtgggtggtgggcgataggtggaagagggacggcaggaaatcaacgggcggaaagcgaacatgtggtgagaaagaacaagaaagaatgtaggtggcaattcgtggacgacgggaggagtatagggaggagaccgatgtaggcggggatcgagaaccgggcccccggaattgggtggcacagagtggcttagccattcgccgtgttagaggaaattgcaaggggcggtttggggcgggcgttgggggtgcggtaccgggataaccaccggaaaaggcggcgcggtataggaacgaggagcaaagcgagggatggtgaggctaaacgagatggaggggatggcgacgcttccttgaagaatggaaacgggtggggcaaggtggttttccggtccgcaaaggggggaaaggtatggggtttggcggcggaaccaggagaaacgcggcagcgaaaatttgaagttgaggtgtgtggagcgtgggcggctaatagatttaccagcgcgaagggccgagggaaggaggaagagagcgcaagtagctaatatgtatcgctcacagcatgatcgtggatcatccccataccaaagccggatgctcttttaattttagacccatcatcagagagcaggagaaagtaatttcattttacacaaagcaagattcacatgtgccaaaaaagaaagacccaaaagaaacaaaaaccaaaaccctaatgctgacactgatggtcagtaccctgaacagtggcccaaaggccactgatcaaaaataaaatagtggctgtatatcaatgaaatgaaatccaagaagctttaaccctttggcatcagaaatccagatttttccaattatgtaaatgcttatttcttacatgccaagagtgggagaagtgaatgtgccaatgtggaaagaaaaaaagccaccactcactgggacacccagagaattggctttaacagacaattagggggttaggcagaaacccagaaatggttattagctgcttgtgtcatcaatttaagtggagatgactgagtcctaaggtacaatgtaaaaatgtatgtgggaaaatgtatgctgagtcgtagttttaaagcaaaacaagaaaacaaagtatgaaagtacccagcctggcagcatacacccaagtcagagagctctgccattaggacgggcagaaaccgtcaagattcatactgctgtttctcataaggactcaacaaaaatgaatctttagtgacttgaaccatagactgaaggaatccaaagaatgcagtcattttagtaaagtactatcaggctttgtgctgatttcctgaacaaactgcattatattatgaaaacaaaaggaaaagaagaaataataaaaactatactcccatatttcacttacagtgtttgagttcctggaaggacctatataatggaggcagcattcaaacaagaaattatgccaatcaactgtcaaattttcactataattttcctaaaaaggcgtttttcccccaatatctattaatctcaaagaaacataagttgtgaatgtacagttcagaaaataaaaatggagaaactaatgacattattatgaccaaggtgtttggtaaacagtgaattctgagttgggatcatcaggaagaggctttttaaacaactctccggacttcaaaaaatctcttcaggtagtagatctgtcccaatgtcatggcaactagaacaagagcttcaaagaaggaccaaaggaccactctgctgtttgtgttgtcgttgatggctctgtgtattctctcccggacttccatgtattcctgttcgtgctttacagctgtcatcgccactgctagctcattgatcatttcttctagcttgttctggtgagcttctgtttccatatcttgtccttttggagcctccccaatatcaatggtgaacatcactatttttggagtcatggtggacatccggttactaaaacaaaatttgtatgttccatccatgtgagcagcaaatgtgtatttcccactggattctctgtaccctttgtaaattcctttgtaatctggtcctgttatctccacgtcgatgtccaggaagccgccctccgcctacctcgtatagatgaggcccatcttggtgcccgtaggttacccgctcaatagatagcactcttcagcatgggcatcgatgttaacgatatagcctgagt

SEQ ID NO: 162761 - DNA, 353 bp, Homo Sapiens
  misc_feature (275)..(291): n is a, c, g, or t
cataaaaagaattgtttatttaccgaacctggggcatattagatacaaccaattttaaatttacatcttttaaatcagttttgaagtgtttcacacacacaaaaaacttggcatgcaacagttgtcctaaggtgaaagtcacctcattaataaactgttgcaagtgttctcacccaaggtggaagtatggtttatcctgaacatgaaaacctgtaacaaatttaaattaattatataaaactcgttacttgtagttttgcccttgcaaagatccnnnnnnnnnnnnnnnnngcacaagtaactaatatgtatcagtcacaacataatcctggatcatccccataccaaaaccc

SEQ ID NO: 162762 - DNA, 746 bp, Homo Sapiens
tgtggaggccgcagtccgggtcctggcttcggcctcagcccccaccatggtgacgcttgctgaactgctggtgctcctggccgctctcctggacacggtctcgggctatttcgttagcatcgacgcccatgctgaagagtgcttctttgagcgggtcacctcgggcaccaagatgggcctcatcttcgaggtggcggagggcggcttcctggacatcgacgtggagattacaggaccagataacaaaggaatttacaaaggagacagagaatccagtgggaaatacacatttgctgctcacatggatggaacatacaaattttgttttagtaaccggatgtccaccatgactccaaaaatagtgatgttcaccattgatattggggaggccccaaaaggacaagatattggaaacagaagctcaccagaacaagctagaagaaatgatcaatgagctagcagtggcgatgacagcttgtaaagcacgaacaggaattacatggaagtccgggagagaataccacagagccagtcagttgaatgccgtcactttgcagcaggtgtctgatggtgaagtcaacggacaaaacaaaacagcagagttggtcctttgggtcccttctttgcaaggttcctggttctaagttgcccatgacatgtggggacagattctaactaccttgaggagattttttgaagtccgggaacagttggttcaaaaaagcctccttcctgattgatcccaa

SEQ ID NO: 162763 - DNA, 461 bp, Homo Sapiens
  misc_feature (141)..(141): n is a, c, g, or t
  misc_feature (283)..(317): n is a, c, g, or t
  misc_feature (386)..(386): n is a, c, g, or t
  misc_feature (418)..(418): n is a, c, g, or t
gtttctgcctaaccccctaattgtctgttaaagccaattctctgggtgtcccagtgagtggtggctttttttctttccacattggcacattcacttctcccactcttgggcatgtaaggaaataaggcatttacataattnggaaaaatctgggatttctgatgccaaagggttaaagcttcttggatttcatttcattgatatacagccactattttatttttgatcagtggcctttgggcctggtgtcagggtactgaccatcagtgtcagcattagggtnnnnnnnnnnnnnnnnnnnnnnnnnnnnnnnnnnngcacatgtgaatcttgttttgtgtaaaatgaaattactttctcttgttctctgatgatggggtttaaantaaaagagcatccggttttgggtatgggggangatccagggttatgttgtgaccgatacatattagttactgtgc

SEQ ID NO: 162764 - DNA, 1865 bp, Homo Sapiens
gacttccttccctgagcacggcggcggcggggacgagcaccggcctgcgcgcggagccggcaccggatggtgggcgggggccagccgtgcggacccaacatgagtgaagtttcctgcaagaaacgggacgactatttggaatggccagagtattttatggctgtggccttcttatcagcacagagaagcaaagatccaaattcccaggtcggcgcctgcatcgtgaattcagaaaacaagattgtcgggattgggtacaatgggatgccaaatgggtgcagtgatgacgtgttgccttggagaaggacagcagagaataagctggacaccaaatacccgtacgtgtgccatgcggagctgaatgccatcatgaacaaaaattcgaccgatgtgaaaggctgtagtatgtatgttgccttgttcccttgtaatgaatgcgctaagctcatcatccaggcaggtataaaagaagtgattttcatgtctgataaataccatgatagtgacgaggcaactgctgcgaggctcctgtttaatatggccggggtgacattccggaaattcataccgaagtgcagcaagattgtcattgactttgattcaattaacagcagaccgagtcaaaagcttcagtgagttacatctcattcaatctccagaagattgggattatcgtcttctaagaggttgctaatgcctttcatcttgaagttacacataacttcttactagccagtatggcaaaagtaggcatctaaagaatataaagcctcaaatcttccttactgtctctcttgtcacatggaatctacatgtgtttgaactattgctttaggatttaaaataggggagcctgcggaggcctggcgcacagggctagaacgagagtgcctccccttcttgtgtcctggctggctgggatgctggtggctcttcagaggagcatcagctgtctgtcatctgctgcgatccggcagcctctcttcactgctacatgtgctggaaggacaaataaataattgtggttgtgttcttaatggggacgagcagacacactgatctgaacatctggcccaagtgaagcatggcatatagtgcccttggaagaaaattaggcctcaaatgacagtagcattgaagtatttgctgcagagttgagggaaacccccagccaccctcccggaatccgagatagggtggcacatctgtcctgacagacgaggagtgtaactgaaccaggaatatttcctccattcctgctctcccactgcacacagggtggtggcacattatccctctggggggcggggacgcctgttgttttggctcaatttgggtttgttggtcacatggagctcttccatttcgtttagctgaataatgagtcgttcctagaggagacagccctgtctctccttgttgccaccaaagcccatgccctgccgtgctggaagctggggctgtggatgggagggggcccccaacatggatgtgtttgcccctcctccgcatggccacgcagttcatgtacaaggcccctctgccaactggagagaaaattaattcctatcccccgaagtggattgtgagaaattccacccacgtggaaaacagctttaccgcgcacctggtgggggtccgaaacttcttcggtgccctggttccatggttttccccccacacaagcctttatcctcctcatcacccgccgtgtcgggggaaccccccgccctgccgccctctttctccttaacccccaccttattttttattaaaccttgctctcataccttgtgtccgacaaaaacgtcttttcttatatcccacaaaataaataacccctcttaaacatgggcctttattta

SEQ ID NO: 162765 - DNA, 594 bp, Homo Sapiens
gtcacatggagttctacatctccgtttagctgaataatagtcgtcccagagggagacagcttgctctccctgtttcccccaaggcccatgccctcccgtggtggcagttgggcctgcgtatgtaagggttcccaacattggatgtgttgcccctcctccgcatgccaacgcagttcatgtacaaggcccctctgcaactggagagaaaattaattcctatcccgtgagtggattgtgagaaattccacccacgtggagacagcttactgcagcactgttggtgttcggagctcttctgtgccctggctccatgctttcacctacacaagcatcaccttcctaatcaccgcggggcggggagcgtgtggctgtgccccttctctttaatctcatttaatttttattaaacatgctcagtacctgtgttgagaaaaggctttctttatcctaaagattattacctttttaaagtgctcttatattttcatgagtttttattttgtctctgagattttgtattccacattctagggtattctgtaatttggctccttaccaatattattaaaatcttattaaaatctaccctaaaaa

SEQ ID NO: 162766 - DNA, 412 bp, Homo Sapiens
cagtgacaaattagtggttgtgtcccagtgggacagatgctctaggaagtgaactgctgagctggcaagaaaagctggggtcctcctcagtatgacacagctcctggctcccggggagcaatgaaaaggacatcagctttggcattgatgcagtaggtgacgactgagggagaacgatgaggatgccgaagcccactgtcagggtgatcaactcaagctctttgctggcgatgagaaatatccgggcacggatatcctttccagcggctctcaatccatgtagagtattcacgtagagctccactcttttatgttaatcccaatctgagacaggcccagggaggttccagtgacaaattagtggttgtgtcccacgtgggcacagatgctctaggaagtgaactgaaatgag

SEQ ID NO: 162767 - DNA, 1742 bp, Homo Sapiens
  misc_feature (1530)..(1564): n is a, c, g, or t
  misc_feature (1611)..(1620): n is a, c, g, or t
  misc_feature (1622)..(1625): n is a, c, g, or t
  misc_feature (1627)..(1627): n is a, c, g, or t
  misc_feature (1630)..(1630): n is a, c, g, or t
  misc_feature (1636)..(1638): n is a, c, g, or t
tgtattggtggtgctcgtgtccctgctgtcatcctcaggaggccaaatcagtcccagcctctcccaccatcttccctgcagcgatttcttcgagctcgaaacatctctggcgttgttctggctgaccactctggtgccttccataacaaatattaccagagtatttacgacactgctgagaacattaatgtgagctatcccgaatggctgagccctgaagaggacctgaactttgtaacagacactgccaaggccctggcagatgtggccacggtgctgggacgtgctctgtatgagcttgcaggaggaaccaacttcagcgacacagttcaggctgatccccaaacggttacccgcctgctctatgggttcctgattaaagccaacaactcatggttccagtctatcctcaggcaggacctaaggtcctacttgggtgacgggcctcttcaacattacatcgctgtctccagccccaccaacaccacttatgttgtacagtatgccttggcaaatttgactggcacagtggtcaacctcacccgagagcagtgccaggatccaagtaaagtcccaagtgaaaacaaggatctgtatgagtactcatgggtccagggccctttgcattctaatgagacggaccgactcccccggtgtgtgcgttctactgcacgattagccagggccttgtctcctgcctttgaactgagtcagtggagctctactgaatactctacatggactgagagccgctggaaagatatccgtgcccggatatttctcatcgccagcaaagagcttgagttgatcaccctgacagtgggcttcggcatcctcatcttctccctcatcgtcacctactgcatcaatgccaaagctgatgtccttttcattgctccccgggagccaggagctgtgtcatactgaggaggaccccagcttttcttgccagctcagcagttcacttcctagagcatctgtcccactgggacacaaccactaatttgtcactggaacctccctgggcctgtctcagattgggattaacataaaagagtggaactatccaaaagagacagggagaaataaataaattgcctcccttcctccgctcccctttcccatcaccccttccccatttcctcttccttctctactcatgccagattttgggattacaaatagaagcttcttgctcctgtttaactccctagttacccaccctaatttgcccttcaggacccttctactttttccttcctgccctgtacctctctctgctcctcacccccacccctgtacccagccaccttcctgactgggaaggacataaaagggttaatgtcagggtcaaactacattgagccccctgaggacaggggcatctctgggctgagcctactgtctccctcccactgtccttttctccaggccctcagatggcacattaagggtgggcgtgctgcgggtgggtatcccacctccagcccacagtgctcagttgtactttttattaagctgtaatatctnnnnnnnnnnnnnnnnnnnnnnnnnnnnnnnnnnnggaaaaatatatataatgaggtttcattaaaatagattaatcgggannnnnnnnnntnnnntnttnaataannntcctggttcggcccgcctccggcccctcgaggaagctttccaaaaaccattccgttttggccgccgcggggcccccaattagggtaaagggggaaccaatggga

SEQ ID NO: 162768 - DNA, 1872 bp, Homo Sapiens
  misc_feature (1291)..(1291): n is a, c, g, or t
gtcattcatagtaaaacttcattgaacagaaaacccagcaaaggtttcacctccgcaaagttccccttagtttaaagtaaagcactgcattttaaaaagcaattatacataagtctttcctagaaaagtcctgctaaaacatgtctagcaatttcattgattatataaagtagtacacttagtgtaatttaaacattccaacaggaatcaaatcgtaccagcagaaccacttctgcatctatgacttctatgtacaaacacacatgcagacacacacatttggaaaagttcctcaagcatagacatgcaacacctaaggccttctacgtacagtgcttattaaactacatagagtatatattaaagctcttcagaataaagacatgagaagccttgggcattttttgttcaccaatttgtatcacggcttcacgtttctgcttttgctggctcacaaaagcatatcatcatccacactgttttttaaaaactcatcattgccatgtccaggagaggcaatctagctggagtcaggtgatccagtccattcctgtcaaagcctccaacagctacagcacaaacaccatcagtttgcgatggctggggggccttctggaagaagagaggcaaagaaagtcttgaagacaagccatgctgtgctcataaaggaggggctggtctgctcgccatctagtacatccctgtctggagggaggtggttggggtcttcagtttcaggatcagtgccttcctgtaagttattgttggggtcctgatttacaacgtcaggaggaggaccatcatttgggaagttctgaaccggcctcggtctaaatggaaaccacccaacgtgatgcaggtacataacaacggtggcccccatgaccatgaggaatctgctcagggaggagtagaagtagaggatactgagaaaaacagaaaatgtagctgctgaataggtccaatccaaccaatctcgatttatttcatcatcttcttccacaatagggccaccttgtgcattcatccgcaaattttgattggctccaggattaacaaccacttgaggagcagcattctgattggcaggctggttttcagctggaaactggttgtgaataggggctggagcaggtgcagagaccacaggtatctcttgtgcacttggtggtggaacaaaagcccctgatgcagcagtggctgctaaatattgcatgtagtactgtcgtgcatatatctgctggaaccaggaaagctgaagccacccataggggtgtgtaaccggagaaanccaggaccccagggccttggaatgcctgctgggcagcttcaggccttgagatgttttcccatccaggggaagaaaggttccgaagaacttccctttgccttaaaccatcacttgaggaatcctcaggatactgtccccgattagaaccagcaggctcctctgtggattcagccaccttggcgttgatttctggcatttttgaaggactcttcacattgcacaccagatgcaaaacatgccgtttttcctgctttggaagcaagtccctgagacattggtgatccaacaacagcttcccagaataaattaacctctggtcctctggacgcggacgctcggggtagacgcggctcaggtgggccttgaggtggcccacactccagccgcggtcgccactcagctccaagtcgcggtggcgctggttggggctcttcaccaggagcgtgacgggctcgggttcggtctcggactccatggcggcggcggcggtgtcggggctccgctgcgctcctaggtgccaggcaggcggcgtctcagccgcccgcaatctctgcaacgacagttcacgtctctggggcccc

SEQ ID NO: 162769 - DNA, 607 bp, Homo Sapiens
aagttcaccggctatcacattatcggagtgcatggaaggattcgccactacccagaccttgtttttgttgtattttggaagacaggcttttttaaaagaaacattttcctcagattaaaagatgatgctattacaactagcattgcctcaaaaactgggaccaaccaaagtgtgtcaaccctgtttccttaaaagaggctatgaatcccaaaggccacatccaagacaggcaataatgagcagagtttacagctcctttaataaaatgtgtcagtaattttaaggtttatagttccctcaacacaattgctaatgcagaatagtgtaaaatgcgcttcaagaatgttgatgatgatgatatagaattgtggctttagtagcacagaggatgccccaacaaactcatggcgttgaaaccacacagttctcattactgttatttattaactgtagcattctctgtctcctctctctcctcctttgaccttctcctcgaccagccatcatgacatttaccatgaatttacttcctcccaagagtttggactgcccatcagattgttgctgcacatggtgccctttcggagaagaggaatcctcgagagtc

SEQ ID NO: 162770 - DNA, 876 bp, Homo Sapiens
ggggaggcgaagaacgcaaagctgagaacatggacgttaatatcgccccactccgcgcctgggacgatttcttcccgggttccgatcgctttgcccggccggacttcagggacatttccaaatggaacaaccgcgtagtgagcaacctgctctattaccagaccaactacctggtggtggctgccatgatgatttccattgtggggtttctgagtcccttcaacatgatcctgggaggaatcgtggtggtgctggtgttcacagggtttgtgtgggcagcccacaataaagacgtccttcgccggatgaagaagcgctaccccacgacgttcgttatggtggtcatgttggcgagctatttccttatctccatgtttggaggagtcatggtctttgtgtttggcattacttttcctttgctgttgatgtttatccatgcatcgttgagacttcggaacctcaagaacaaactggagaataaaatggaaggaataggtttgaagaggacaccgatgggcattgtcctggatgccctagaacagcaggaagaaggcatcaacagactcactgactatatcagcaaagtgaaggaataaacataacttacctgagctagggttgcagcagaaattgagttgcagcttgcccttgtccagacctatgttctgcttgcgtttttgaaacaggaggtgcacgtaccacccaattatctatggcagcatgcatgtataggccgaactattatcagctctgatgtttcagagagaagacctcagaaaccgaaagaaaaccaccaccctcctattgtgtctgaagtttcacgtgtgtttatgaaatctaatgggaaatggatcacacgatttctttaagggaatt

SEQ ID NO: 162771 - DNA, 951 bp, Homo Sapiens
cacctggaggccgagtgcctggaatggctccgcagatacctggagaacgggaaaggagaccctgcagcgcgcggaccccccaaagacacacgtgacccaccaccccatctctgaccatgaggccaccctgaggtgctgggccctgggcttctaccctgcggagatcacactgacctggcagcgggatggcgaggaccaaactcaggacaccgagcttgtggagaccaggccagcaggagatggaaccttccagaagtgggcagctgtggtggtgccttctggagaagagcagagatacacgtgccatgtgcagcacgaggggctgccggagcccctcaccctgagatgggagccatcttcccagcccaccatccccatcgtgggcatcgttgctggcctggctgtcctggctgtcctagctgtcctaggagctgtgatggctgttgtgatgtgtaggaggaagagctcaggtggaaaaggagggagctgctctcaggctgcgtccagcaacagtgcccagggctctgatgagtctctcacagcttgaaaagcctgagacagctgtcttgtgagggactgagatgcaggatttcttcacgcctcccctttgtgacttcaagagcctctggcatctctttctgcaaaggcacctgaatgtgtctgcgtccctgttagcataatgtgaggaggtggagagacagcccaccccccgtgtccactgtgacccctgttcccatgctgacctgtgtttcctccccagtcatctttccctgttccagagaggtggggctggatgtctccatctctgtctcaactttatgtgcactgagctgcaacttcttacttccctactgaaaataagaatctgaatataaatttgttttctcaaatatttgctatgagaggttgatggattaattaaataagtcaatccctggaatttgagagagc

SEQ ID NO: 162772 - DNA, 836 bp, Homo Sapiens
cctcacaatacctggagaaggggaaggagacgctgcttcacctggagcccccaaagacacacgtgactcaccaccccatctctgaccatgaggccaccctgaggtgctgggccctgggcttctaccctgcggagatcacactgacctggcagcaggatggggagggccatacccaggacacggagctcgtggagaccaggcctgcaggggatggaaccttccagaagtgggcagctgtggtggtgccttctggagaggagcagagatacacgtgccatgtgcagcatgaggggctacccgagcccgtcaccctgagatggaagccggcttcccagcccaccatccccatcgtgggcatcattgctggcctggttctccttggatctgtggtctctggagctgtggttgctgctgtgatatggaggaagaagagctcaggtggaaaaggagggagctactctaaggctgagtggagcgacagtgcccaggggtctgagtctcacagcttgtaaagcctgagacagctgccttgtgtgcgactgagatgcacagctgccttgtgtgcgactgagatgcaggatttcctcacgcctcccctatgtgtcttaggggactctggcttctctttttgcaagggcctctgaatctgtctgtgtccctgttagcacaatgtgaggaggtagagaaacagtccacctctgtgtctaccatgacccccttcctcacactgacctgtgttccttccctgttctcttttctattaaaaataagaacctgggcagagtgcggcagctcatgcctgtaatcccagcactagggaggtatgtgaggtgctg

SEQ ID NO: 162773 - DNA, 795 bp, Homo Sapiens
ggggaggaccagacccaggacacggagctcgtggagaccaggcctgcaggggatgaaaccttccagaagtgggcgcgctgtggtggtcccttctggacaggagcagagatacacctgccatgtgcagcatgagggtctgcccaagcccctcaccctgagatgggaaccgtcttcccagcccaccatccccatcgtgggcatcattgctggcctggttctccttggagctgtgatcactggagctgtggtcgctgccgtgatgtggaggaggaagagctcagatagaaaaggagggagctacactcaggctgcaagcagtgacagtgcccagggctctgatgtgtctctcacagcttgtaaagtgtgagacagctgccttgtgtgggactgagaggcaagagttgttcctgcccttccctttgtgacttgaagaaccctgactttgtttctgcaaaggcacctgcatgtgtctgtgttcgtgtaggcataatgtgaggaggtggggagaccaccccacccccatgtccaccatgaccctcttcccacgctgacctgtgctccctccccaatcatctttcctgttccagagaggtggggctgaggtgtctccatctctgtctcaacttcatggtgcactgagctgtaacttcttccttccctattaaaattagaacctgagtataaatttactttctcaaattcttgccatgagaggttgatgagttaattaaaggagaagattcctaaaatttgagagacaaaataaatggaagacatgagaaccttccagagtcc

SEQ ID NO: 162774 - DNA, 641 bp, Homo Sapiens
ccctcaccctgaagatggagccatctccaagtcaccatccccatcgtgggcattgtgcttggcctggctgtcctagcagttgtggtcatcggagctgtggtcgctgctgtgatgtgtaggaggaagagctcaggtggaaaaggagggagctactctcaggctgcgtccagcgacagtgcccagggctctgatgtgtctctcacagcttgaaaagcctgagacagctgtcttgtgagggactgagatgcaggatttcttcacgcctcccctttgtgacttcaagagcctctggcatctctttctgcaaaggcacctgaatgtgtctgcgtccctgttagcataatgtgaggaggtggagagacagcccacccttgtgtccactgtgacccctgttcccatgctgacctgtgtttcctccccagtcatctttcttgttccagagaggtggggctggatgtctccatctctgtctcaactttatgtgcactgagctgcaacttcttacttccctactgaaaataagaatctgaatataaatttgttttctcaaatatttgctatgagaggttgatggattaattaaataagtcaattcctggaatttgagagagcaaataaagacctgagaaccttccagaaaa

SEQ ID NO: 162775 - DNA, 674 bp, Homo Sapiens
ggcctgggtggcgaattcggcacgaggccgtcatggcgccccgaaccctcgtcctgctactctcgggggctctggccctgacccagacctgggcgggctctcactccatgaggtatttctacacatccgtgtcccggcccggccgcggggagccccgcttcatcgcagtgggctacgtggacgacacgcagttcgtgcggttcgacagcgacgccgcgagccagaggatggagccgcgggcgccgtggatagagcaggagggtccggagtattgggacggggagacacggaaagtgaaggcccactcacagactcaccgagtggacctggggaccctgcgcggctactacaaccagagcgaggccggttctcacaccgtccagaggatgtatggctgcgacgtggggtcggacgggcgcttcctccgcgggtaccaccagtacgcctacgacggcaaggattacatcgccctgaaagaggacctgcgctcttggaccgcggcggacatggcggctcagatcaccaagcgcaagtgggaggcggcccatgtggcggagcagctgagagcctacctggagggcacgtgcgtggagtggctccgcagatacctggagaacgggaaggagacgctgcagcgcacggacccccccaagacacatatgactcaccacgct

SEQ ID NO: 162776 - DNA, 851 bp, Homo Sapiens
cctgggtggcgaattcggcacgagggcgccccgaaccctcatcctgctgctctcgggagccctggccctgaccgagacctgggccggctcccactccatgaggtatttctacaccgctgtgtcccggcccggccgcggggagccccacttcatcgcagtgggctacgtggacgacacgcagttcgtgcggttcgacagcgacgccgcgagtccgagaggggagccgcgggcgccgtgggtggagcaggaggggccggagtattgggaccgggagacacagaagtacaagcgccaggcacagactgaccgagtgagcctgcggaacctgcgcggctactacaaccagagcgaggccgggtctcacatcatccagaggatgtatggctgcgacgtggggcccgacgggcgcctcctccgcgggtatgaccagtacgcctacgacggcaaggattacatcgccctgaacgaggatctgcgctcctggaccgccgcggacacggcggctcagatcacccagcgcaagtgggaggcggcccgtgaggcggagcagctgagagcctacctggagggcctgtgcgtggagtggctccgcagatacctgaagaatgggaaggagacgctgcagcgcgcggaacacccaaagacacacgtggacccaccatcccggtctctgaccatgaggccacccctgaggtgctgggcccctgggctttctacccctgcgggagatcaccactggacctggccagcggggatgggcgagggacccaaacctcagggaaccaccgaagccttgtggggagaaccaaggcccaagccaggagaaaatggggaaacccttctccaaaaaa

SEQ ID NO: 162777 - DNA, 968 bp, Homo Sapiens
ccaggctggtacggtccggagttccgggatatcgtcgaccacgcgtcgctcatcctgctgctctcgggagccctggccctgaccgagacctgggcctgctcccactccatgaggtatttctacaccgccgtgtcccggcccggccgcggagagccccgcttcatcgcagtgggctacgtggacgacacgcagttcgtgcagttcgacagcgacgccgcgagtccaagaggggagccgcgggcgccgtgggtggagcaggaggggccggagtattgggaccgggagacacagaagtacaagcgccaggcacagactgaccgagtgaacctgcggaaactgcgcggctactacaaccagagcgaggccgggtctcacaccctccagaggatgtatggctgcgacctggggccggacgggcgcctcctccgcgggtataaccagttcgcctacgacggcaaggattacatcgccctgaacgaggatctgcgctcctggaccgccgcggacacggcggctcagatcacccagcgcaagtgggaggcggcccgtgaggcggagcagcggagagcctacctggagggcacgtgcgtggagtggctccgcagatacctggagaacgggaagaagacgctgcagcgcgcggaacacccaaagacacacgtgacccaccatcccgtctctgaccatgaggccaccctgaggtgctgggccctgggcttctaccctgcggagatcacactgacctggcagcgggatggcgaggaccaaactcaggacaccgagcttgtggagaccaggccagcaggagatggaaccttccagaagtgggcaagctggtggtggtgcccttctgggagaagagcagagatacacgtggcctgttgcagcacgaaggggctgcccagagccccctcacccctggaaatggggggggcatctttcccaggcccaacccatcccccattcgg

SEQ ID NO: 162778 - DNA, 1126 bp, Homo Sapiens
cgcagttcgtgcggttcgacagcgacgccgcgagccagaggatggagccgcgggcgccgtggatagagcaggagggtccggagtattgggacggggagacacggaaagtgaaggcccactcacagactcaccgagtggacctggggaccctgcgcggctactacaaccagagcgaggccggttctcacaccgtccagaggatgtatggctgcgacgtggggtcggactggcgcttcctccgcgggtaccaccagtacgcctacgacggcaaggattacatcgccctgaaagaggacctgcgctcttggaccgcggcggacatggcagctcagaccaccaagcacaagtgggaggcggcccatgtggcggagcagttgagagcctacctggagggcacgtgcgtggagtggctccgcagatacctggagaacgggaaggagacgctgcagcgcacggacgcccccaagacgcatatgactcaccacgctgtctctgaccatgaggccaccctgaggtgctgggccctggcttctaccctgcggagatcacactgacctggcagcgggatggggaggaccagacccaggacacggagctcgtggagaccaggcctgcaggggatggaaccttccagaagtgggcggctgtggtggtgccttctggagaggagcagagatacacctgccatgtgcagcatgagggtctgcccaagcccctcaccctgagatgggagccatcttcccagcccaccatccccatcgtgggcatcattgctggcctggttctccttggagctgtgatcactggagctgtggtcgctgctgtgatgtggaggaggaagagctcagatagaaaaggagggagctactctcaggctgcaagcagtgacagtgcccagggctctgatgtgtctctcacagcttgtaaagtgtgagacagctgccttgtgtgggactgagaggcaagagttgttcctgcccttccctttgtgacttgaagaaccctgactttgtttctgcaaaggcacctgcatgtgtctgtgttcgtgtaggcataatgtgaggaggtggggagaccaccccacccccatgtccaccatgaccctcttcccacgctgacctgtgct

SEQ ID NO: 162779 - DNA, 845 bp, Homo Sapiens
ggcattccaggaagggtcgccacccccaggttccccatttcttgaaggttcccatcccctgccagggcttggtctcccccgagctccgtgtactggggtatggccttccccctcctggtttccaggtcagtgggatctccgcaggtaagaagctcagggcccagcacctcaggggggcctcatggtcagagatggggtggtgagtcacgtgtgtctttgggggctccaggtgaagcagcgtctccttccccttctccaggtattggtggagccactccacgcatgtgtcttccaggtaggctctctggtgctccgcctcagaggcatcatttgacttttgctcggagatctgagccgccgtgtccaccgcggtccaggagcgcaggtcctcattcagggtgagataatccttgccgtcgtaggcgaactgttcatacccgcggaggaagcgcctgtcgggccccagctcgcagccatgcatccactgcagggtgtgagacccggcctcgctctgattgtagtagccgcgcagcgtccgcaggttcactcggaaaatctgtgcggtgtccctggcgctccgtgtctcccggtcccaatactctgacccctcctgctccatccacggcgcccgcggcaccatcctcggactcgcggcgtcgttgtcgaagcgcacgaactgggtgtcgtccacgtagcccacagagatgaagcggggctccccgcggccgggccgggacacggaagtgtggaaatacttcaaggagtgggagcccgcccaggtctgggtaagggccagggcctccgagaggagtaaaaggagggttccatctaccatgatcccagcc

SEQ ID NO: 162780 - DNA, 537 bp, Homo Sapiens
  misc_feature (45)..(45): n is a, c, g, or t
  misc_feature (120)..(120): n is a, c, g, or t
actggaatgtttagaggaaagggccccagtggaaaaagaaggaanctactctcaggctgctccagcgaacagtgccagggcctctgatgtgtctctcacagctgaaaaagcctgagacanctgtcttgtgagggactgagatgcaggatttcttcactcctccccttgtgaacttcaaagacgctctggcatctctttctgcaaaggcacctgaatgtgtctgcgttcctgttagcataatgtgaggaggtggagagacagcccacccttgtgtccactgtgacccctgttcccatgctgacctgtgtttcctccccagtcatctttcttgttccagagaggtggggctggatgtctccatctctgtctcaactttatgtgcactgagctgcaacttcttacttccctactgaaaataagaatctgaatatacatttgttttctcaaatatttgctatgagaggttgatggattaattaaataagtcaattcctggaatgtgagagagcaaataaagacctgagacccttccagaac

SEQ ID NO: 162781 - DNA, 558 bp, Homo Sapiens
ctgtaatcactgactgtggcgctgctggatgtgaagaggaagagctcagatagaaaaggagggagctactctcaggctgcaagcagtgacagtgcccagggctctgatgtgtctctcacagcttgtaaagtgtgagacagctgccttgtgtgggactgagaggcaagagttgttcctgcccttccctttgtgacttgaagaaccctgactttgtttctgcaaaggcacctgcatgtgtctgtgttcgtgtaggcataatgtgaggaggtggggagaccaccccacccccatgtccaccatgaccctcttcccacgctgacctgtgctccctccccaatcatctttcctgttccagagaggtggggctgaggtgtctccatctctgtctcaacttcatggtgcactgagctgtaacttcttccttccctattaaaattagaacctgagtataaatttactttctcaaattcttgccatgagaggttgatgagttaattaaaggagaagattcctaaaatttgagagacaaaataaatggaacacatgagaaccttccag

SEQ ID NO: 162782 - DNA, 1412 bp, Homo Sapiens
  misc_feature (1032)..(1032): n is a, c, g, or t
  misc_feature (1082)..(1082): n is a, c, g, or t
  misc_feature (1213)..(1213): n is a, c, g, or t
  misc_feature (1311)..(1311): n is a, c, g, or t
  misc_feature (1318)..(1318): n is a, c, g, or t
caggccagcaggagatggaaccttccagaagtgggcagctgtggtggtgccttctggagaagagcagagatacacctgccatgtgcagcacgaggggctgccagagcccctcaccctgagatgggagccatcttcccagcccaccatccccatcgtgggcatcgttgctggcctggctgtcctggctgtcctagctgtcctaggagctgtgatggctgttgtgatgtgtaggaggaagagctcaggtggaaaaggagggagcttgctctcaggctgcgttccagcaacagttgcccacggcctctgatgagtctctcatcgcttgtagagcctaggacatctgcctgtgggggaccgacacgcacgatctcttcgcacctttacctcagtgcttcaagaggcctctggcatctcttccggcaaaggcaatctgaagtgcgtcatgccggcacccttatcatataccggaggcaggcgcgaagaccgtcgatcaccggcggtgacccggccgcctaaggccgctggccgccggtggcgcacctgtcgtcgtatcgctcgctcagtatcccgcgtaccagcgcgctcttacgtaccccgcacacgtccctatcccccgcgctgcgccccctcatgccgcacaacctacatagatacgcgcacgccccgagccctctgaggcccggatacgcgcccgggcgatcatcgcacgagcaagtgagcgtatacgagagggtacgtctcgcgctgtcaccccgtggtcctgtatctgccccgttgtatgcgcttacgaatagtctgtgatgtgcaggccctcgagtgttcgcctggctgtgtctgttccctccgcctctgccctccaccaccttatcgccttcatctgcgctcctcacgtcgccggcccgcgactgttgtgggagtgagatgcgtcgcggagagcacgatcggcgcacgtgtatacgtgtgacgcccgcgcgcatctgtcttcgctacgctttatcggcgcacgaggcattgcatgtatccaccaccatnacaccgcgcgtacgacgcgcgcactaatccctcctcgccttctgtctttngcacgcgccccccgagtcgacgttgctctgcgatgatgctctatgtagcgcgtcgcgatacactcgcaaaccagaccacagacgactgatatggtatccatgtagcacgacgtcgaatccacacaacgccncagactagtgtgctgtgggcgttgctcacacagcaagacgagtgccgacgttacgcgcagcgttgtcacgaaatgagcgttggccgcgcgtgtctctntctgcancagtcgcgagactagcacacccctactactcacgccagcccgcgcgaaggttgagacaagtggactatcgtatgattctttgggacatgaccca

SEQ ID NO: 162783 - DNA, 1004 bp, Homo Sapiens
  misc_feature (131)..(142): n is a, c, g, or t
  misc_feature (226)..(226): n is a, c, g, or t
taggggtcggccgtgggaaaaccccggtttctcctattttccaggggtgaacggggttttgggggtaaccccccccaaggggggccccagtggcacggtgtatttttttggtccccttttcccggaagggnnnnnnnnnnnnaggtgggcccctctttggaaaggtttcccatccccctgccagggccttgttttcccacgaacctcccggtgtcctgggttatgnccctcccccattcctgttgccagggtacagggtgatctcccgcaggggaggaagcccaggggcccagcccctcagggttggcctcatggtcagagaagggggtggggagtcacgtgtgtctttgggggctccaggtgaagcagcgtctccttccccttctccagggtattggtggagccactccacgcatgtgtcttccaggtaggctctctggtgctccgcctcagaggcatcatgtgacttttgctcggagatctgagccgccgtgtccaccgcggtccaggagcgcaggtcctcattcagggtgagataatccttgccgtcgtaggcgaactgttcatacccgcggaggaagcgcccgtcgggccccagctcgcagccatgcatccactgcagggtgtgagacccggcctcgctctgattgtagtagccgcgcagcgtccgcagattcactcggaaaatctgtgcggtgtccctggcgctccgtgtctcccggtcccaatactctgacccctcctgctccatccacggcgcccgcggcaccatcctcggactcgcggcgtcgttgtcgaagcgcacgaactgggtgtcgtccacgtagcccacagagatgaagcggggctccccgcggccgggccgggacacggaagtgtggaaatacttcaaggagtgggagcccgcccaggtctgggtaagggccagggcctccgagaggagtaaaaggagggttccatctaccatgatcccagcccggacgcgtgggtcgacccacgcgtcc

SEQ ID NO: 162784 - DNA, 949 bp, Homo Sapiens
ccaggctggtacggtccggagttccgggatatcgtcgaccacgcgtcgctcatcctgctgctctcgggagccctggccctgaccgagacctgggccggctcccactccatgaggtatttctacacagccgtgtcccggcccggccgcggagagccccgcttcatcgcagtgggctacgtggacgacacgcagttcgtgcagttcgacagcgacgccgcgagtccaagaggggagccgcgggagccgtgggtggagcaggaggggccggagtattgggaccgggagacacagaagtacaagcgccaggcacagactgaccgagtgaacctgcggaaactgcgcggctactacaaccagagcgaggacgggtctcacaccctccagaggatgtatggctgcgacctggggcccgacgggcgcctcctccgcgggtataaccagttcgcctacgacggcaaggattacatcgccctgaacgaggacctgcgctcctggaccgccgcggacaaggcggctcagatcacccagcgcaagtgggaggcggcccgtgaggcggagcagcggagagcctacctggagggcacgtgcgtggagtggctccgcagatacctggagaacgggaagaagacgctgcagcgcgcggaacacccaaagacacacgtgaaccaccatcccgtctctgaccatgagggccaccctgaggtgctgggcccctgggctttctacccctgcgggagatcacactggacctggcagcggggatggcgagggaccaaacctcagggacaccggagcctttgtggagaccagggccagccaggagatgggaacccttcccagaaaatgggccagcctgtgggtgggtgcctttcctgggacaaaaaggcagaaaataccccggggccatggggcaagccaccaaggggggttggccaaaaagcccccttca

SEQ ID NO: 162785 - DNA, 1344 bp, Homo Sapiens
  misc_feature (1253)..(1254): n is a, c, g, or t
cgcagttcgtgcggttcgacagcgacgccgcgagccagaggatggagccgcgggcgccgtggatagagcaggagggtccggagtattgggacggggagacacggaaagtgaaggcccactcacagactcaccgagtggacctggggaccctgcgcggctactacaaccagagcgaggccggttctcacaccgtccagaggatgtatggctgcgacgtggggtcggactggcgcttcctccgcgggtaccaccagtacgcctacgacggcaaggattacatcgccctgaaagaggacctgcgctcttggaccgcggcggacatggcagctcagaccaccaagcacaagtgggaggcggcccatgtggcggagcagttgagagcctacctggagggcacgtgcgtggagtggctccgcagatacctggagaacgggaaggagacgctgcagcgcacggacgcccccaaaacgcatatgactcaccacgctgtctctgaccatgaagccaccctgaggtgctgggccctgagcttctaccctgcggagatcacactgacctggcagcgggatggggaggaccagacccaggacacggagctcgtggagaccaggcctgcaggggatggaaccttccagaagtgggcggctgtggtggtgccttctggacaggagcagagatacacctgccatgtgcagcatgagggtttgcccaagcccctcaccctgagatgggagccgtcttcccagcccaccatccccatcgtgggcatcattgctggcctggttctctttggagctgtgatcactggagctgtggtcgctgctgtgaatgttggaggaagaagagctcagatagaaaaggagggagctactctcaggctgcaagcagtgacagtgcccagggctctgatgtgtctctcacagcttgtaaagtgtgagacagctgccttgtgtgggactgagaggcaagagttgttcctgcccttccctttgtgacttgaagaaccctgactttgtttctgcaaaggcacctgcatgtgtctgtgttcgtgtaggcataatgtgaggaaggtggggagaccaccccacccccatgtccaccatgaccctcttcccacgctgacctgtgctccctccccaatcatctttcctgttccagaagaggtgggggcttgaggtgttctcccatctctgtctccaacttcatgggtgcactggagctgtaaacttcttcccttccctattaaaaattannaacccctgagtataaattttacttttctcaaaattccttgcccatggaaaaaggtttgatgaaattaaatttaaaggggagaaagaattc

SEQ ID NO: 162786 - DNA, 211 bp, Homo Sapiens
gtcagagatgggtggtgggtcatatgtgtcttgggggggtccgtgcgctgcagcgtctccttcccgttctccaggtatctgcggagcccgtccacgcacgtgccctccaggtaggctctctgctgctccgccacatgggccgcctcccacttgcgcttggtgatccgagccgccaggcccgcggtagcacatataaaaactggagtttcag

SEQ ID NO: 162787 - DNA, 911 bp, Homo Sapiens
  misc_feature (590)..(590): n is a, c, g, or t
  misc_feature (674)..(674): n is a, c, g, or t
  misc_feature (759)..(759): n is a, c, g, or t
cgacctggggcccgacgggcgcctcctccgcgggtataaccagttcgcctacgacgggaaggattacatcgccctgaatgaggacctgcgctcctggaccgccgcggacaaggcggctcacatcacccagcgcaactgggaggcagcccgtgaggcggagcagcggagagcctacctggagggcacgtgcgtggagtggctccgcagatacctgaagaacgggaaggagacgctgcagcgcgcggaacacccaaagacacacgtgacccaccatcccgtctctgaccatgaggccaccctgaggtgctgggccctgggcttctaccctgcggagatcacactgacctggcagcgggatggcgaggaccaaactcaggacaccgagcttgtggagaccaggccagcaggagatggaaccttccagaagtgggcagctgtggtggtgccttctggagaagagcagagatacacgtgccatgtgcagcacgaggggctgccagagcccctcaccctgagatgagagccatcttcccagcccaccatccccatcgtgtgcatcgttgctgggctggctgtcctggctgtcctanctgtcctaggagctgcgatggctgttgtgatgtgtacgaagcagagctcaggtggaacaggagggagctgctctcaggctgctntcaacaacagtgcccaaggcttctgatgagtctcctcatcgcctggtaaagcctgacaacagctgccctgtgtggggaattgganatgcagggattttctttcacacccttttccctttgtgaacttcaagaaccctctgggcattttccttttcctggaaaaggggcattttggaaatgtgggtcctgcccattcccttgtttaacccattaatagggggaaagggaggttggcgc

SEQ ID NO: 162788 - DNA, 1330 bp, Homo Sapiens
ccatgggcaagagccctctgagccagggagattcttcagcccccagcctgcctaaacaggcagccagcacctctgggcccacccccgctgcctcccaagcactgaatccgcaagcacaaaagcaagtgcggctggcgactagcagccctgccacgtcacagactggacctggtatctgcatgaatgctaactttaaccagacccacccaggcctcctcaacagtaactctggccatagcttaattaatcaggcttcacaagggcaggcgcaagtcatgaatggatctcttggggctgctggcagaggaaggggagctggaatgccgtaccctactccagccatgcagggcgcctcgagcagcgtgctggctgagaccctaacgcaggtttccccgcaaatgactggtcacgcgggactgaacaccgcacaggcaggaggcatggccaagatgggaataactgggaacacaagtccatttggacagccctttagtcaagctggagggcagccaatgggagccactggagtgaacccccagttagccagcaaacagagcatggtcaacagtttgcccaccttccctacagatatcaagaatacttcagtcaccaacgtgccaaatatgtctcagatgcaaacatcagtgggaattgtacccacacaagcaattgcaacaggccccactgcagatcctgaaaaacgcaaactgatacagcagcagctggttctactgcttcatgctcataagtgtcagagacgagagcaagcaaacggagaggttcgggcctgctcgctcccgcattgtcgaaccatgaaaaacgttttgaatcacatgacgcattgtcaggctgggaaagcctgccaagttgcccattgtgcatcttcacgacaaatcatctctcattggaagaactgcacacgacatgactgtcctgtttgcctccctttgaacaaatgccagtgacaagcgaaaccaacaaaccatcctggggtctccagctagtggaattcaaaacacaattggttctgttggcacagggcaacagaatgccacttctttaagtaacccaaatcccatagaccccagctccatgcagcgagcctatgctgctctcggactcccctacatgaaccagccccagacgcagctgcaagcctcaggttcctggccagcaaccagcacagcctcaaacccaccagcagatgaggactctcaaccccctgggaaataatccaatgaacattccagcaggaggaataacacagatcagcagccccaaacttgatttcccaatcaggtcttccgacttcctgggggccacaaaccag

SEQ ID NO: 162789 - DNA, 927 bp, Homo Sapiens
cagtttgtctactgcattcccgtggggacacacgagttcacagtcgagcagtgctttggtgatgggctacactgggctggctgtatgatcatcgtacttcttgggcagcagcggcgttttgctgtgctggatttctgctaccatctacttaaagtccagaaacatgatggcaaagatgagattattaaaaatgtgcctttgaagaagatggtggagagaattcgcaagttccagattctcaatgatgagatcatcaccatcctggataagtacctgaagtcaggcgacggggagggcacgccagtggagcatgtgcgctgcttccagccgcccatccaccagtccctcgccagcagctgagggcacgcgctgcactccgtaactcaacatggcatgcctttctctccgtaaactacttagtgagatttttagggactatttttcagtatctctgtacctgttaaagggggtgcttttcgatctaaaaacttaattttataaaattgacttatttttctagactaaaattgtatatgcttttggtaattaggaactcttgagaatattggctgctgattgttgccatcacgttcctacaaaattgtttttctatgggatgttctggcagctgtgtcataaaatgctgctgggttcattcattcattccataagaaacttaataccagcaaatgcattaaatcccttgccagttaccattaactgtaactatttagcttttgtttagggatctttctgatggtcttttatgagcaatcttagttctaagtcattgttcccatcccttttttgtgtgtttcagaaaatagtgaacttgattcccctgcttccactaaatccagttgtgacaaaatctaacgtgacatcagatcgaaaggttatagaaataaaactaatgagatctaaata

SEQ ID NO: 162790 - DNA, 1399 bp, Homo Sapiens
ggggctaccagggtatcgccgtggtcatggaggagctgctgaaggtcgtcaagagcctgctgcaaggcacaatcctgcagtacgtgaagacgctgatggaggtgatgcccaagatctgccgcctgccccggcacgagtacggctctcctggtatcctggagttcttccaccaccagctgaaggacatcgtggagtacgcagagctgaagacggtgtgcttccagaacctgcgggaggtggggaacgccatcctcttctgcctgctcatcgagcagagcctgtctttagaagaagtgtgtgacctgctgcacgcggctcctttccagaacatcttgccgcgagtccatgtgaaagagggggagagacttgatgccaaaatgaaaagactagaatcaaagtacgccccgctgcatcttgtcccactgattgaaagactggggacccctcagcaaattgccatcgcaagagagggggacctgctgacaaaggagcgcctctgctgcggcctgtccatgtttgaggtcatcctgacacggatccggagctttctggatgaccccatctggcgcgggcctctgcccagcaatggggtcatgcatgtggacgagtgtgtggagtttcacagactgtggagtgccatgcagtttgtctactgcattcccgtggggacacacgagttcacagtcgagcagtgctttggtgatgggctacactgggctggctgtatgatcatcgtacttcttgggcagcagcggcgttttgctgtgctggatttctgctaccatctacttaaagtccagaaacatgatggcaaagatgagattattaaaaatgtgcctttgaagaagatggtggagagaattcgcaagttccagattctcaatgatgagatcatcaccatcctgggattaagtacctgaaagtcaggcgacggggagggcacggccagtggaagccatgtggcgctggcttcccagccgcccattccaccaggtctcttcggcaggaggttgagggccacgcgcctggacctcccgtaaacttcaacatgggcatgtgcctttctctccggtaaacctatttaggtgacgacgttctgaggggggctagtttgtccagggaatctcccggtgccctgtttacaaggggggtggcgctttacgagtcttataaaagcctttaactttcgttctttaaaacgttgtggacgttatactatgtgttcttgggagaccctatgaagttgggtgcttataggcggtatcggggggaaatctaagggtgaccacccttgtgggggaaatatttggggacggcgtggaacttggttgtggcgccatataacgggttgtgcttacagcaaggatgtggtgtgtgtgcacattagtgggcaaaggtc

SEQ ID NO: 162791 - DNA, 1515 bp, Homo Sapiens
actaaatcactttaccccagcagatgcagtgcttcaaaagccacaaccccagttatacagacctatagaagagacaccatgccatttcatatcctccctggatgaactcgtggaactcaacgaaaagctcttgaattgtcaggaatttgcagttgacttggagcaccactcttacaggagcttcctgggactgacctgcctgatgcaaatttctactcggacggaagacttcatcattgacaccctcgagcttcgaagtgacatgtacattctcaatgagagcctcacagacccagccatcgttaaggtctttcatggtgctgattcagacatagaatggctacagaaagactttgggttgtatgtagtaaacatgtttgatactcatcaggcagcacgccttcttaacctgggcaggcactcactcgatcatctcctgaaactctactgcaacgtggactcaaacaagcaatatcagctggctgattggagaatacgccctctgcccgaggagatgctcagctacgcccgggatgacacccattacctgctatatatctatgacaaaatgaggctggagatgtgggagcgcggcaacgggcaagccgtgcagctgcaggtggtgtggcaacggagcagggacatctgcctcaagaaattcatcaaacctatcttcacggatgagtcctaccttgaactctataggaagcagaagaagcaccttaacacacagcagttgacagcctttcagctgctgtttgcctggagggataaaacagctcgcagggaagatgaaagttacggatatgtactgccaaaccacatgatgctgaaaatagctgaagaactgcctaaggaacctcagggcatcatagcttgctgcaacccagtaccgccccttgtgcggcagcagatcaacgaaatgcaccttttaatccagcaggcccgagagatgcccctgctcaagtctgaagttgcagccggagtgaagaagagcggaccgctgcccagtgctgagagattggagaatgttctctttggacctcacgactgctcccatgcccctccggatggctatccaatcatcccaaccagtggatctgtgccagttcagaagcaggcgagcctcttccctgatgaaaaagaagataacttgctgggtaccacatgcctgattgccacagctgtcatcacgttatttaatgaacctagtgctgaagacagtaaaaagggtccattgacagttgcacagaaaaaagcccagaacatcatggagtcctttgaaaatccatttaggatgtttctgccctcactgggacaccgtgctcccgtctctcaggcagcgaagttcgatccatcacccaaaatctatgaaatcagcaaccgttggaagctggcccaggtacaagtacaaaaagactctaaagaagctgtcaagaagaaggcagctgagcaaacagctgccgggaacaggcaaaggaggcgtgcaaagctgcagcagaacaggccatctcg

SEQ ID NO: 162792 - DNA, 515 bp, Homo Sapiens
gtgcagtagcaggtggtcagtatgcgtccacagaggtctcggggatcctggggggtgtagctgatctggttcacgatggtgcggacatcagccagcacttcctcatttccactcctcacggcctcgcagacctggcagcacatggagtagatgaggcaggcggtggctgcgctgtccaccccgccactcaagggcagcaaaaaccctgcctgttgacttcgtcttaaaaaatcccagagccagcaggcaggtccaaggcttatctcctcctcacggctgtggtatttccactcgatgggctcagagatgggtgccagcaagtcctcgtggcacgagagggcaaagtccaccttcactctggggtagggggtcgccctgctggccgccaggtttcgagatgaaatctccgccctgtagctccggacgtcctccagatccagcgtggccgtcaggacttccacgtcatccagagaaaactgggatccttgagcaaagacgcttccgttcatggcgat

SEQ ID NO: 162793 - DNA, 580 bp, Homo Sapiens
  misc_feature (482)..(482): n is a, c, g, or t
  misc_feature (488)..(488): n is a, c, g, or t
  misc_feature (533)..(533): n is a, c, g, or t
  misc_feature (558)..(558): n is a, c, g, or t
agtgggtcagtgtcttctgggaggagttcttgctggccatgtagcaggtggtcagtatgcgtccacagaggtctcggggatcctggggggtgtagctgatctggttcacgatggtgcggacatcagccagcacttcctcatttccactcctcacggcctcgcagacctggcagcacatggagtagatgaggcaggcggtggctgcgctgtccaccccgccactcaagggcagcaaaaaccctgcctgttgacttcgtcttaaaaaatcccagagccagcaggcaggtccaaggcttatctcctcctcagggctgtggtatttccactcgatgggctcagagatgggtgccagcaagtcctcgtggcacgagagggcaaagtccaccttcactctggggtaggggctcgccctgctggccgccaggtttcgagatgaaatctccgccctgtagctccggacgtcctccagatccagcgtggcncgtcangacttcctggcccggagatgcccatgaagacaaggagaccgattnacgcatcctgtggttctctggctgnttcccaaaatgacagcaccctt

SEQ ID NO: 162794 - DNA, 442 bp, Homo Sapiens
cacagtcatgttttaaagtgtctgagctataaatactactataaaggtgtcaactggttgtatatgtgggcccttggcatttcagaaatgacagttattgccaaccattaccaaatggaatccattttatccaaatgggcatgcttggggctgagcatgggatggagtaatgcagtcttattgcatttcagtgttagagggctttcactcggtttgcagtttctccacagctcacccaccaattctacctgtgtactccttttctgttccctctcaacttcttttccattctctccttcctcttgtttctgtccatatctctggcttcttttaatttcccttttcccttctttcttattggtctggccctgggtctggtgagaccaagggcacagaaggatactggctccatgccaacctttcctccatggcactacgacta

SEQ ID NO: 162795 - DNA, 137 bp, Homo Sapiens
aagagcagattaacatcttgcatatctttgtgctatcacatttcttcttatctgaccagctgaaatggaacgtagtgttaaatacaaataataaaacctgtaaagatcctaagtttttgcatgcactacgtacacac

SEQ ID NO: 162796 - DNA, 223 bp, Homo Sapiens
tctgcgtagaagtgttgtgtgagaggcatcaagtgactaaagatatgttcttaggcatcaactatattcaattcttgtgataagccccaaagtaatacagatgatgtggaagatatgtatttcacgttacttaactaatcatcaggtaggtaaagtatgaggttgctactaaaagattttaacctccatggtatagaaaactcttgtttaatctcagaggtcc

SEQ ID NO: 162797 - DNA, 484 bp, Homo Sapiens
aatcgatccgagttccttctgtctgttgctgggagtcgatggaacagaggaggaatagtcgcttaaactcccacctccattacttgtctggctgatgtgcacggcagacacctgcgcggaacagacggaggaatggctgggagaattaggtagcgaacttgcagggtcctatggacagctgctgcttcttccttgtggcaacaatcttctgggcaacgtcctggaagaccctctccacattcagcccgtatgtagcacacgtctcgtagtacgtgcaccgtttcaggtcgttggagagcttcctcgccctggcgtcatcgatgaccctcgggttagcagaacttatggcatcctgggttcccaccagaaccagaggaatctcgctcgtgttccgatagttggccattcgactgtagtagtggtaaacggtctggaaacttatttcatcctccaagctgaagacaaatataacagcgtccaccca

SEQ ID NO: 162798 - DNA, 601 bp, Homo Sapiens
tattcgaggctatgagacaggtgcagagagggagagcctggcaggaacgccaagaaaagacctgtgactgctggttacacagtgctctgcttccttgcttaaggccaacagcatgtgtctgcctgtcaccaggctaacccgggacccatgaggggacaggcagaagactggttttcagttcctgcatgatcaacttgtagggtgtgtgggttcctcctaaagatccaggaggaggactctgggatcctctaccgctgccttgattttgcggaggaaagtcacagcctctctgccatcaatcagccggtgatcataggtcagtgccacgtacatcatgggccgcacctctaccttgcctcctatagccactggcctgtcaaagatgccatgcatccccaggatggcagactgaggggggttgataatgggtgttccaaagagcgagccaaaaacgcctccattgctaatggtgaaggtaccaccatccatatcttcaatggcaagttcattctttcgggccttctctcccagttcagtgatggtccgttcaatatctgcaaaattcatagcttccacattcctgatgactggaaccaccaga

SEQ ID NO: 162799 - DNA, 301 bp, Homo Sapiens
tggggttatcccagagccatccaagctaccttatataaaagcagcaaatgagaacccccaccatgatataaggaagggccgtgcctcatggaaaagcaacaggtggcctcaagaaaataaagaaacacaaaaagaaatgaagaacaagaatagaaactgggagaagcacaggaaggctgacagacatcgtgaagtggatgaggattttcccaggggccccaaaacctactcttctcctggcagttttaaaacccagaagccttctaagccctttcaccgttcatcacatggccactcaata

SEQ ID NO: 162800 - DNA, 1138 bp, Homo Sapiens
gttcccggttggtgcttcctgttcgcagctgcggcagtgacttcaaggttactgactttttatgatgtttggtggctatgagactatagaagcatacgaagatgatctttatcgagatgagtcatctagtgaactgagtgttgatagtgaggtggaatttcaactctatagccaaattcattatgcccaagatcttgatgatgtcatcagggaggaagagcatgaagaaaagaactctgggaattcggaatcttcgagtagtaaaccaaatcagaagaagctaatcgtcctttcagatagtgaggtcatccagctgtcagatgggtcagaggtcatcactttgtctgatgaagacagtatttatagatgtaaaggaaagaatgttagagttcaagcacaagaaaatgcccatggtctttcttcttctcttcaatctaatgagctggttgataagaaatgcaagagtgatattgagaagcctaaatctgaagagagatcaggtgtaatccgagaggtcatgattatagaggtcagttcaagtgaagaggaagagagcaccatttcagaaggtgataatgtggaaagctggatgctactgggatgtgaagtagatgataaagatgatgatatccttctcaaccttgtgggatgtgaaaactctgttactgaagggagaagatggtataaaactggtccattcagtgacaaagacattgaggcccagatagctaataaccgaacacctggaagatggacccagcggtactattcagccaacaaaaacattatctgtagaaattgtgacaaacgtggtcatttatcaaaaaactgccccttaccacgaaaagttcgtcgctgcttcctgtgctccaggagaggacatctcctgtattcctgtccagcccccctttgcgaatactgtcctgtgcctaagatgttggaccactcatgtcttttcagacattcctgggataaacagtgtgaccgatgtcatatgctaggccactatacagatgcttgcacagacatcgtgaagtggatgaggattttcccaggggccccaaaacctactcttctcctggcagttttaaaacccagaagccttctaagccctttcaccgttcatcacattaccaca

SEQ ID NO: 162801 - DNA, 489 bp, Homo Sapiens
gtattacctcagttctgctaagttatatctattcaatttgctactaattatgcaaatatgtcaattctcaatcatatactggaatttctctatacgattatgggcttgtctttcgcgccgtgatacgcgactattctttggctgatgttctgtgcattggagaaaccctttctggtgggtggtccacgtttggtcgttaggtgatactgcctccagatttctgtgcaagcatctgtatagtggcctagcatatgacatcggtcacactgtatatcccaggaatgtctgaaaagacatgagtggtccaacatcttaggcacaggacagcattcgcaaaggggggctggacaggaatacaggagatgtcctctcctggagcacaggaagcagcgacgaacttttcgtggtccggggcagtttttagataaatgaccacgttagtcacaatatctacagataatgtacacgtcggctgaaaagtaccgctgg

SEQ ID NO: 162802 - DNA, 723 bp, Homo Sapiens
gagcccgggtacccgacgtacccacctgatcgacaagctagaaaataaattccaagcagaaattgaaaatatggaagcacacaatggcactcccctgactaactactaccagctcagcctggacgttttggccttgtgtctgttcaatgggaactactcaaccgccgaagttgtcaaccacttcactcctgaaaataaaaactattattttggtagccagttctcagtagatactggtgcaatggctgtcctggctctgacctgtgtgaagaagagtctaataaatgggcagatcaaagcagatgaaggcagtttaaagaacatcagtatttatacaaagtcactggtagaaaagattctgtctgagaaaaaagaaaatggtctcattggaaacacatttagcacaggagaagccatgcaggccctctttgtatcatcagactattataatgaaaatgactggaattgccaacaaactctgaatacagtgctcacggaaatttctcaaggagcattcagcaatccaaacgctgcagcccaggtcttacctgccctgatgggaaagaccttcttggatattaacaaagactcttcttgcatctctgcatcaggtaacttcaacatctccgctgatgagcctataactgtgacacctcctgactcacaatcatatatctccgtcaattactctgtgagaatcaatgaacatattcacatttgcgc

SEQ ID NO: 162803 - DNA, 475 bp, Homo Sapiens
gtgaaaagcgagattgtcagatgtaagctcgggagagcttgccttgattatactggctttgggagtatgtcgtaacgctgaggaaaacttaatatatgattaccacctgatcgacaagctagaaaataaattccaagcagaaattgaaaatatggaagcacacaatggcactcccctgactaactactaccagctcagcctggacgtttgggccttgtgtcctgttcaatgggaactactcaaccgccgaagttgtcaaccacttcactcctgaaaataaaaactattatattggtagccagttctcagtagatactggtgcaatggctgtcctggctctgacctgtgtgaagcagagtctcactaaatgggcagatcaaagcagatgaaggcagtttaaagaacatcagtctttatacacagtcactggtagaccagattctgtctgagaaaaacagacaatggtctcattgga

SEQ ID NO: 162804 - DNA, 375 bp, Homo Sapiens
ctgacctagaggatccgctgaccgcttacgcctctataacactcatcacgaagaagtcctcaagatacaataacttgccaatccacgggtcataggtaaaatagtacatggcaaaaccaacaatgctgtgtccttccggagtccagtgctctttcggcacttctgcaaccaggcagtggtaaaaggggtgctctccaaaaccatcttctagcagatctttttcagttaagattacttgttcttccatgtattcatatttagccagctccttgatcagccgcagtatgtcactgcagtcggcggcagtggctgggcggatcacgaatttagccattttcgtcttttgcttttcttcccttaagcgatcagaaatcc

SEQ ID NO: 162805 - DNA, 896 bp, Homo Sapiens
ggggcagctcttagtcgcgggccgactggtgtttatccgtcactcgccgaggttccttgggtcatggtgccagcctgactgagaagaggacgctcccgggagacgaatgaggaaccacctcctcctactgttcaagtacaggggcctggtccgcaaagggaagaaaagcaaaagacgaaaatggctaaattcgtgatccgcccagccactgccgccgactgcagtgacatactgcggctgatcaaggagctggctaaatatgaatacatggaagaacaagtaatcttaactgaaaaagatctgctagaagatggttttggagagcaccccttttaccactgcctggttgcagaagtgccgaaagagcactggactccggaaggttacagtctctagcttcgccatgtacatggcccttccgtgtacatggatgggcggggaggtaactaaaagatcctttacacaataaagtagatgatcatgataaatgaggacacagcattgttggttttgccatgtactattttacctatgacccgtggattggcaagttattgtatcttgaggacttcttcgtgatgagtgattatagaggctttggcataggatcagaaattctgaagaatctaagccaggttgcaatgaggtgtcgctgcagcaacatgcacttcttggtagcagaatggaatgaaccatccatcaacttctataaaagaagaggtgcttctgatctgtccagtgaagagggttggagactgtttcaagatcgacaaggtagtacttgcttaaaatggcaacaggaggaggaggaggaggacatccaaggctccgaaatatactttaaagatgaaagggatttcgaaacgttagtcaggtcattaggaggaggaggagag

SEQ ID NO: 162806 - DNA, 1101 bp, Homo Sapiens
ggaagaatgtggagaaagctgagtgtcaaagtcagtattcaggaccgcctttactgctacttagagatgaatgaagaaatcagagggaacgcagtgtgctgatgctaaagcggctgtcaccacccagctgtgtgacataggacatcttctttctctgtctcacttgaataatatgatgtgtcagaggagacatgattgtaattgcctaaagcaattcttgtgatcaagaatcagaagcatgaacagtattgccctctgtgttagcccctttataagggaggaagtcatcttcagcatgctgaattgtcatctttcttagcagtgcaaatgactaaaacttagccaatgtagagtttgtccaaatttggagctcataactcagttcttgagcaaagtgaaaagaaaacattgtgattatggggaaaatatttgtacgggacttatcaaataaagataggaaaagaagaaaactcaaatattataggcagaaatgctaaaggttttaaaatatgtcaggattggaagaaggcatggataaagaacaaagttcagttaggaaagagaaacacagaaggaagagacacaataaaagtcattatgtattctgtgagaagtcagacagtaagatttgtgggaaatgggttggtttgttgtatggtatgtattttagcaataatctttatggcagagaaagctaaaatcctttagcttgcgtgaatgatcacttgctgattcctcaaggtacgcactgatgaaggagggtttagaggagacacagacacaattgaacctgacctagatagaaagccttagtatactcagctaggaatagtgattccgagggcacactgtgacatgattatgtcataacatggatggtgagtgatggggatgatagaaggaagaacttatggcatatgtgcacccccacaaaagtcagtgaaatattgggacactgaccatccaggtcaagaaaagtcacatgccatagccatggtattgcacatcagtcatcttgcagactttgagaataagaagatcagtaaatagttcagaagtgggtagcattggtccaggcctgtgtgtgaacgcaatgttttg

SEQ ID NO: 162807 - DNA, 506 bp, Homo Sapiens
cctcagtagtttgaacacttgctggctattttttctgtccaagttctcagtaacttcggcctgtgtagtcagtggttctacacagccgacactacttcttacataacacttggtctctctggcttctggaaagggcgaggggttaccttccggagtccagtgctctttcggcacttctgcaaccaggcagtggtaaaaggggtgctctccaaaaccatcttctagcagatctttttcagttaagattacttgttcttccatgtattcatatttagccagctccttgatcagccgcagtatgtcactgcagtcggcggcagtggctgggcggatcacgaatttagccattttcgtcttttgcttttcttccctttgcggaccaggcccctgtacttgaacagtaggaggaggtggtccccattcgtctcccgggagcgacctcttctcagtcaagcatgcaccatgaccaaggaacacggcgagtgacggataaacacagtcggccc

SEQ ID NO: 162808 - DNA, 761 bp, Homo Sapiens
  misc_feature (703)..(703): n is a, c, g, or t
gggatgcgcagctcttagtcgcgggccgactggtgtttatccgtcactcgccgaggttccttgggtcatggtgccagcctgactgagaagaggacgctcccgggagacgaatgaggaaccacctcctcctactgttcaagtacaggggcctggtccgcaaagggaagaaaagcaaaagacgaaaatggctaaattcgtgatccgcccagccactgccgccgactgcagtgacatactgcggctgatcaaggagctggctaaatatgaatacatggaagaacaagtaatcttaactgaaaaagatctgctagaagatggttttggagagcaccccttttaccactgcctggttgcagaagtgccgaaagagcactggactccggaaggacacagcattgttggttttgccatgtactattttacctatgaccccgtggattggcaagttattgtatcttgaagacttcttcgtgatgagtgattatagaggctttggcataggatcagaaattcttgaagaatctaaacccagttgcaatgaggtgtcgctgcagcagcatgcacttcttggtagcagaatggaatgaaccatccatccaactcctataaaagaagaggtgccttctgatctgtcccagggaagagggttgggagactggttcaagatcgacacaggaagtacttgcctaaaaaatggcaaccnaaggaaatgaaggaatgccttcctggtaaatatgaccaccctcccatttcctattttt

SEQ ID NO: 162809 - DNA, 783 bp, Homo Sapiens
ggggcgcagctcttagtcgcgggccgactggtgtttatccgtcactcgccgaggttccttgggtcatggtgccagcctgactgagaagaggacgctcccgggagacgaatgaggaaccacctcctcctactgttcaagtacaggggcctggtccgcaaagggaagaaaagcaaaagacgaaaatggctaaattcgtgatccgcccagccactgccgccgactgcagtgacatactgcggctgatcaaggagctggctaaatatgaatacatggaagaacaagtaatcttaactgaaaaagatctgctagaagatggttttggagagcaccccttttaccactgcctggttgcagaagtgccgaaagagcactggactccggaaggacacagcattgttggttttgccatgtactattttacctatgacccgtggattggcaagttattgtatcttgaggacttcttcgtgatgagtgattatagaggctttggcataggatcagaaattctgaagaatctaagccaggttgcaatgaggtgtcgctgcagcagcatgcacttcttggtagcagaatggaatgaaccatccatcaacttctataaaagaagaggtgcttctgatctgtccagtgaagagggttggagactgttcaagatcgacaaggagtaccttgctaaaaatggcaacagaggagtgaggagtgctgctgtaatgaaacctcaattctattttagaataattccccttctctggcttctatgctgttgggtggatatagaag

SEQ ID NO: 162810 - DNA, 1068 bp, Homo Sapiens
ggggcgcagctcttagtcgcgggccgactggtgtttatccgtcactcgccgaggttccttgggtcatggtgccagcctgactgagaagaggacgctcccgggagacgaatgaggaaccacctcctcctactgttcaagtacaggggcctggtccgcaaagggaagaaaagcaaaagacgaaaatggctaaattcgtgatccgcccagccactgccgccgactgcagtgacatactgcggctgatcaaggagctggctaaatatgaatacatggaagaacaagtaatcttaactgaaaaagatctgctagaagatggttttggagagcaccccttttaccactgcctggttgcagaagtgccgaaagagcactggactccggaaggacacagcattgttggttttgccatgtactattttacctatgacccgtggattggcaagttattgtatcttgaggacttcttcgtgatgagtgattatagaggctttggcataggatcagaaattctgaagaatctaagccaggttgcaatgaggtgtcgctgcagcagcatgcacttcttggtagcagaatggaatgaaccatccatcaacttctataaaagaagaggtgcttctgatctgtccagtgaagagggttggagactgttcaagatcgacaaggagtacttgctaaaaatggcaacagaggagtgaggagtgctgctgtagatgacaacctccattctattttagaataaattcccaacttctcttgctttctatgctgtttgtagtgaaataatagaatgagcacccattccaaagctttattaccagtggcgttgttgcatgtttgaaatgaggtctgtttaaagtggcaatctcagatgcagtttggagagtcagatctttctccttgaatatctttcgataaacaacaaggtggtgtgatcttaatatatttgaaaaaaacttcattctcgtgagtcatttaaatgtgtacaatgtacacactggtacttagagtttctgtttgattcttttttaataaactactctttgatttaaaaaagcaaacaaaaga

SEQ ID NO: 162811 - DNA, 940 bp, Homo Sapiens
aagaaccccggggaacttgcccagcacaaggaagaccccaggactgatgtcaaggcatacgatgtgacacggatggtgtccatgccccagacgacagcaggcaccatcctggacggagtgaacgtcggccgtggctatggcctggtggaaggacacgacaggaggcagtttgagatcaccagcgtttccgtggatgtctggcacatcctggaattcgactatagcaggctccccaaacaaagcatcgggcagttccatgagggggatgcctatgtggtcaagtggaagttcatggtgagcacggcagtgggaagtcgccagaagggagagcactcggtgagggcagccggcaaagagaagtgcgtctacttcttctggcaaggccggcactccaccgtgagtgagaagggcacgtcggcgctgatgacggtggagctggacgaggaaaggggggcccaggtccaggttctccagggaaaggagcccccctgtttcctgcagtgtttccagggggggatggtggtgcactcggggaggcgggaagaggaagaagaaaatgtgcaaagtgagtggcggctgtactgcgtgcgtggagaggtgcccgtggaagggaatttgctggaagtggcctgtcactgtagcagcctgaggtccagaacttccatggtggtgcttaacgtccacaaggccctcatctacctgtggcacggatgcaaagcccaggcccacacgaacgaagtcggaaggaccgcctgcgaacaagatcaagggaacaatgtcccctgcgaagcagggactggcttagtaagaagccaaagtcacaattaccccaattgtggatttaaaggttcccaaacccccctccgggatttcttggggatgcccttttagggcaaagggaaagaaaccaggggaaaagccctctacgaacttggccttg

SEQ ID NO: 162812 - DNA, 630 bp, Homo Sapiens
gggccgacattacactcatctgctgtagtaacgctggaagcaaggaaggattctgctgaataatttgtctcatctgttgaaactgaggctgattccgtaaaaattcaaggggatgtcctccagaacttgttgttgtagttgttgctgtcgtagttgctgcagctgcagccactgctgaagactgaggagccccagtactagctgcttgaggggggtcaaccacagcctgactttctctatctccagggattcccattaaaagatactccactgctctgtcagggttgttgaaactggctctcagggctgcaattacttgctctcgttcatagcccattgacatgatctcagttaccatattctcgtaagactgacccgtcacaagtgcactcgttgcatcttcaaaaaggtttgaccgagaagaatcacccgatgtactgtcagttgctgttgggctagtagccactggtgtctctgctggcttttctgcaggcttctcttgtttagctgcactagcaggtgcaggttcagaagatgctctcgctgatgctggagtgatggatgcaggtgtggaagtggggccaaggcagggacagggcttggagcatgagccgcgagatgagctgtgtg

SEQ ID NO: 162813 - DNA, 1152 bp, Homo Sapiens
  misc_feature (1120)..(1120): n is a, c, g, or t
  misc_feature (1131)..(1131): n is a, c, g, or t
  misc_feature (1141)..(1141): n is a, c, g, or t
tacacagaagtccttcgatttgaagagactcaccgcactgtgttaaaacagatcctacggcagtccacgacccaccgtgctgatgggccttttgctgtcctggtagactacattcgtgtcctcgactttgatgtcaagcgcaaatatttccgccaagagctggagcgtttagatgaggggctccggaaagaagacatggctgtgcatgtccgtcgtgaccatgtgtttgaagactcctatcgtgagctgcatcgcaaatcccccgaagaaatgaagaatcgattgtatatagtatttgaaggagaagaagggcaggatgctggcgggctcctgcgggagtggtatatgatcatctctcgagagatgtttaaccctatgtatgccttgttccgtacctcacctggtgatcgagtcacctacaccatcaatccatcttcccactgcaaccccaaccacctcagctacttcaagttggtcggacgcattgtggccaaagctgtatatgacaaccgtcttctggagtgctactttactcgatccttttacaaacacatcttgggcaagtcagtcagatatacagatatggagagtgaagattaccacttctaccaaggtctggtttatctgctggaaaatgatgtctccacactaggctatgacctcaccttcagcactgaggtccaagagtttggagttcgtgaagttcgtgacctcaaacccaatggggccaacatcttggtaacagaggagaataagaaggagtatgtacacctggtatgccagatgagaatgacaggagccatccgcaagcagttggcggctttcttagaaggcttctatgagatcattccaaagcgcctcatttccatcttcactgagcaggagttagagctgcttatatcaggactgcccaccattgacatcgatgatctgaaatccaacactgaataccacaagtaccagtccaactctattcagatccagtggttctgggagagcattgcgtttctttcgatcaaggctgaccgtgccaagttcctccagtttgtcacggggtacttccaaggtacccctggcaaggctttgctggccctcgaagggcatgaatgggcatttcagnagtttcagttnccttcggggntgacaggttcc

SEQ ID NO: 162814 - DNA, 495 bp, Homo Sapiens
  misc_feature (297)..(297): n is a, c, g, or t
  misc_feature (394)..(394): n is a, c, g, or t
  misc_feature (435)..(435): n is a, c, g, or t
  misc_feature (456)..(456): n is a, c, g, or t
caatggggccaacatcttggtaacagaggagaataagaaggagtatgtacacctggtatgccagatgagaatgacaggagccatccgcaagcagttggcgcgcctttcttacgaaggcttctatgagatcattccaaagcgcctcatttccatcttcacctgagccaggagttagacgactgcttatatctaggactgcccaccacttgacatcgatgatctgaaatccaacaactgaataccacaagtaccagtccaactctattcagatccagtggttctggagagcattgcgtntctttcgatcaagctgaccgtgccaagttcctccagtttgtcacgggtacttccaaggtacccctggcaaggctttgctggccctcgaagggcatgnatgggcatttcaggaagttttcaggttccatcggaggatgnacaggttccacaggttcggcntgccttcagttcacactgtttttattcggtgggttttgc

SEQ ID NO: 162815 - DNA, 845 bp, Homo Sapiens
  misc_feature (816)..(816): n is a, c, g, or t
ggctggtatgccagatgagaatgacaggagccatccgcaagcagttggcggctttcttagaaggcttctatgagatcattccaaagcgcctcatttccatcttcactgagcaggagttagagctgcttatatcaggactgcccaccattgacatcgatgatctgaaatccaacactgaataccacaagtaccagtccaactctattcagatccagtggttctggagagcattgcgttctttcgatcaagctgaccgtgccaagttcctccagtttgtcacgggtacttccaaggtacccctgcaaggctttgctgccctcgaaggcatgaatggcattcagaagtttcagatccatcgagatgacaggtccacagatcgcctgccttcagctcacacatgttttaatcagctggatctgcctgcctatgagagctttgagaagctccgccacatgctactgttggctatccaggagtgctctgaaggctttgggctggcctaataaggccctgcccaactccgtggggttttttttaccattgttggacctggggaggggggagttaaaaaaagaaccagaaagaaattgtcaaaaaccaataaatgaaatccaccaactcaccgtgtgtgtcccagctgccccatcttccccagcgcatacctgttcctcttctcattctctccccgccgcctgtttcctcaccttctctcccctttccatgccgtccatgatccccaccccatgtgttttaaaaagggcagttaggctttggcaggggacctgtctgttcccaattgttttgaacagtgtggtnctcagattctgtgttcagaagggtttttt

SEQ ID NO: 162816 - DNA, 598 bp, Homo Sapiens
tctacactcatctgctggccaaaggttctgaaactctcacaacgggtacccaactcaaggaaaactcactcaccctaaagatattcctgctaacctcacaattcctgggttccctctcatctagccagaacaaactgccttgtgtcttctccccacccacatctaccttcatggcaaacaagccaacaaaacacacaagcccccccgcaaatccctaaccccgtaagtaggttaatagcaaaacaaaatataagtacattctcatcattagattggttgttgctgtccttgcacaactggttaaggaaaaatgaattattccgtaatttctgaagaatccaaatcctgtctcttataaagtcagaacagaagggggcaaaaggtggtggtgagcatcaagagagaaaaaaggagaaaattatttacagaaaataggagacaggagggagtgtccgcaagaaaaggcatttttaaatcccagacagtggatatgacccacactgccagaagagaattcagtattttttacttttcacactgtcttcccgatgagggaaggagcccagccagaaagccctaacatcatggtcaagttccc

SEQ ID NO: 162817 - DNA, 1053 bp, Homo Sapiens
ccacgcgtacgcccacgcgtccgggaaaagggaggcagaggaggcggaggcagaggcagaggcagagcccggtgccgagaccaagcgacagaccggcggggctgggcctcgcaaagccggctcggcgagctctcccgacacccgagccggggaggaaaagcagcgactcctcgctcgcatccccgggagccgcactccagactggcccggtagtcaggggctcaggagcagatcccgaggcaggctttgctcagcctccgacgagggctggcccttgggaaggcgccttcaacagccggaccagacaggccaccatgaccgagaattccacgtccgcccctgcggccaagcccaagcgggccaaggcctccaagaagtccacagaccaccccaagtattcagacatgatcgtggctgccatccaggccgagaagaaccgcgcttggctcctcgcgccagtccattcagaagtatatcaagagccactaccaaggtgggtgagaacgctgactcgcagatcaagttgtccatcaagcgcctggtcaccaagcggtgtcctcaagcagaccaaaggggtgggggcctcggggtccttccggctagccaagagcgacgaacccaagaagtcagtggccttcaagaagaccaagaaggaaatcaagaaggtagccacgccaaagaaggcatccaagcccaagaaggctgcctccaaagccccaaccaagaaacccaaagccaccccggtcaagaaggccaagaagaagctggctgccacgcccaagaaagccaaaaaacccaagactgtcaaagccaagccggtcaaggcatccaagcccaaaaaggccaaaccagtgaaacccaaagcaaagtccagtgccaagagggccggcaagaagaagtgacaatgaagtcttttctggcggacactccctcctgtctcctattttctgtaaataattttctccttttttctctctggctgcatcacgcctcactgcattcaactcgagcctcttgacaagtgctcttggctccttgagacattccagaaca

SEQ ID NO: 162818 - DNA, 742 bp, Homo Sapiens
  misc_feature (664)..(664): n is a, c, g, or t
  misc_feature (675)..(675): n is a, c, g, or t
cggaccacctcgccttacacatgaagaggcatttgtaaatcccagacagtggatatgacccacactgccagaagagaattcagtattttttacttttcacactgtcttcccgatgagggaaggagcccagccagaaagcactacaatcatggtcaagttcccaactgagtcatcttgtgagtggataatcaggaaaaatgaggaatccaaaagacaaaaatcaaagaacagatggggtctgtgactggatcttctatcattccaattctaaatccgacttgaatattcctggacttacaaaatgccaagggggtgactggaagttgtggatatcagggtataaattatatccgtgagttgggggagggaagaccagaattcccttgaattgtgtattgatgcaatataagcataaaagatcaccttgtattctctttaccttcttaaaagccattattatgatgttagaagaagaggaagaaattcaggtacagaaaacatgtttaaatagcctaaatgatggtgcttggtgagtcttggttctaaaggtaccaaacaaggaagccaaagttttcaaactgctgcatactttgacaaggaaaatctatatttgtcttccgatccaacatttatgacctaagtcaggtaatataccggggtttanttctttaggcntttttatggcagacagtctgttatggcacgtgggtttcagatgtggcattatttgtacatggggttt

SEQ ID NO: 162819 - DNA, 631 bp, Homo Sapiens
  misc_feature (45)..(45): n is a, c, g, or t
  misc_feature (117)..(117): n is a, c, g, or t
  misc_feature (137)..(137): n is a, c, g, or t
  misc_feature (171)..(171): n is a, c, g, or t
  misc_feature (173)..(173): n is a, c, g, or t
  misc_feature (178)..(178): n is a, c, g, or t
  misc_feature (186)..(186): n is a, c, g, or t
  misc_feature (199)..(199): n is a, c, g, or t
  misc_feature (215)..(215): n is a, c, g, or t
  misc_feature (218)..(218): n is a, c, g, or t
  misc_feature (226)..(226): n is a, c, g, or t
ctacaaacccaaggggtgactgaagtgtgatatcaggtaaaatanaccggagttggggaggaagccagatcccctgaattgtgattgatgcaatataagctaaaagtcccctgtatnccccttaccctccaaaagcnttattatgatggttagaagaagaggaagaaattncnggtancagaaaanctgtttaaatagncctaaatggatggtgnctnggtgagtnctgggtcctaaaggtacccaaacaaggaagcccaaagttttcaaactgcctgcatactttgacaaggaaaatcctatatttgtcctccgatcaacatttatgaccctaagtcaggtaatatacctggtttacttctttagcatttttatgcagacagtctgttatgcactgtggtttcagatgtgcaataatttgtacaatggtttattcccaagtatgccttaagcagaacaaatgtgtttttctatatagttccttgccttaataaatatgtaatataaatttaagcaaacgtctattttgtatatttgtaaactacaaagtaaaatgaacattttgtggagtttgtattttgcatactcaaggtgagaattaagttttaaataaacctataatattttatct

SEQ ID NO: 162820 - DNA, 264 bp, Homo Sapiens
ctgatcagcttaagataaccatgcacactactataaccaccctaaacctgacttccctaattccccccatccttaccaccctcgttaaccctaacaaaaaaactcatacccccattatgtaaaatccattgtcgcatccacctttattatcagtctcttccccacaacaatattcatgtgcctagaccaagaagttattatctcgaactgacactgagccacaacccaataccccaggctccttaagcgatcagctaatcctgg

SEQ ID NO: 162821 - DNA, 602 bp, Homo Sapiens
tttctgatgtagtcttgatgaaagtccatcaaggacatctacattgcaagagacaattaagagcccattctgtatggacttccccattagagtattgtttctaattacagcatcattgcacacacagacccgcctcaacaattctgctaacagctgggttatagaatccatgaacaacatcaccatcaacaatcacttccccaaattgattatagccaactccagtaacctcagcatgcagaccatctgaagtaaatatgtgagtaacagtcatttcattcttcgtcagtgttccagttttatctgaacaaatcacattacagcagcccagagtttcaacaataggcagctttttcacaatggcccttttcttcaccattctcataacaccaagagctagcgtcactgtgaccacaatggggagaccttcaggaattgctgctacagccaaacttacactaatagtaaacatttccaggatatcttttcccagtaaccagccaaacaacatgatgattcctattataccaaaggagtaaaaggaaagttgttttcctaagaggtccatgctcttctgcagaggggtttttggtgcctcttct

SEQ ID NO: 162822 - DNA, 403 bp, Homo Sapiens
gcttgcgcactgctcacctctgattacttctatgccttcctgcggcgggagtactacctcacacatggcctctacttgaccgccaaggatggcacagaggccatgctcgtgctcaagtaggcctggctggcacagggctgcatggacctcagggggctgtggggccagaagctgggccaagccctccagccagagttgccagcaggcgagtgcttgggcagaagaggttcgagtccagggtcacaagtctctggtaccaaaagggacccatggctgactgacagcaaggcctatggggaagaactgggagctccccaacttggacccccaccttgtggctctgcacaccaaggagccccctcccagacaggaaggagaagaggcaggtgagcagtcgcgcaaa

SEQ ID NO: 162823 - DNA, 1536 bp, Homo Sapiens
tctgctcgtccgtaatatcattaggaggtgacataggggtaaggtatgggagaggtaggtggatccagggaaaagcagtggggacggaaggcaaagagaccactcaacccccacctggaaggggcaaagaaaagccagagttccatgtttgtactcctgtgctggactgtttcctgagtaccagcaggtccctttttgtctctcatgggcctagcataggtatgagccagggatcctttcctggtccctaagatcaaaccccatggagcagccagcgttagatgcccccacccacctgtactctggagagactgtgctgggaacatgtaccactgagcctgagatggggatgagggcagagagaggggagccccctcttccactcagttgttcctactcagactgttgcactctaaacctagggaggttgaagaatgagacccttaggttttaacacgaatcctgacaccaccatctatagggtcccaacttggttattgtaggcaaccttccctctctccttggtgaagaacatcccaagccagaaagaagttaactacagtgttttcctttgcaccgatccccaccccaattcaatcccggaagggacttacttaggaaacccttctttactagatatcctggccccctgggcttgtgaacacctcctagccacatcactacagtacagtgagtgaccccagcctcctgcctaccccaagatgcccctccccaccctgaccgtgctaactgtgtgtacatatatattctacatatatgtatattaaaactgcactgccatgtctgcccttttttgtggtgtctagcattaacttattgtctaggccagagcgggggtgggaggggaatgccacagtgaagggagtggcagaatcaaattgctacatagtccaaacaaaaaagaaggctttttcaaaaaacattaaattcacatgcagtctcagagactatttagacaaagttcaagttaggagcttttaggatgtgggagtaaaactttaatgggaggggagggctggctgctggaagaaggaagaagccagactggttagacagtactcttaactcctagcccagcctagcgtgccctgcccctctggccactgctgcagacacctgccttaacacacacacctctaggactccacagttttgccttaaaggaccttcccaagtctccctttccctgtctggcttctcccttaagaagagagagatacttgtagaattgggtggggggaatgagcatgaactgtccttccatttgggatatgttacattagagtgagagagagaataaggagcctttcttatggaagaaatgggagaagagagacagggttcttttcagcagagtctagtagtttctctgtaaggcaaaataatctaaaaagactaacctgcccacccactccttatattgctgtgagattgcccctatcttgtgctcttctgtctgcagtgtgcacggccttgttctaacccggaataaaggtgattgattgtattgcaact

SEQ ID NO: 162824 - DNA, 671 bp, Homo Sapiens
  misc_feature (311)..(311): n is a, c, g, or t
  misc_feature (443)..(443): n is a, c, g, or t
  misc_feature (660)..(660): n is a, c, g, or t
gctcggtaacctggcaaggtggaaatcaggacattcctcctacttccctgtcctccactccccccatatctttaaagtgtggaagcagaaaggacctgcattttcctacattgaggaactgacataggggtaaggtatgggagaggtaggtggatccagggaaaagcagtggggacggaaggcaaagagaccactcaacccccacctggaaggggcaaagaaaagccagagttccatgtttgtactcctgtgctggactgtttctctgagtaccagccaggtcccttgtttgtctctctatgggcctagcnataggtatgagctcagggatcctttctctggtccctatagatcataaccccatggagcagcccagcgtctagatgccccctacccacactgtacttctggaagagaactgtgcatgggaacaatgtaccacntgagctctgagatggggatgagggcagagagaggggagccccctcttccactcagttgttcctactcagactgttgcactctaaacctagggaggttgaagaatgagacccttaggtttaaacacgaatcctgacaccaccatctatagggtcccaacttggttattgtaggcaaccttccctcatccgcttatccatggggtaccgagcggtttcnaaacggttcaa

SEQ ID NO: 162825 - DNA, 1360 bp, Homo Sapiens
  misc_feature (649)..(649): n is a, c, g, or t
  misc_feature (1283)..(1283): n is a, c, g, or t
  misc_feature (1329)..(1329): n is a, c, g, or t
aggacactactgtctgtgtcctagcactccctacaaccacaggctcagcccacgcactcacagctgtttgtaaccatatctcctcggtacgtgctgtggctgtgtggggcattggcaccccaggtggccctcaggatcctcagccaggcctgactgcccatgtggtgtctgcgggggggcgggctgagatgcactgcttcagcatcatggttactccggaccccagcaccccaagccgcctcgcctgccatgtcatgcacctttcgtcccaccggctagatgagtattgggaccggcaacgcaatcggcatcggatggttaaggtagacccagagaccaggtacatgtcccttgctgtgtgtgaacttgaccagcccggccttggcccccttgtggctgcagcctgtagtgatggggccgtaaggctctttcttttgcaggattctgggcggattctgcagctccttgctgaaaccttccaccataagcgatgtgtcctcaaggtccactcctttacacacgaggcacccaaccagaggcggaggctcctcctgtgcagcgcagctactgatggcagcctggctttctgggatctcaccaccatgctagaccatgactccactgtcctggagcctccagtggatcctgngcttccctaccggcttggcaccccctccctgactctccaggcccacagctgtggtatcaacagcctgcacaccttgcccacccgtgagggccaccatctcgtggccagtggcagtgaagatggatccctccatgtcttcgtgcttgctgtggagatgctacagctagaagaggctgtgggagaggctgggctggtaccccagctgcgtgtgctagaggaatactctgtcccctgtgcacatgctgcccatgtgacaggccccaagatcctaagcccaagcatcatggtctcagcctccattgatcaacggctgaccttctggcgtctggggcatggtgaacccaccttcatgaatagcactgtgttccatgtgcctgatgtggctgacatggactgctggcctgtgagccctgagtttggccaccgttgtgcccttgggggtcaggggcttgaggtttacaactggtatgactgaggtatcctgcggtggctggcgtgctgggcatggggcctgctcacagacagcatggagcagggaagggctgtctgtgcccatgctcagcatgccttgaggggaggaggtggtggccgtgggttcctgatgtcggtgcaggagctgaaggtgagtggagtnctgccaagaatatgcccgactccccatgacaagacagaactttgtnaacaaacagttaccaatttattttgggccgt

SEQ ID NO: 162826 - DNA, 685 bp, Homo Sapiens
ttacagatacgactcgagttggtacccatgcagcttggtctttccgggctcgcttcccccagcccctgcgcccggcccgaacgagaggttccggagccccggcgcgggcgggttctggggtgtagacgctgctggccagcccgccccagccgaggttctcggcaccgccttgagagcttcagctgccccagggtgtgcaggtttgctttagagggtcggcgggcggagcttcggggaagaggagctctgggagagtcattccggccagtggccggagaccgtcgtcgctcttgggaatccttggccgcccagacagaagggaagtaggcgccggagagcccgttctgcattttgattcatctcgggccctgtaagggtcatatcttgtgaaaataacctgtaaaatcaatttaacgttcagtgcagcgtgtaaagacagctctaagaatttaaaagacgcctgagtcagaacatttaaatgcttgggtccctgtagcagcgttttaacacgtctgagtgcagagggtggagaatcgagcctgattgccgttcacgccctgtaacctttaagaagggtaaagaaaggcaccctaaaaaacgcaaggggacacttaccctagggggggacgaacagctagctttttggaatttgggttgtcttcattttagctgcggcctggggatc

SEQ ID NO: 162827 - DNA, 754 bp, Homo Sapiens
gcttcccccagcccctgcgcccggcccgaacgagaggttccggagccccggcgcgggcgggttctggggtgtagacgctgctggccagccctccccagccgaggttctcggcaccgccttgagagcttcagctgccccagggtgtgcagattagaatcccaagaaaatcaaatggcatccggggatttctgctcacctggagaagggatggaaatacttcaacaagtgtgcagcaaacaacttcctccttgtaacctgagtaaagaggacctgttacagaacccatacttcagcaagcttctcctgaatctctcacagcatgtggatgagagtggcttaagcctcaccctagcaaaggagcaggctcaggcatggaaggaagttcgactgcataagacaacatggttgaggtctgagattttacacagagtcattcaagagttgcttgtggactactatgtgaagatacaagacacaaatgtaacttctgaggacaaaaagtttcatgagacccttgaacagcggctgctttgtaactgaactgatgcggctcttaggtcctagccaggagagggagatacctccactgcttggggctggagaaagcggaccttctggaactcatgccactctcagaggattcgtgtggactgagggctcggctacagcaagaagtagaggagcagctccaaagaatgtttcactctgctctgctactatgatcccattcagatgctgacagtgaaacgtgagg

SEQ ID NO: 162828 - DNA, 319 bp, Homo Sapiens
ctcgaggatctcattcactcaacctgctgcacaacaccgtggactggggtacaggagttgttgcatattccatgaggctggtgtcgggaagcagggactcacagttgccaggttgtccacctctgagccaatttccctccacaacccaggggtttcagtctcatatcaactatcatgtttgaaacagaaaacaggcaaaatgtttggctaaaataaaatgaaaacactgcagggaagagaactgagtgtgctggtggacaggagccctgctcacctgtgggaaagggcagggccagcaagggcagcagagctccctggg

SEQ ID NO: 162829 - DNA, 1010 bp, Homo Sapiens
gagcgaggcctgggtggcgaattcggcacgaggacgatgggaagaggggaaagcccaggggtacaggaggcctctgggtgaaggcagaggctaacatggggttcggagcgaccttggccgttggcctgaccatctttgtgctgtctgtcgtcactatcatcatctgcttcacctgctcctgctgctgcctttacaagacgtgccgccgaccacgtcgtaagcgtgcccaccctgccccactgtgaccccctggggtgcggttgtcaccaccaccacatccaccactgtggtgcatgccccttatcctcagcctccaagtgtgccgcccagctaccctggaccaagctaccagggctaccacaccatgccgcctcagccagggatgccagcagcaccctacccaatgcagtacccaccaccttacccagcccagcccaatgggcccaccggcataccacgagaccctggctggaggagcagccgcgccctaccccgccagcccagcctcattacaacccggcctacatggatgccccgaaggcggccctctgagcattccatgccctctctggctgccacttggttatgttgtgtgtgtgcgtgagtggtgtgcaggcacggttcctttacgccccatgtgtgctgtgtgtgtccaggcaccggttccttacgcccccatggtgtgctgtgtgtgtccctgccctgtatatgtgggccttcctctgatgctgaacaaggtgggggaaacatcccttgccagagtgggcttgggaaccaaaatttggtttctctttcttcccccggaaaattaatgccttcctaaaaacctccaaggccaaacttcaaaaattggggtttgggtgggggggccacccccggggaaggtgggccccctttaaaaaaggtgggggggctctctttccaggggcgacaatttggggaagttttcttttccccgggtttaccccctagggggggcccacaaaaaggggcccggtttacaaacacaa

SEQ ID NO: 162830 - DNA, 2024 bp, Homo Sapiens
  misc_feature (1192)..(1205): n is a, c, g, or t
  misc_feature (1508)..(1520): n is a, c, g, or t
  misc_feature (1526)..(1526): n is a, c, g, or t
  misc_feature (1555)..(1555): n is a, c, g, or t
  misc_feature (1587)..(1595): n is a, c, g, or t
  misc_feature (1601)..(1601): n is a, c, g, or t
  misc_feature (1613)..(1622): n is a, c, g, or t
  misc_feature (1627)..(1627): n is a, c, g, or t
  misc_feature (1681)..(1681): n is a, c, g, or t
  misc_feature (1740)..(1751): n is a, c, g, or t
  misc_feature (1823)..(1824): n is a, c, g, or t
  misc_feature (1857)..(1865): n is a, c, g, or t
  misc_feature (1899)..(1899): n is a, c, g, or t
  misc_feature (1939)..(1954): n is a, c, g, or t
acaacacaaccaaacaatcctaagtagcgaggcctgggtggcgaattcggcacgagggtcctgcctgtatatgtggcttcctctgatgctgacaaggtggggaacaatccttgccagagtgggctgggaccagactttgttctcttcctcacctgaaattatgcttcctaaaatctcaagccaaactcaaagaatggggtggtggggggcaccctgtgaggtggcccctgagaggtgggggcctctccagggcacatctggagttcttctccagcttaccctagggtgaccaagtagggcctgtcacaccagggtggcgcagctttctgtgtgatgcagatgtgtcctggtttcggcagcgtagccagctgctgcttgaggccatggctcgtccccggagttgggggtacccgttgcagagccagggacatgatgcaggcgaagccttgggatctggccaagttggactttgatcctttgggcagatgtcccattgctccctggagcctgtcatgcctgttggggatcaggcagcctcctgatgccagaacacctcaggcagagccctactcagctgtacctgtctgccttggactgtcccctgtccccgcatctcccctgggaccagctggagggccacatgcacacacagcctagctgcccccagggagctctgctgcccttgctggccctgcccttcccacaggtgagcagggctcctgtccaccagcacactcagttctcttccctgcagtgttttcattttattttagccaaacattttgcctgttttctgtttcaaacatgatagttgatatgagactgaaacccctgggttgtggagggaaattggctcagagatggacaacctggcaactgtgagtccctgcttcccgacaccagcctcatggaatatgcaacaactcctgtaccccagtccacggtgttctggcagcagggacacctgggccaatgggccatctggaccaaaggtggggtgtggggccctggatggcagctctggcccagacatgaatacctcgtgttcctcctccctctattactgtttcaccagagctgtcttagctcaaatctgttgtgtttctgagtctagggtctgtacacttgtttataataaatgcaatcgtttggaaggaccaaagcaacactcgcaccaaccgaaacctagacnnnnnnnnnnnnnnccttgttcggcccgccctccggcccctccaaaaaaactttttccaaagaacacatccagcaatgaggggggcccgggggcccccatctaacgggtaaaagcgggcaaaacatggcgccccaaataaagccgtggtgtttcccccataaggagaaagaactccgccgggtggctcccacgtgtgacaccacacaggtggcgccctctgggaggaaaattattcccgccgcccctcgcccccatctattcttataaagaaaaaaatagaccctcgcccccacccaggggagggagacgggggggnnnnnnnnnnnnncccctnaccaaaaacaaccggcagcgcgaattttnccatccccccatgttgtggagggtggcagaannnnnnnnnatttantcatgaatcttnnnnnnnnnnaacancgaacaaaaaaaatgtggatgggggccaacgaaaaataaattacccccccaccnatttaagaaaaaataaaggggcccggccctcgcacccttgtttttataaaaactattcnnnnnnnnnnnnaggaccaaatccttctcataatataatcttcccccaaaaaccacccctaaagggtgggggggagaaaagtcnnccccccttccccctcccaagccggcgttgcggnnnnnnnnncacccccccctccccgccgcgaacaataattgtnccttcccaccaacaagaaccttttaaatataacgggcggnnnnnnnnnnnnnnnnacttggtgacccctcccttggggttggaccccgcacaagacacttccatccaaaattttagggggcgccc

SEQ ID NO: 162831 - DNA, 921 bp, Homo Sapiens
ccagggctccacattggggggcgtaaaggaaacccgtgccctgggacaccaccacaagcaccacaagggggcgtaaggaaaccggcgccttgcaccaccacttcacgcacacacacaacattaaccaaagtggcagccagagagggccagggaatgctcaggagggccgccttcggggcatccatgtagcccgggttgtaaggaggctggctggcggggtagggcgcggctgctcctccagccaggggtctcgtggtaggccggtgggcccatgggctgggctgggtaaggtggtgggtactgcattgggtagggtgctgctggcatccctggctgaggcggcatggtgtggtagccctggtagcttggtccagggtagctgggcggcacacttggaggctgaggataaggggcatgcaccacagtggtggatgtggtggtggtgacaaccggacgtggtcggcggcacgtcttgtaaaggcagcagcaggagcaggtgaagcagatgatgatagtgacgacagacagcacaaagatggtcaggccaacggccaaggtcgctccgaaccctgacatggggtcgttgtagccagggcgaaacctcagcgccgagcccagctgctccaccggctctacactggcaggcacgctggcctcaggcacagcacacctttcctcgctccacacaaatttcttcagcacgtcagagcagcagtattggtcatcacaggtaccacagcagaaatctggacaggactcggggaagaggctgagtccacgggaagccatacacacctcaccacgtgcacccggaggcggcgttagcagcagcagcaacagcaacggcaacaggatccgcggcgcggggaccggcgcagtcatggctgggcgggcggacgggcggacggacgcgagcgcccc

SEQ ID NO: 162832 - DNA, 884 bp, Homo Sapiens
  misc_feature (733)..(733): n is a, c, g, or t
  misc_feature (852)..(852): n is a, c, g, or t
gcctacatggatgccccgaaggcggccctctgagcattccctggcctctctggctgccacttggttatgttgtgggtgtgcgtgagtcctgggcagacacggttccttacgccccatgtgtgctgtgtgtgtccaggcacggttccttacgccccatgtgtgctgtgtgtgtcctgcctgtatatgtggcttcctctgatgctgacaaggtggggaacaatccttgccagagtgggctgggaccagactttgttctcttcctcacctgaaattatgcttcctaaaatctcaagccaaactcaaagaatggggtggtggggggcaccctgtgaggtggcccctgagaggtgggggcctctccagggcacatctggagttcttctccagcttaccctagggtgaccaagtagggcctgtcacaccagggtggcgcagctttctgtgtgatgcagatgtgtcctggtttcggcagcgtagccagctgctgcttgaggccatggctcgtccccggagttgggggtacccgttgcagagccagggacatgatgcaggcgaagcttgggatctggccaagttggactttgatcctttgggcagatgtcccattgctccctggagcctgtcatgcctgttggggatcaggcagcctcctgatgccagaacacctcaggcagagccctactcagctgtacctgtctgcctggactgtcacctgtccccgcatctcccctgngaccagctggagggccacatgcacacacaagcctagctggcccccagggagctctgcctgccccttgctggcccctgccctttccaacaggtgagccagggcctcctggtctcaccaancacaacttcaggttcttctttcccctggcagc

SEQ ID NO: 162833 - DNA, 1169 bp, Homo Sapiens
  misc_feature (680)..(689): n is a, c, g, or t
cctgggtggcgaatccaaaacgaggggctgacgtcatctggattccattgctttctttttctccaaaggagaggaaattgaaacggagtggcccacgatgggaagaggggaaagcccaggggtacaggaggcctctgggtgaaggcagaggctaacatggggttcggagcgaccttggccgttggcctgaccatctttgtgctgtctgtcgtcactatcatcatctgcttcacctgctcctgctgctgcctttacaagacgtgccgccgaccacgtccggttgtcaccaccaccacatccaccactgtggtgcatgccccttatcctcagcctccaagtgtgccgcccagctaccctggaccaagctaccagggctaccacaccatgccgcctcagccagggatgccagcagcaccctacccaatgcaatacccaccaccttacccagcccagtaccatgggcccaccggcctaccacgagaccctggtctggaagagcagacgcgccctaccccgacagtcagcctccttaaaaacccggcccacatgtaaggcccccgaaagcggagcctactgaaccattccctgggccttctccgggaatggccactttggtttaatgtttttgttgtgccggcttcgcaattgcgtgatgcaatgctcggcggtattccgttaannnnnnnnnnatgttgaccgacctgttagtgggtagaccccagagtcctccggtttgtgttctattaagaccccccaaatggtgcataggcccgggggtcggtgcctcccggtggcccctgagttattttagtttggcgcttttccccctctttgaatcggcctggaacaaagggcgcggtggggaaaccctaatcccctccgggccccaacagacagagagacgtgaggcgacaccaaaaacatttgtgatcaatactttctcgtgccccttgtgaaaatcatggggtctccctataaaagacccctcaagaccgcaaactctctaatataattgcgtgacggcgtgggtgctaggcttcctctctgcgaacaggtagtccctcctgtaaacgtagaggatgggcccttccctcccgagtggcagattctcatgaacattcacctctactcagatctatacccgtagaggggtacaacacaataaccgc

SEQ ID NO: 162834 - DNA, 492 bp, Homo Sapiens
tacatcgagctcggtcccggattacgccacgttcactgtggacaccatcagcgccgggcaaggagacgtgatggtgtttgttgaggacccagaagggaacaaagaggaggcacaagtgacccctgacagtgacaagaacaagacatactctgtggagtatctgcccaaggtcaccgggctacacaaagtcacagtcctctttgcaggacagcacatctccaagagcccatttgaagtgagtgttgacaaggcccagggagatgccagtaaagtcactgcaaaaggtccagggttggaagctgtagggaacatcgccaataagcccacctactttgacatctatacggcaggagctggtgtgggtgacattggtgtggaggtggaagatccccaggggaagaacaccgtggagttgctcgtggaagacaaaggaaaccaggtgtatcgatgtgtgtacaaacccatgcagcctggccctcacgtggcgtctgt

SEQ ID NO: 162835 - DNA, 560 bp, Homo Sapiens
caaatgtgctgggcattacagtgtgtacagccacctgcactcatgccatgcctgctgtttctcaaaaccaagacctgggggaagtggagaaagatggatgttttggaaatgaatgggctcaagaccaacaagagtgattgcaggtctcagatagtgcctctcccaccctagtcccgacctcctgaggaacccttcaggacatggcctgcagagactagggtgagcagggtatggcaccaagcacccattgaccagttggtgccacgcatccagtgactggaaagagacaacgtagactgaactcaccttacaagggatgaacacgggggggtcccttttggtccccttgagtgagaggtatcaggaatccatgatctaagacaataaatatttagcatctgtgtcctttcagagacagggaccagagacaaatctcttcctaaacatgctcctgtggtttcatgattcttaggagtccaccaaacccctccagcaatgtcaactctgcctgggatgaaacccaccaggagccagcagggtgaggcagaggcagaggcaga

SEQ ID NO: 162836 - DNA, 709 bp, Homo Sapiens
ccaagaaaaagaaacatggaatccattgagcaatggggaaagaagagagtggatatcaacaatggccttaggctcctttcatgcacctgtttatttaacaaaacgtttagggcctatcctgcactgggaatcctctagttacgccaggaaaggttgtcaggggagtctgtgatggggaaaagagaggccccattctgggtttggctcttctgagtcatcggctgtggaagtgactgagaagtgagtttctgggtgtttcatccctggggtgagagcaagtccattggattaggagacagcagggacattgtgcctggagatagaggccttgtcatggcaatgacaactgactgctgtcttaattcaaacgagcaagcagttgccatggaaaccatgttacttgtatggtcccggatcccggtgatccgccctcctagatcatatctgacactacgtctcagctgtcagcctccacctctccccagccatccattctagggggactgagaggtggagacaggaagggcagcttgtcctggtgagcagtggcagttgtggggagatgtcttccacatccctgggtttggtgcaggcagatggcaagtcattctgttatgtgaagggcacagccagaggccccatgacaaactcatctatgtgacaaggggatagagaaccagagtgcttctttactctggtcaaaggggga

SEQ ID NO: 162837 - DNA, 784 bp, Homo Sapiens
taatccaatggacttgctctcaccccagggatgaaacacccagaaactcacttctcagtcacttccacagccgatgactcagaagagccaaacccagaatggggcctctcttttccccatcacagactcccctgacaacctttcctgggcgtaactagaggagtcccagtgcaggataggccctaaacgttttgttaaataaacaggtgcatgaaaggagcctaaggccattgttgatatccactctcttctttccacttccttcttcatctttttctccatgttttatgcttctctgattccctcttctgcctgcaccagaccagccccagccctttattcctctccattttcactccttccagcctctgtccctgaactgccactggcaacccatgggacctcaggaccagagactgcttgactcatctggggagggtaagttcacgggggacaaaaaaatgattcctaaagaagaggcttcctagaccagcacaggctccagaaagacatcccctaggcctggacttctgagcagctttagccaggctccggacggcagccagaggaggcctttccccattgctcctttccccattgctcaatggattccatgtttctttttcttggggggagcagggagggagaaaggtagaaaaatggcagccacctttccaagaaaaatataaagggtccaagctgtatagtatttgtcagtatttttttctgtaaaattcaaacacacacaaaagaaaaatttatttaaataaaatactttgaaaat

SEQ ID NO: 162838 - DNA, 441 bp, Homo Sapiens
  misc_feature (17)..(17): n is a, c, g, or t
  misc_feature (29)..(29): n is a, c, g, or t
  misc_feature (112)..(112): n is a, c, g, or t
  misc_feature (369)..(369): n is a, c, g, or t
ccaaccctttatccctntcccattttcantcccttcccaccctctgtccccctgaaactcccactggccaaccccatgggaccctcaggacccagagactgccttgactcantcctggggagggtaagttcacgggggacaaaaaaatgattccctaaagaagaggcttccctagaccagcacaggctcgagaaagacatcccctaggccctggacttctgagcagctttagcccaggctccggacggcagccagaggaggcctttccccattgctcctttccccattgctcaatggattccatgtttctttttcttggggggagcagggagggagaaaggtagaaaaatggcagccacctttccaagnaaaatataaagggtccaagctgtatagtatttgtcagtatttttttctgtaaaattcaaacacacacaaaag

SEQ ID NO: 162839 - DNA, 595 bp, Homo Sapiens
cttgcgcgactgctcacagcccaaacaggggtgcaggggctctggccctgaagaacctgagtggagtggaatggcactggctggccactcagctcagcgggcgacgtgcccctacaagttgcaagaagtggctgccactgctgggtttgtgtaagagaggctgctgccaccattacctgcagaaaccctctcataggggctacgatcggtactgctagggggcacatagcgcccatgggtgtggtaggtggggtactcgctcataggatggtaggtatcccgggctggaaagatgtccagctgcccgtagttctttcggcggcactgacagacagccaaggcaatgagatagacaatggccagcgcaaccagaacacagaccagcaccagcagcgcgatgccccagcctggcaccccagccccagacatttcagaaatgtctctctgcagctcttggtagtagtcggtgctgggatcttccagagaggaattaaactggaggtttgaaatgtgaaaagacaggaaaaagaaagagaccccagtagacaactggggagaagtgctgtgattggaggaggtgagcagtcgcgacacg

SEQ ID NO: 162840 - DNA, 852 bp, Homo Sapiens
  misc_feature (788)..(788): n is a, c, g, or t
ggctattcccaagagtgcaagagagacatttctgaaatgtttttgcagatttataaacaagggggttttctgggcctctccaatattaagttcaggccaggatctgtggtggtacaattgactctggccttccgagaaggtaccatcaatgtccacgacgtggagacacagttcaatcagtataaaacggaagcagcctctcgatataacctgacgatctcagacgtcagcgtgagtgatgtgccatttcctttctctgcccagtctggggctggggtgccaggctggggcatcgcgctgctggtgctggtctgtgttctggttgcgctggccattgtctatctcattgccttggctgtctgtcagtgccgccgaaagaactacgggcagctggacatctttccagcccgggatacctaccatcctatgagcgagtaccccacctaccacacccatgggcgctatgtgccccctagcagtaccgatcgtagcccctatgagaaggtttctgcaggtaatggtggcagcagcctctcttacacaaacccagcagtggcagccacttctgccaacttgtaggggcacgtcgcccgctgagctgagtggccagccagtgccattccactccactcaggttcttcagggccagagcccctgcaccctgtttgggctggtgagctgggagttcaggtgggctgctcacagcctccttcagaggccccaccaatttcttcggacaattcttcagtgtgtgggaagctcatgtggggcccctgagggtttcatgnctggggaagtgtttgtggttgggggttccagggaggattggcccagagagcctgagatagccgt

SEQ ID NO: 162841 - DNA, 598 bp, Homo Sapiens
cgttgcgcactgctcacccctatgttccctatggcactgggggaggaagggctaagaaagtgtcatgccagaagagggcagcagctcaggagaggaaacctcctcagagttcccccagccctaccctcctggcaaaccgtgggcaactcaacttccacggttccctcacgtgggaaggcctcattggagatgatcttcgtgctactgtgtggctctgtcccctctgccatcctcacaccagttgctgagaggggaacgctgaccttgctggtctggccagcagagggagggcattttcaaaggttcaactcgaggtaacaaggacccagactgcggctgtctcctcaacccatggcccggtttctgctggagacatggacaccctgggccgggcagcctggactctggctatgtgtcgcctaccttcgctgcccccatgctggggcatttccaattgtaaaggtaatactgcaggttgccgtcccttatgccaaacttgagcttctccaggaaggttttgttctccatgagatccagtgcattgaacacatcaaaccctttctgcaaagcaggcagggacaaacaagaacagtgatca

SEQ ID NO: 162842 - DNA, 672 bp, Homo Sapiens
  misc_feature (653)..(653): n is a, c, g, or t
cactcacacacggctcaccaccagcaccccctttaataaaacatggggggggtcatgtgacaggaagaagggggtgaaataggaccatttacaaccacagaaaaacctctgtacatgtctagcgcctggcagaggggggcagcagggcagcagcgggctggagccagccctatttgtagaggatatcgtagtgtccaggccggtagagaaggtagaccttgggctcggagccctcagggaagatgtgcggattggtggtgccgccctcgccgcggtccatgtactccacctggatggacacgctgagggcctgggccagcgcaatgatgtggatgtggtcgctctccttgcacatgggctccacctcctgctggcagaactccttgacagtccgtccaccctcgatgaagtgctcgaagaacttgctctcgcgctgcaggtagcccgaggtgagcagccgcaggtagaccacaaggtagtcggaggtgctctggtcattgaaggaggccagcaggtcggcgacagaggtctgcttctccacctgctcaatcaggtccatgaacgtgttgtggaaatcctcacttgtgaattcagtgaagcctgggacaccaggtcttccttgctcttggcagacacagccttgaaccgctgcnactccttgctgtcatccag

SEQ ID NO: 162843 - DNA, 974 bp, Homo Sapiens
ggcctgggtggcgaattcggcacgagggtttaaagatggcggcggaggaacctcagcagcagaagcaggagccgctgggcagcgactccgaaggtgttaactgtctggcctatgatgaagccatcatggctcagcaggaccgaattcagcaagagattgctgtgcagaaccctctggtgtcagagcggctggagctctcggtcctatacaaggagtatgctgaagatgacaacatctatcaacagaagatcaaggacctccacaaaaagtactcgtacatccgcaagaccaggcctgacggcaactgtttctatcgggctttcggattctcccacttggaggcactgctggatgacagcaaggagttgcagcggttcaaggctgtgtctgccaagagcaaggaagacctggtgtcccagggcttcactgaattcacaattgaggatttccacaacacgttcatggacctgattgagcaggtggagaagcagacctctgtcgccgacctgctggcctccttcaatgaccagagcacctccgactaccttgtggtctacctgcggctgctcacctcgggctacctgcagcgcgagagcaagttcttcgagcacttcatcgagggtggacggactgtcaaggagttctgccagcaggaggtggagcccatgtgcaaggagagcgaccacatccacatcattgcgctggcccaggccctcagcgtgtccatccaggtggagtacatggaccgcggcgagggcggcaccaccaatccgcacatcttccctgagggctccgagcccaaggtctaccttctctaccggcctggacactacgatatcctctacaaatagggctggctccagcccgctgctgccctgctgcccccctctgccaaggccctagacatgtacagaaggtttttctgggggttggaaaagggtccaattttcaccccctcctttcctgtcacatga

SEQ ID NO: 162844 - DNA, 797 bp, Homo Sapiens
  misc_feature (732)..(740): n is a, c, g, or t
catttattgagggcctgcccccaaggagctcacagcctgggggctgaagaccccgaatgtgcagggggcggggaagaaaagaggtgaaggcaaagagaggcagacaatgcagaaaccaccgtgaacccaagcaggagggggtgcaaggcaggcacgggcagggggcctgggcggaatggggaggtgagaacccggcagccctgcctagacctgaggactgtagaccccacacgtttgaaggctgccctcccccaccaggatggcactgcccgggcaccctgtgggaggcccagctcctccacctgccctgagccgggtccagcctcacaaaggcccctccacccaggactcccaaccatgcagactcccggtggagggcaggaagctggggtctggggcccagccgggacgtggaggtggggcctatgagggagcagatgaagtgtgggtggccctgggaccctgggcaagtccctaaggaacttccaggatcccatagaagcccctgagccagctaagaagggaaggaagcagaacccaacgaagcaggaggggcctccaagaggcctggcccctcaaacctgctcctgttggggaagctcaggagtagataggtgaaaagcagggggacccacctggggggagggggcagcagacagagcagccaggcgggcagcagagcagggacacgcacacacggctcaccaccagcaccccctttaataaaacatnnnnnnnnntcatgtgacaggaagaagggggtgaaataggaccatttacaaccacagaaaaacctc

SEQ ID NO: 162845 - DNA, 965 bp, Homo Sapiens; identical to SEQ ID NO: 74845

SEQ ID NO: 162846 - DNA, 761 bp, Homo Sapiens
ttcttcctctgcttcactgctagagctatcttctttcaattcagtcttccagttagcaggaatagttctacttttgtgaaattcaagtgcctgttcaaaggcttgctttaaaacagcatcaggctttggtgcagtgtcactagtaatttcatggacatcttttcttggaactgaagtaaattttccatctttgaaagatcgaacaagaatattgtccttttttacagcaatctcatcactacaatcaggacaaaccacacaatgcaggaaaccacagtgctttctttttatccaaactaatgtaatctacacatacaactttgcctagtagctcaccaatctgtttcctatcatcctcatcttcatcactggaggatgatgaagactcttcctctggtatatgattagatcttcttcctctatttgttttctttcctatgactggagtgccaaaatgctcagggttggtgagtgggagctggtctaatgtttcactttcagcaaaatgcctctctcctttcaggcacagtgaagatcgtctcagtgtcttctcatctccgtcatcaaaaactacagtgtaccaactcgcatctgttagtttattgataacagcttcctgatatgcaccatcaagattcttcacttccacaataggctcctacctttagtggggccctttatgtgggtcatcctggaactttccactgttggaagggaatcatgtctaaaatgtcaccttgaatttggacaagtctttttgg

SEQ ID NO: 162847 - DNA, 646 bp, Homo Sapiens
tgtgatcctctggcataaacaccttgcaaagataacccaagagaaatggaagcctcagggatataccaccagatgaactgacggcaaggtggaggttttcgcattcccatggcaggtttccttatcagcccccatctcccaccacatcagaaaaggagtaaatagatctttcctgatttcaggcccagaactaggctcaagaagaaagaagtgtactctcacgactggctaagacttgctggactgacacctatggctggaagatgacttgttttgctccatgtctcctcattcctacacctattttctgctgcaggatgaggctagggttagcattctagacacccagttgagctcaggcgtagagaagaggaggatgggataagaactggggccatccccatgtcatggtgggtgagagctggggccatccccgtggtcatggagggtgagagctgggggttatccccatggtcatggagggtgagggctggtcgggggaggcatccccaagtcatggtgggtgagagctcggagcatccccatgtcatggtgggtgagatctgggggtatcctgtgtcatggtgagcggtcgcgcagcgggtccggctcgaatcgtatctgtcctgtgtcgggcgtggcaaaa

SEQ ID NO: 162848 - DNA, 1261 bp, Homo Sapiens
actagtgtaggccaccctgcgggagctgaagctcaatgccagcctccctgctctgctgctcattcgcctgccctacacagccagctctggtctgatggcacccagggaagtcctcacaggcaacgatgaggtcatcgggcaggtcctgagcacactcaagtccgaagatgtcccatacacagcggccctcacagcggtccgcccttccagggtggcccgtgatgtagccgtggtggccgaagggctaggtcgccagctgctacaaaaacagccagtatcacctgtgatccatcctcctgtgagttacaatgacaccgctccccggatcctgttctgggcccaaaacttctctgtggcgtacaaggaccagtgggaggacctgactcccctcacctttggggtgcaggaactcaacctgactggctccttctggaatgactcctttgccaggctctcactgacctatgaacgactctttggtaccacagtgacattcaagttcattctggccaaccgcctctacccagtgtctgcccggcactggtttaccatggagcgcctcgaagtccacagcaatggctccgtcgcctacttcaatgcttcccaggtcacagggcccagcatctactccttccactgcgagtatgtcagcagcctgagcaagaagggtagtctcctcgtggcccgcacgcagccctctccctggcagatgatgcttcaggacttccagatccaggctttcaacgtaatgggggagcagttctcctacgccagcgactgtgccagcttcttctcccccggcatctggatggggctgctcacctccctgttcatgctcttcatcttcacctatggcctgcacatgatcctcagccctcaagaccatggatcgctttgatgaccacaagggccccactatttctttgacccagattgtgtgaccctgtgccagtgggggggttgagggtgggacggtgtccgtgttgttgctttcccaccctgcagcgcactggactgaagaagcttccctcttcctactgcagaatgaactgcaaagctcccctcagcccatctttggtccctcttcagccccgctgaaggaacttttctttgggcttgccccccattcttcctcccaacaagggtgtaaccttatttccggcggtaaaatggcttagaacccaacccagctttccccaagggggttccgtccccctggggaagggccctaaagggggacgtgtgtaatttttttaggggc

SEQ ID NO: 162849 - DNA, 946 bp, Homo Sapiens
  misc_feature (538)..(538): n is a, c, g, or t
ggaatgactcctttgccaggctctcactgacctatgaacgactctttggtaccacagtgacattcaagttcattctggccaaccgcctctacccagtgtctgcccggcactggtttaccatggagcgcctcgaagtccacagcaatggctccgtcgcctacttcaatgcttcccaggtcacagggcccagcatctactccttccactgcgagtatgtcagcagcctgagcaagaagggtagtctcctcgtggcccgcacgcagccctctccctggcagatgatgcttcaggacttccagatccaggctttcaacgtaatgggggagcagttctcctacgccagcgactgtgccagcttcttctcccccggcatctggatggggctgctcacctccctgttcatgctcttcatcttcacctatggcctgcacatgatcctcagcctcaagaccatggatcgctttgatgaccacaagggccccactatttctttgacccagattgtgtgaccctgtgccagtgggggggttgagggtgngacggtgtccgtgttgttgctttcccaccctgcagcgcactggactgaagagcttccctcttcctactgcagcatgaactgcaagctcccctcagcccatcttgctccctcttcagcccgctgaagagctttcttgggctgccccccatctctcccaacaggtgtacatattctgcgtagatgctagacccaccagcttccccaggttcgtcgctgtgaggcgtaagggacgtgaaattcaggggctccctttccccctatttattcttgggggctacatcattccctgggcgggggaataatggcttttgggtaccaaaagctccccttcctaaaggttataggggctcccctaaaattggggaaaggggggaaaaaccaacttaaactggcctgtccctggcctgg

SEQ ID NO: 162850 - DNA, 981 bp, Homo Sapiens
  misc_feature (139)..(167): n is a, c, g, or t
ggtaccggtccggaatttcgggatatcgtcgacccacgcgtcggattggcggccatggcgacggctcgagtgcggatggggccggcggtgcgcccaggcgctctggcgcatgccgtggctgccggtgtttttgtcgttnnnnnnnnnnnnnnnnnnnnnnnnnnnnnagcagcaggtcccgctggtgctgtggtcgagtgaccgggacttgtgggctcctgcggccgacactcatgaaggccacatcaccagcgacttgcagctctctacctacttagatcccgccctggagctgggtcccaggaatgtgctgctgttcctgcaggacaagctgagcattgaggatttcacagcatatggcggtgtgtttggaaacaagcaggacagcgccttttctaacctagagaatgccctggacctggccccctcctcactggtgcttcctgccgtcgactggtatgcagatcagcactctgaccacttacctgcaggagaagctcggggccagccccttgcatgtggacctggccaccctgcgggagctgaagctcaatgccagcctccctgctctgctgctcattcgcctgcctacacagccagctctggtctgatggcacccaggaagtcctcacaggcaacgatgaggtcatcgggcaggtcctgagcacactcaagtccgaagaatgtccatcacacagcggccctcacagcggtccgccttccagcgtggccggtatggtacccgggatggccggagggtaagttcgccagtgctacaaagcaggcagtttcacctgttattcatccccctgtgagtacaatgacccggtccggatcctgtctgggcccaaattctctgtggggacaaggccctcggaagacgatccctcccttggggtaggaaccactgatgaccttcgaggcctgcgggccagacaaacaccttggccaggctacgcttggccacctcgattccgcgta

SEQ ID NO: 162851 - DNA, 1126 bp, Homo Sapiens
  misc_feature (415)..(415): n is a, c, g, or t
  misc_feature (428)..(443): n is a, c, g, or t
agatgctagaccaaccagcttcccagggttcgtcgctgtgaggcgtaagggacatgaattctagggtctcctttctccttatttattcttgtggctacatcatccctggctgtggatagtgcttttgtgtagcaaatgctccctccttaaggttatagggctccctgagtttgggagtgtggaagtactacttaactgtctgtcctgcttggctgtcgttatcgttttctggtgatgttgtgctaacaataagcagtacacgggtttatttctgtggcctgagaaggaagggacctccacgacaggtgggctgggtgcgatcgccggctgtttggcatgttcccaccgggagtgccgggcaggagcatggggtgcttggttgtttccttcctaataaaataaacgcgggtcgtangaaccaacaaacnnnnnnnnnnnnnnnncctgtcggcccgcctcggcccctcgaaaaacctttctaaacccattcgttttgggcgcgccgcggcccagtaaggtaagttggaacatgggccaataccctgggttccctagggaagattcgtgggtcctatgacctagatgccttgggattcctcaccccatataaaaaaaaccgccccggggggtcaaacccgaagccggttctctgaaaacataatctcccagaaatgggagagattcctctgaagggcccttttcacttgcgcactcctaatccaacccaagggaaagtcccccaaggcgtcgaggcttccgaataaatctaaaaatgtaaccgccgcccccgtgcccctgtgcccacctttatatcccacacgtcacttggttgtgccaaattttccctttacaagactatctccgtgcgccgaacatttgggaaaacccccctttccaacaacccggcccattgcgatggaaacccctcgaaaacccccccgacggcggggcattccaagcgaaccctttgggtcacgcccttcggcagctaaataaaatacattttcggcccccacttggggtggcaaaaaaaccgggcgggccgccaaacacacacaattccgctctccactatattctgggcccaccgcgccttgtaaacaattcgcgaacacctgcgggtggc

SEQ ID NO: 162852 - DNA, 1156 bp, Homo Sapiens
  misc_feature (928)..(936): n is a, c, g, or t
agcttcacccagggttggtacagaggatgctggcccagggagtacatccacagcatcttccaagtttgctccaaactggtgtgcttcctcctgggatggacttgagtcatttacagggaatatctggccccatcctgggtcagcccttttaccctttacctgctgctagtcaccctctcttaaaccctcgtcctggaacacctctgcatctggcaatggtgcaacagcagctacagcgctcagttctgcatcctccaggctctggttcccatgcagcagctgtcagcgttcagacaacccctcagaacgtgcccagccggtcaggcctgccccacatgcactcccagctggagcatcgccccagccagaggagcagctcccctgtgggccttgccaaatgggttggctcagatgtgctacagcaacccctgccctccatgcccgccaaagttatcagtgtagatgaattggaataccgacagtgagcagggcaggcagactcaactaagcccggacctgtggtggcacactgggcaggaccctgcttcatctcgggttggtttatgggcttttactttggagcactctgtgtgaagctgtttggtggaacccatgcatctggtgtggtccgcattatgatggaaggatcttaaccagtcgagtggagtgtacattgtctgaatacaggatgcacaatgttgtcaatcctggaaatggtctttcttttttgtaagatatgtgaatgaagtgttggtgtcctcaccaagaggtggcacctaagggttctgaggaaataaatgtatagacccttatgtacagacctgtgtataaacaacttttgtatatacatataggatagcttttttgaactatacagctgtacataaaagtagctgatattaattaggcctgtgtcaacagtttggannnnnnnnncacttgtacctttggggattttcttttggttgaataaaattgcatatgctaagtgggtgaaatcccctcaccccccccttctaccataataccctgtccgcccgcctccgccccttaaaaaagctttctaaaaccatttcttttgggcgcgcgggccccccataggccaagcggaacatgggcccaaacctgttttcctcaaggaataacccggggcccg

SEQ ID NO: 162853 - DNA, 879 bp, Homo Sapiens
cgttgcggcgctgcgtcacgatgctcgaaagccttcctggagaagtagtgcagtgggtcggagctggaagaactcaatgagatcgtagtttcattccatgaatcgaggaggaggggggaggcacagctaggcccagttgccctgggctgtgggccctgcggaggggaagcccacccactatgcatggacgtattgtgtacctatgtgtatgtcttttgtatcgtggacacggagggggttggtgctggctagaggtccctgcccctgtctggaggcacaacgcccatccttaggccaaacagtacccaaggcctcagcccacaccaagactaatctcagccaaacctgctgctcggtggtgccagccccttgtccaccttctcttgaggccacagaactccctggggctggggcctctttctctggcctcccctgtgcacctggggggtcctggcccctgtgatgctcccccatccccacccacttctacatccatccacaccccagggtgagctggagctccaggctggccaggctgaacctcgcacacacgcagagttctgctccctgaggggggcccgggaggggctccagcaggaggccgtgggtgccattcgggggaaagtgggggaacgacacacacttcacctgcaagggccgacaacgcaggggacaccgtgccggcttcagacactcccagcgcccactcttacaggcccaggactggagctttctctggccaagtttcaggccaatgatccccgcatggtgttgggggtgctggtgtgtcttggtgcctggacttgagtctcaccctacagatgagaggtggctgacgcacccagggctaagcaaattaacccagttaagtctcccccc

SEQ ID NO: 162854 - DNA, 247 bp, Homo Sapiens
gcctactactactatacggctgcgagaagacgacagaaggggacaccgtgccggcttcagacactcccagcgcccactcttacaggcccaggactggagctttctctggccaagtttcaggccaatgatccccgcatggtgttgggggtgctggtgtgtcttggtgcctggacttgagtctcaccctacagatgagaggtggctgaggcaccagggctaagcaattaaaccagttaagtctcccaag

SEQ ID NO: 162855 - DNA, 397 bp, Homo Sapiens
tctagagtgatcccctgttacctggagattcccccgacaactccttgaggagagcggtggagggcatcagctgcccgagcagcgaaggggctgtggggaccacggaagcctacgggccagcctccaagaatctgctctccatcacggaagatcccgaagtgggcacccctacctatagcccgtccctgaaggagctggaccccaaccagcccctggaaagcaaagagcggagagccagcgacgggagccggagccccacgcccagccagaagctgggcaggcgcctacctaccctcctatcaccactccccatacaagcacgcgcacatcccggcgcacgcccagcactaccagagttacctgcagctgatccagcagaagtcggccgtggagtacg

SEQ ID NO: 162856 - DNA, 1338 bp, Homo Sapiens
acgtccgagacctggagcagccaccgccgcaatcatggtgtcagtaattaacactgtggatacctcccatgaggacatgattcacgacgcccagatggactactatggcacccgcctggcaacctgctcatcagacaggtccgtcaaaatctttgatgtgcgcaatggagggcagatccttatcgccgacctcaggggtcatgagggtcctgtgtggcaagtggcctgggctcaccccatgtacggcaacatcctggcatcgtgctcctatgaccggaaagtcattatctggagagaggaaaacggcacctgggagaagagccacgagcatgcgggacacgactcctcagtgaactcggtgtgctgggccccccatgactacggcctgatcctggcctgtgggagctcggatggggccatctccctgctgacttacaccggggaaggccaatgggaagtaaagaagatcaacaacgctcacaccattggctgcaatgccgtcagctgggcccctgctgttgtacctggaagcctcatagaccacccatcggggcagaaacccaattacatcaagaggtttgcatcaggtggctgtgacaacctcatcaagctgtggaaggaggaggaggacggccagtggaaggaggagcagaagctagaagcgcacagtgactgggttcgagatgtggcctgggccccctccatcggcctgcccaccagcaccatcgccagctgctcccaggatggtcgtgtgttcatttggacctgtgatgatgcctcaagcaatacgtggtcccctaaattgttgcacaagttcaacgatgtggtgtggcatgtgagctggtccatcacagccaacatcctggctgtctctggtggagacaataaggtgaccctgtggaaggagtcagttgatgggcagtgggtgtgcatcagtgatgtcaacaagggccagggctccgtatcagcatcagtgacagagggccagcagaacgagcagtgacaagacaggtggggcctggctccccacccgccagctccaggactgccccttcctgggccaactaaccaaacaactgggaagagcccccaactccaacaggattattttcccaggaggagttacagatgcagccacagattgatcatctgccttaacgtgatcggagatgctttgtaatctactgtccagctgaaagcactcatgttacgaggaagaaactacaagtgatgttcaaatctattttgggtcatttttatgtacctttgggttcaggcattatttggggggttttgttttcaaaggaactaaataaagtcatattggtttttccccac

SEQ ID NO: 162857 - DNA, 2560 bp, Homo Sapiens
  misc_feature (277)..(277): n is a, c, g, or t
ctctcgtagggatattatagggttcattagtaacacgcggtgctgtagaatagtggcgcgagcgcggagtgtggagacagtgtacgaactgaaggctcggtgctgacatttgttggtacctctgtagatcgaggcggactgattatggatagcggagagagcataataaaacgttcctatcgcgggggacgaaatccacgtcagatgtgcagccgtataagtgaaccacaattcgtcagagagctacataggtcgcgtcggagacactctgcgaaanagacgtgggggcatacctggatcgtttatgtaggaacatgattgtagatttattttgtgtctgcgtgctcagggtgtcgtgtttagttttattgggatatatccgtggggggatccgcacgcaattccgagtgtacgatcatggggcgatataacaagggaatgaggggtgggcaacacctataaatagccgtggactggggtggggggtattaatgaacagatgcgggggaggagaagcaaaatagcgtctatacaggtccgacggtttcgtgtccgaaccgcgtaacaacatatctagtggataagagaaggagggaattatgtcgggcatatgtagtgccatgccctataataagggataatgtgtgcggggggaaatattctcaagcggcggctcatgagcgtcggaatcgcgtaattgtatcacgacgcgccgggatgcgcaaagggattggtgtggaagatgggcggtaagaactagcgggggagatgcggatgcgagggtttgctcaccgcgggaataacccgtgtctgggaactcgccctgtagggctttgttttggagaaccccactggcggggggcggcgcagcaatattccactaaattgaggggaaggacggaagggaatggtgcaggaatctgcgattatcctgggagagtaggtgagagcccccggtccgtatactaatgttgggccgggccgcaccgaactatctggtgttgaagtcttcctgagggccggagggggcccccggcgggattagagttatttgttgctcatggcgggtattgttgttttattcggtgggagatccggagcagggttttccaacgaaattatttattgctgtcaggaggcccaggaccctccagactgaagagtccatgggcccctgtgcatgtgagagctacacagggaatcgctgtcaccttccaaggataagcagacagggccacacatgccatggccactcggtgcacaggggccaggctgtgcccagagacccaggcatccagcttgcattccaagttccttactgagagccccactgcttgatggcaagctctaggcttgcttgggattggtgactttgctcatgaagaagatgttctgggtgtctgtagggacaatgatcatcaggaagggcctgttgaaacgcacaatggtccttgtctccactaatgcagaaaggagggtgattttgactgctgtggcagcagatgcttctgtgccctcctcaaatacatcaagcacagccttatggaccacctgggagactgctaggttcctggcccctgtgatccctgacaggtcagccttgctggtgaaggcttcctcaatgcccagctggagaagtatgtcgttcaggttatagtccctcgagatggaaaactttggcaggtagagctcacctatctctctgaactccagagagtctctccaccgcttcagggtctctgggagcagcatggcttccacttcctccatcttgtcttgatcagggaggatgaagagtgcgctggcattgcctgtgtacttcagctccaccacggtgcaggacagctcctcgtcccggaagtaaggtatagtcaggtgatgcaaactcatcatgggcaccattacccactttttcttgctcaagtagaaccttgactgatgagtatcttgggggtcaaagggcatctcccatttggctttaaagaagatgtaattcaccaggaccatcattgtctgcgagtcaaggtccttgatcagatctgtgattttccccctagttccattcttcacgtagtcgttgatgagcttcttagctgcagctgagtcctgaaagtcagtggcaaaggcctcggagccatacagcctcttggcatcctccgtgaacctgtccagcagactgagttgctctttgacaaacatggcatttcccatactcagctgcagctcatcgctggactgattgagggtgcgcaggaggtgctggaagctctggtgaatttctgcctcagaagtctccgtgaggttgaacttgaggcctttgagaatctctgtcagggtggtattatgggcccccagagacaggaaggccaaggcggtggagatgctcagtggggagaagatgacattcttatcaggggccttcaggactaactgcttgtacaggctgaaagcgaagtccacgttggcggaggctaatccgaggtccacgtgtgtccctcggtcttggttctcctgggtcagattctcctcctctattggctgacgtttcaggtccgcttga

SEQ ID NO: 162858 - DNA, 181 bp, Homo Sapiens
tgaccggtccacctacagcagctatccaagttcttactgagagccccactgcttgatggcaagctctaggcttgcttgggattggtgactttgctcatgaagaagatgttctgggtgtctgggcacagcctggcccctgtgcaccgagtggccatggcatgtgtggccctgtctgcttatc

SEQ ID NO: 162859 - DNA, 447 bp, Homo Sapiens
  misc_feature (398)..(398): n is a, c, g, or t
ccaggtagacctaacccagacagacggctttggaatccaccagctacatccagctccctgaggcagagttgagaatggagagaatgttacctctcctggctctggggctcttggcggctgggttctgccctgctgtcctctgccaccctaacagcccacttgacgaggagaatctgacccaggagaaccaagaccgagggacacacgtggacctcggattagcctccgccaacgtggacttcgctttcagcctgtacaagcagttagtcctgaaggcccctgataagaatgtcatcttctccccactgagcatctccaccgccttggccttcctgtctctgggggcccataataccaccctgaacagagattctcaaaggccttcaagtttcaacctnacgggagactttttgagggcagaaatttcaccagaggtttccagcacct

SEQ ID NO: 162860 - DNA, 227 bp, Homo Sapiens
ggtcggtaccagcagtacgctcatcacgactagtgaagaaggaactagggggaaaatcacagatctgatcaaggacctgactcgcagacaaatgatggtcctggtgaattacatctgctgtaaagccaaatgggagatgcccttggacccccaagatactcatcagtcaaggttctacttgagcaagaaaaagtgggtaatggtgcccatgatgagcgttactgctg

SEQ ID NO: 162861 - DNA, 442 bp, Homo Sapiens
  misc_feature (410)..(410): n is a, c, g, or t
  misc_feature (427)..(427): n is a, c, g, or t
aagaatgtcatcttctccccactgagcatctccaccgccttggccttcctgtctctgggggcccataataccaccctgacagagattctcaaaggcctcaagttcaacctcacggagacttctgaggcagaaattcaccagagcttccagcacctcctgcgcaccctcaatcagtccagcgatgagctgcagctgagtatgggaaatgccatgtttgtcaaagagcaactcagtctgctggacaggttcacggaggatgccaagaggctgtatggctccgaggcctttgccactggactttcaggactcagctgcagcttaaggaagcttcatcaacgacttacgtgaaaggaatgggaacttagggggggaaaattcacagattctggattcaagggaccttggacttngcagacaatggatggtnctgggtgaatttaca

SEQ ID NO: 162862 - DNA, 331 bp, Homo Sapiens
tgatgctgaggtgatctagaggatcccggaatgtgtggtgttatggtcaccctgtacacatcggggacacaatactccgtcctcaaagacaacccacgggctatcggccccagcgacatttgtggtgactccgtcgccgtcctcaccgggtccgtctacgaagaaatggccaacgacaagaacgacgactgcaagcacaacggcaaaaagggagtcacgatccagtcgtacaaaaactctgccgacgtcgccaccgccgtcgccggagggaaagctgacctctggttctccgactctcccgtcgtcgactatgcataacaccacaaattcg

SEQ ID NO: 162863 - DNA, 805 bp, Homo Sapiens
  misc_feature (592)..(648): n is a, c, g, or t
gtagcatttcttgtttatttggcaatctatattcacaggcccataataacaaccaagcaatccttattttgatccaaaccaaccccaaactgacacatattaaaatgaacagagaaagacattaacattaattttaactatatcccatatgtttacaaagttgagacatggaaaaatattagaagaaataatggccaaaaatgttccaaatgtaatgaaaaatataaacccacagacctgaagctcaatgtcaagtacaagaaatacaaagaaaactgtaacaaatcacataatcaaattgctcaaaaccaatgatatagatcaaatcctgaaggcagctgggaaaatagtacatgttatttacacaggaacaaagattaagaatgataccaaatttcttgtcagaaatagtgcaagtgagaagacagcagtgcaacttgatctttaaagtgctgaaggcaaaaactgcaaacctagaattttatgtgtgatgaaaatatattttagcgaagtgaaataaagatattttcagacacataaaagctggaagacactttaaggctgaggtgggcagatcgcttgagcaatacannnnnnnnnnnnnnnnnnnnnnnnnnnnnnnnnnnnnnnnnnnnnnnnnnnnnnnnntataccaagcatagtgcacacgcctggagtctcagttacttgggaggctggagcctgggaggtttgcttgagcctggaagtcaaggctccagtgagccataattgtgtcattgcactcaggcctgggtgacagagcgagactctcaaaccaataaat

SEQ ID NO: 162864 - DNA, 802 bp, Homo Sapiens
ttgtcctgagttactgtacttgcttgacatggttgttgggtactaaatcacaaaagaatccattccaggtatgcatgtctgggggttgggctgtgtctagattagaaactgggtttcaagctttgcatgatgggagagcgtcctctcctctatcagactgcgtgtgttctggataggacagtagcccggagatggaaaccactcttcagttaccattagcccaccataccaagtaacaagttaagctaggaatcgtgggaatttattgagtcagctttgagtgtttgagagaatgtaaacaagattggctcgaattgtaaacgtttgtactttggatgagttcatggttctttaggtcaccttaataccagctatctttggtagaagctacagcattcagtttctctggaaactgtatcacatttttgcattttaaaaattttacagtatcaaaaaaccaaaatctgcttatgaaacaaaacatgaagcaggacatatttggattctatttatttaaaattaaattctttgcaaaattgaacttctcaactaaaacgtgtccatgtcagaattttaactgttagcaggtagtttgtggcaaagatggctaaataatgaagcaaattagaatctgtgtgtatactaatgagctgctttttttctgttgagactatcattatttgtcttattacccaagaggcaattacctgaatttggatgtctgaattataacttatgcaggaatagttctgtaaatacatttaaataaactgtaaagatatttaataaatatagtatttgc

SEQ ID NO: 162865 - DNA, 432 bp, Homo Sapiens
cgcagtcttctcccatcagattgtgcttttaagggtagagtttattagacaatgtacatttaggtatgtttttggatggtaccaaccctctgtattagtactaagtcatagttgcattaaaatgttttggtcaaccaagtgtgttcaggtggcctgtgccctgggaagagagcagcacctgcagaggtaggggaatgcaggcctgatgggagcaagactggcgcatcttctcccatcaggattgtttgcatagcttgctaaaaggcacctaagcagcagcatcatctctatgccttcagtaaattgtggaacatttctaaaatactccttggaagcagagacagtgtggtcctttgcatatcagtgactgagaaaaattttaaggatcaatgtgtatgtgtctctgtgtgtctgtaaggctcatgaaaaatc

SEQ ID NO: 162866 - DNA, 1208 bp, Homo Sapiens
  misc_feature (1120)..(1120): n is a, c, g, or t
  misc_feature (1194)..(1194): n is a, c, g, or t
taatatgctcacgctcttcctgctaaccacattcctcgttctgtgactgtggagccatggaccagttagatgatgaagagggacttccagaagaagctggttataaaaaaccagcaatttcacaaggaacgagagcagccacccagatttgcacagcctggctcctttgagtatgaatatgccatgcgctggaaggcactcattgagatggagaagcagcagcaggaccaagtggaccgcaacatcaaggaggctcgtgagaagctggagatggagatggaagctgcacgccatgagcaccaggtcatgctaatgagacaggatttgatgaggcgccaagaagaacttcggaggatggaagagctgcacaaccaagaggtgcaaaaacgaaagcaactggagctcaggcaggaggaagagcgcaggcgccgtgaagaagagatgcggcggcagcaagaagaaatgatgcggcgacagcaggaaggattcaagggaaccttccctgatgcgagagagcaggagattcggatgggtcagatggctatgggaggtgctatgggcataaacaacagaggtgccatgccccctgctcctgtgccagctggtaccccagctcctccaggacctgccactatgatgccggatggaactttgggattgaccccaccaacaactgaacgctttggtcaggctgctacaatggaaggaattggggcaattggtggaactcctcctgcattcaaccgtgcagctcctggagctgaatttgccccaaacaaacgtcgccgatactaataagttgcagtgtctagtttctcaaaacccttaaaagaaggaccctttttggactagccagaattctaccctggaaaagtgttagggattccttccaatagttagatctaccctgcctgtactactctagggagtatgctggaggcagagggcaagggaggggtggtattaaacaagtcaattctgtgtggtatattgtttaatcagttctgtgtggtgcattcctgaagtctctaatgtgactgttgagggcctggggaaaccatggcaaagtggatccagttagagcccattaatcttgatcattccggtttttgttttttgngtccatctggtttcattggcttgccccgcccccgaaacggagtctaactctgtcgccccaagctggaggggtantggcctggatctca

SEQ ID NO: 162867 - DNA, 479 bp, Homo Sapiens
cagccctcacatacctccagcctcacatacctccagcccctcgcatacctgcaacatgggcaacaggccagcagccacaaatgaaggcttgactattgacctgaagaattttagaaaaccaggagagaagaccttcacccaacgaagccgtctttttgtgggaaatcttcctcccgacatcactgaggaagaaatgaggaaactatttgagaaatatggaaaggcacggcgaagtcttcattcataaggataaaggatttggctttatccgcttggaaacccgaaccctagcggagattgccaaagtggagctggacaatatgccactccgtggaaagcagctgcgtgtgcgctttgcctgccatagtgcatccccttacagttcgaaaccttcctcagtatgtgtccaacgaactgctggaagaagccttttctgtgtttggccaggtatgtgaggggctggaggtatgtgaggctgg

SEQ ID NO: 162868 - DNA, 949 bp, Homo Sapiens
  misc_feature (739)..(754): n is a, c, g, or t
  misc_feature (891)..(891): n is a, c, g, or t
cacaccaagaggtgcaaaaacgaaagaactggagctcaggcaggaggaagagcgcaggcgccgtgaagaagagatgcggcggcagcaagaagaaatgatgcggcgacagcaggaaggattcaagggaaccttccctgatgcgagagagcaggagattcggatgggtcagatggctatgggaggtgctatgggcataaacaacagaggtgccatgccccctgctcctgtgccagctggtaccccagctcctccaggacctgccactatgatgccggatggaactttgggattgaccccaccaacaactgaacgctttggtcaggctgctacaatggaaggaattggggcaattggtggaactcctcctgcattcaaccgtgcagctcctggagctgaatttgccccaaacaaacgtcgccgatactaataagttgcagtgtctagtttctcaaaacccttaaaagaaggaccctttttggactagccagaattctaccctggaaaagtgttagggattccttccaatagttagatctaccctgcctgtactactctagggagtatgctggaggcagagggcaagggaggggtggtattaaacaagtcaattctgtgtggtatattgtttaatcagttctgtgtggtgcattcctgaagtctctaatgtgactgttgagggcctgggggaaccatggccaagtggatccagttagagcccattaatcttgatcattccggnnnnnnnnnnnnnnnngtccatcttggttcatttgcttggccccgcccccgagacggaagtcttactctggtcgccccaggctggaatgtaatgggcattgatctccgctcactgccaatctcttgcctcccgggttcaagcttgtccaaggntgaatctttgaactccggacctccgtgatctaacccaccttcggccttcccaaattgg

SEQ ID NO: 162869 - DNA, 1192 bp, Homo Sapiens
  misc_feature (100)..(149): n is a, c, g, or t
cttgctgtctgcaatcgaagtgagggtgcaaaaatgcagagtaataaaacttttaactgggagaagcaaaaccatactccaagaaagcatcatcaacatnnnnnnnnnnnnnnnnnnnnnnnnnnnnnnnnnnnnnnnnnnnnnnnnnngccaatacctgcaaagtgggcaacaggccagcagccaaaatgaaggcttgactatgacctgaagaattttagaaaaccaggagagaagaccttcacccaacgaagccgtctttttgtgggaaatcttcctcccgacatcactgaggaagaaatgaggaaactatttgagaaatatggaaaggcaggcgaagtcttcattcataaggataaaggatttggctttatccgcttggaaacccgaaccctagcggagattgccaaagtggagctggacaatatgccactccgtggaaagcagctgcgtgtgcgctttgcctgccatagtgcatcccttacagttcgaaaccttcctcagtatgtgtccaacgaactgctggaagaagccttttctgtgtttggccaggtagagagggctgtagtcattgtggatgatcgaggaaggccctcaggaaaaggcattgttgagttctcagggaagccagctgctcggaaagctctggacagatgcagtgaaggctccttcctgctaaccacatttcctcgtcctgtgactgtggagcccatggaccagttagatgatgaagagggacttccagagaagctggttataaaaaaccagcaatttcacaaggaacgagagcagccacccagatttgcacagcctggctcctttgagtatgaatatgccatgcgctggaaggcactcattgagatggagaagcagcagcaggaccaagtggaccgcaacatcaaggaggctcggtgagaagctggagatggagatggaagctgcacgccatgagcaccaggtcatgctaatgagacaggatttgatgaggcgccaagaagaacttcgggaggatggaagaagctgcacaaccaagaagtgcaaaaacgaaagcaactggagctcaggcaggagggaagagcgcaagcgcccgtggaagaaaagatgccggcggcagcaagaaaaaaatgattgcgcggaaagcaggaaggaattccagggaaacctttccctgatgccaaaagaaccggaaaaa

SEQ ID NO: 162870 - DNA, 855 bp, Homo Sapiens
  misc_feature (104)..(104): n is a, c, g, or t
  misc_feature (292)..(292): n is a, c, g, or t
  misc_feature (594)..(628): n is a, c, g, or t
gaattggtcccaggggtttccccattcccagggccgagggaaatgtggttagcaggaaaggaagcctcccctgcattgttccagagctttccgagcagctgggnttcccgaagacttcaccatgccctttcctgagggcctcctggatcatccacaatgactacagccttctctacctggccaaaccagaaaaggcttccttccagcagttcgttgaccacatactgaggaaggtttcgaactgtaaagggatgccactatggcaggcaaaagcgcacacgcagctgctttnccacggagtggcatatggtccagctccactttggcaatctccgctagggttcgggtttccaagcggataaagccaaatcctttatccttatgaatgaagacttcgcctgcctttccatatttctcaaatagttccctcatttcttcctcagtgatgtcgggaggaagatttcccacaaaaagacggcttcgttgggtgaaggtcttctctcctggttttctaaaattcttcaggtcaatagtcaagccttcattttggctgctggcctgttgcccatttgcaggtattggcggtggtggcgnnnnnnnnnnnnnnnnnnnnnnnnnnnnnnnnnnntggtgatgttgatgatgctttcttggagtatggttttgcttctccaagttaaaagttttattactctgcatttttgcaccctcaacttcgattgcagacagcaaagtgcctcccagttccctctaacctcgacttctcctctaccgactggtatctcctcggagtaacggcgacgctacacggcctctcccgtcccgagaaaagagcgcgcgaccgccggaaacccc

SEQ ID NO: 162871 - DNA, 1444 bp, Homo Sapiens
  misc_feature (1296)..(1345): n is a, c, g, or t
cgttgaatcaggaaggagtcccacccatttgcccccaattcgacttcacatgttaccaagctcggacccaaagccgtttcactttcttgttggcggtttcaatcccgagaagttccaaatcgcgcgaatcattagtgcccaggtcctgggaaggactgggggttaccacgttgggcaacaaggacaaagggggcaatgggaaccttcttgtttgttttatgcgccaatagcacctgcccatagccatctgacccatccgaatctcctgctctcttcgcatcagggaaggttcccttgaatccttccctgctgtccccgcatcatttcttctgggctgccgccgcatctcttcttcaccggcgcctgcgctcttcctcctgcctgagctccagtttgctttcgtttttgcacctcttggttgttgcagctcttccatcctccgaagttcttcttggcgcctcatcaaatcctgtctcattagcatgacctggtgctcatggcgtgcagcttccatctccatctccagcttctcacgagcctccttgatgttgcggtccacttggtcctgctgctgcttctccatctcaatgagtgccttccagcgcatggcatattcatactcaaaggagccaggctgtgcaaatctgggtggctgctctcgttccttgtgaaattgctggttttttataaccagcttctctggaagtccctcttcatcatctaactggtccatgggctccacagtcacaggacgaggaaatgtggttagcaggaaggagccttcactgcatctgtccagagctttccgagcagctggcttccctgagaactcaacatgccttttcctgagggccttcctcgatcatccacaatgactacagccctctctacctggccaaacacagaaaaggcttcttccagcagttcgttggacacatactgaggaaggtttcgaactgtaagggatgcactatggcaggcaaagcgcacacgcagctgcctttccacggagtggcatattgtccagctccactttggcaatctccgctagggttcgggtttccaagcggataaagccagatcctttatccttatgaatgaagacttcgcctgcctttccatatctctcaaatagtttcctcatttcttcctcagtgatgtcgggaggaagatttcccacaaaaagacggcttcgttgggtgaaggtcttctctcctggttttctaaaattcttcaggtcatagtcaagccttcattttggctgctggcctgttgcccactttgcaggtattggcnnnnnnnnnnnnnnnnnnnnnnnnnnnnnnnnnnnnnnnnnnnnnnnnnnatgttgatgatgctttcttggagtatggttttgcttctcccagttaaaagttttattactctgcatttttgcaccctcacttcgattgcagacagcaag

SEQ ID NO: 162872 - DNA, 244 bp, Homo Sapiens
cgatcttgctcccatcagaatagtctcccatgttgctcttttcttgtttgtagatctgtagtcaatgattctttaacagcaatagtttgagtaggtttaactgaaccaggcttgttttcctgatggcacgaagatcttgctcccatcaggtccacatgagagtacttcttcctgactgtacaatcaccccaaatcctctctactttgttgtccacatcctcatcgtcactgatgggggaagatg

SEQ ID NO: 162873 - DNA, 822 bp, Homo Sapiens
gggggcgcagtgcggcggtcacaggctgagtgctgcggcgcgatccttgcttccctgagcgttggcccgggaggaaagaagatggtgctggatctggatttgtttcgggtggataaaggaggggacccagccctcatccgagagacgcaggagaagcgcttcaaggacccgggactagtggaccagctggtgaaggcagacagcgagtggcgacgatgtagatttcgggcagacaacttgaacaagctgaagaacctatgcagcaagacaatcggagagaaaatgaagaaaaaagagccagtgggagatgatgagtctgtcccagagaatgtgctgagtttcgatgaccttactgcagacgctttagctaacctgaaagtctcacaaatcaaaaaagtccgactcctcattgatgaagccatcctgaagtgtgacgcggagcggataaagttggaagcagagcgggttgagaacctccgagagattgggaaccttctgcacccttctgtacccatcagtaacgatgaggatgtggacaacaaagtagagagggatttggggtgattgtacagtcaggaagaagtactctcatgtggacctggtggtgatggtagatggctttgaaagcgaaaaaggggccctggtgggctgggagtccaagggtacttccttgaaggggggcctggtggttcctggaaaaaggctctcatccagtatggccctttcccaccttggggaaagtccggggctacattcccaatttaataccccccctttttttcctggaagggaaagggaggtcctttggcaagggaagggggg

SEQ ID NO: 162874 - DNA, 1276 bp, Homo Sapiens
agtccgaaggggttacttcctttggaagggggggtcccttggtgtttccctggaaccagggctctacatcccaggtatgccccttgcgcaccttgggaaagttcgggggctacattccccatttaatacccccctttttcatgaggaaaggaggttcatgcaggagggtggcacagctcagccagtttgatgaaagaacttaataaggggattggcaaagggcagtgaaaagtctgatgacaactcctatgatgagaagtacctgattgccacctcagagcagcccattgctgccctgcaccgggatgagtggctccggccggaggacctgcccatcaagtatgctggcctgtctacctgcttccgtcaggaggtgggctcccatggccgtgacacccgtggcatcttccgagtccatcagtttgagaagattgaacagtttgtgtactcatcaccccatgacaacaagtcatgggagatgtttgaagagatgattaccaccgcagaggagttctaccagtccctggggattccttaccacattgtgaatattgtctcaggttctttgaatcatgctgccagtaagaagcttgacctggaggcctggtttccgggctcaggagccttccgtgagttggtctcctgttctaattgcacggattaccaggctcgccggcttcgaatccgatatgggcaaaccaagaagatgatggacaaggtggagtttgtccatatgctcaatgctaccatgtgcgccactacccgtaccatctgcgccatcctggagaactaccagacagagaagggcatcactgtgcctgagaaattgaaggagttcatgccgccaggactgcaagaactgatcccctttgtgaagcctgcgcccattgagcaggagccatcaaagaagcagaagaagcaacatgagggcagcaaaaagaaagcagcagcaagagacgtcaccctagaaaacaggctgcagaacatggaggtcaccgatgcttgaacattcctgcctccctatttgccaggctttcatttctgtctgctgagatctcagagcctgcccaacagcagggaagccaagcacccattcatccccctgcccccatctgactgcgtagctgagaggggaacagtgccatgtaccacacagatgttcctgtctcctcgcatgggcatagggacccatcattgatgactgatgaaaccatgtaataaagcatccctggggagggcttaggactcttcctcagtcttcttccccgggcttggt

SEQ ID NO: 162875 - DNA, 961 bp, Homo Sapiens
ggggcagtgcggcggtcacaggctgagtgctgcggcgcgatccttgcttccctgagcgttggcccgggaggaaagaagatggtgctggatctggatttgtttcgggtggataaaggaggggacccagccctcatccgagagacgcaggagaagcgcttcaaggacccgggactagtggaccagctggtgaaggcagacagcgagtggcgacgatgtagatttcgggcagacaacttgaacaagctgaagaacctatgcagcaagacaatcggagagaaaatgaagaaaaaagagccagtgggagatgatgagtctgtcccagagaatgtgctgagtttcgatgaccttactgcagacgctttagctaacctgaaagtctcacaaatcaaaaaagtccgactcctcattgatgaagccatcctgaagtgtgacgcggagcggataaagttggaagcagagcggtttgagaacctccgagagattgggaaccttctgcacccttctgtacccatcagtaacgatgaggatgtggacaacaaagtagagaggatttggggtgattgtacagtcaggaagaagtactctcatgtggacctggtggtgatggtagatggctttgaaggcgaaaagggggccgtggtggctgggagtcgagggtacttcttgaagggggtcctggtgttcctggaacaggctctcatccagtatgcccttcgcaccttgggaaagtcggggctacattcccatttataccccctttttcatgaggaaggaggtcatgcaggaggtggcacagctcagccagtttgatgaagaactttataaggtgattggcaaaggcagtgaaaagtctgatgacaactcctatgatgagaaatacctgaatgccacctcaaaacaacccaattgctggccctgccaccgggatgaagtggcttccgcccgaaggaccctccccatt

SEQ ID NO: 162876 - DNA, 439 bp, Homo Sapiens
  misc_feature (28)..(28): n is a, c, g, or t
  misc_feature (37)..(37): n is a, c, g, or t
  misc_feature (53)..(53): n is a, c, g, or t
  misc_feature (76)..(76): n is a, c, g, or t
  misc_feature (91)..(91): n is a, c, g, or t
  misc_feature (219)..(219): n is a, c, g, or t
gtcctgaaaccctgttttcctaagggtnaacgtctcnttgctgcctgcctttnctttttgctgcccctcatgttgncttcttcctgccttnctttgaatggctccctgcctcaatgggcgcaggcttcacaaaggggatcagttcttgcagtcctggcggcatgaactccttcaatttctcaggcacagtgatgcccttctctgtctggtagttctccnaggatggcgcagatggtacgggtagtggcgcacatggtagcattgagcatatggacaaactccacctgggaagacagggtcccagaggggaagtcgggctcaactctcatcgggtcttactgacgggccaggaaccatccattcaaccagacttccccaaccacaactgtccaaatcaaaatgatgggttctaccccttagcaacttttttctaaatttc

SEQ ID NO: 162877 - DNA, 1939 bp, Homo Sapiens
actccatggtgtgttgaggcattgaggcagccagcgcaggggcttctgctgagggggcaggcggagcttgaggaaaccgcagataagtttttttctctttgaaagatagagattaatacaactacttaaaaaatatagtcaataggttactaagatattgcttagcgttaagtttttaacgtaattttaatagcttaagattttaagagaaaatatgaagacttagaagagtagcatgaggaaggaaaagataaaaggtttctaaaacatgacggaggttgagatgaagcttcttcatggagtaaaaaatgtatttaaaagaaaattgagagaaaggactacagagccccgaattaataccaatagaagggcaatgcttttagattaaaatgaaggtgacttaaacagcttaaagtttagtttaaaagttgtaggtgattaaaataatttgaaggcgatcttttaaaaagagattaaaccgaaggtgattaaaagaccttgaaatccatgacgcagggagaattgcgtcatttaaagcctagttaacgcatttactaaacgcagacgaaaatggaaagattaattgggagtggtaggatgaaacaatttggagaagatagaagtttgaagtggaaaactggaagacagaagtacgggaaggcgaagaaaagaatagagaagatagggaaattagaagataaaaacatacttttagaagaaaaaagataaatttaaacctgaaaagtaggaagcagaagaaaaaagacaagctaggaaacaaaaagctaagggcaaaatgtacaaacttagaagaaaattggaagatagaaacaagatagaaaatgaaaatattgtcaagagtttcagatagaaaatgaaaaacaagctaagacaagtattggagaagtatagaagatagaaaaatataaagccaaaaattggataaaatagcactgaaaaaatgaggaaattattggtaaccaatttattttaaaagcccatcaatttaatttctggtggtgcagaagttagaaggtaaagcttgagaagatgagggtgtttacgtagaccagaaccaatttagaagaatacttgaagctagaaggggaagttggttaaaaatcacatcaaaaagctactaaaaggactggtgtaatttaaaaaaaactaaggcagaaggcttttggaagagttagaagaatttggaaggccttaaatatagtagcttagtttgaaaaatgtgaaggactttcgtaacggaagtaattcaagatcaagagtaattaccaacttaatgtttttgcattggactttgagttaagattattttttaaatcctgaggactagcattaattgacagctgacccaggtgctacacagaagtggattcagtgaatctaggaagacagcagcagacaggattccaggaaccagtgtttgatgaagctaggactgaggagcaagcgagcaagcagcagttcgtggtgaagataggaaaagagtccaggagccagtgcgatttggtgaaggaagctaggaagaaggaaggagcgctaacgatttggtggtgaagctaggaaaaaggattccaggaaggagcgagtgcaatttggtgatgaaggtagcaggcggcttggcttggcaaccacacggaggaggcgagcaggcgttgtgcgtagaggatcctagaccagcatgccagtgtgccaaggccacagggaaagcgagtggttggtaaaaatccgtgaggtcggcaatatgttgtttttctggaacttacttatggtaaccttttatttattttctaatataatgggggagtttcgtactgaggtgtaaagggatttatatggggacgtaggccgatttccgggtgttgtaggcttctctttttcaggcttatactcatgaatctttgtctgaagcgtttgagggcag

SEQ ID NO: 162878 - DNA, 684 bp, Homo Sapiens
  misc_feature (198)..(206): n is a, c, g, or t
ttctccaatggacatctcttccacagacctcaacgtgagaactgctctagtttctataaactgtaaacctgtggtggtctgattaccctgatatgggattttcttgttttctgttacaccttgagtcatttgcctttaggattctagacagacctaagggaaaaagaactgaaaacatattttgcccccacccccacnnnnnnnnntactgaaaactcccccccgcctcagttacacatccaaactctacatttacaaaacgaattcagggtgaggaagtaaaaacaggtcatctattcacaaaactgaaatacttcattaccccaactaaacatacaaactgcttacagatttgctgaaattgtctcaatttggctatcaaattcatttggttttcctcaaattcgtgtaaaaaaaatacccacaaacttgccatctactatttctccaggacttggcagtctgccctcaaaagcttcagacaagattcatgagtataagcctgaaaaagagaaacctacaacacccggaaatcggcctacgtccccatataaatccctttacacctcagtacgaaactcccccattatattagaaaataaataaaaggttaccataagtaagttccagaaaaacaacatattgccgacctcacggatttttaccaaccactcgctttccctg

SEQ ID NO: 162879 - DNA, 371 bp, Homo Sapiens
attaaccctcactaaaggcaatgcttttagattaaaatgaaggtgacttaaacagcttaaagtttagtttaaaagttgtaggtgattaaaataatttgaaggcgatcttttaaaaagagattaaaccgaaggtgattaaaagaccttgaaatccatgacgcagggagaattgcgtcatttaaagcctagttaacgcatttactaaacgcagacgaaaatggaaagattaattgggagtggtaggatgaaacaatttggagaagatagaagtttgaagtggaaaactggaagacagaagtacgggaaggcgaagagaagaatagagaagatagggaactttagtgaggttaattggggcggtaccgagctca

SEQ ID NO: 162880 - DNA, 1763 bp, Homo Sapiens
  misc_feature (1074)..(1074): n is a, c, g, or t
gtaaataattgaatataaagtcaataactgcaaggtaagattatcatctttataaagaacaaaaaacaataaattaaaagtcaaccaaggcaatccactcacaatctgaatgtatataatgatccagcagggaaggcatgttgcagtggtctgtgactgacttttggaaggggtgtgaaggagcttttaccctccaaatccaaaagcttcatcaccttcattgggctagcgcaatccccaaactagaagcaaactgcccttaatatttcagggtaagtttttatagattagcccagagcttttgtattttcccagttcactgctgagatctccttgatttgcaatgggagtgagatgaaaattcagtattttaaacagatttcttttttcactgattgataatcaatagaacatttactgaccatatactgagcacctattctatgcctaccagtgcttttttaaaacctgggtgagggctggtatatcgtctttgaaaaacaatgactataaaagctacaggaaaggtatttctataaatcataacatgattcagtgtaagggagtatcaggcacttggcccacgccaggtgctctgttaaagtagcagctttattctaaaaggctaatgtggatctttaaaaggtttccgtaactgggagaacccaggttgaacaggatttttctcaccagcatggctacagccagctttgcagtggcagaatgagctgcagaggtttcctccctgctttacaatcccttattgaagtacacgcgtcgcaattcaggatggctctcttggatcttagcttgcaactcggcctccaagcttgtcacagacatggaacttttctgaggaaacagggcacaacacaggggtgtagcaaacaccaaacagaagccaactaacccaacttgaatgggtgcactcatccatgggaacctcttcaaaaaggctttcttttccaaagtgttcataatgaatggagggatggccatgccaggggctgccatgagaatcctggacacgacaacttgcgtgatggcttgtttcgcagcgttcgccgactcccncaagcggttcccattctcatccgtgacgggaatgccaactttgagttccctttgcctcattaatggaatattaatgcaattagcagcagctacggcagcaaagggaacaaacggtcctatcagtggtgagacatgcttggtcaatgcattgagtcctagagctgttgctacggcaccagttgttgcagaaacgtaagctgttcccaactcattgacagtgaggggtgcgtctccacttctgttggtgtaattgacgacggcattgaaggactggttaatccactgccagaacagcacagccggcgtagtcctgtaaaacgtcatcatacaacctgtgatggtcatgttcatgggaacctgggctgacattcttcctatcaaaatcatcttctcaccagtgtcaggatgaaaagctgaatcatagatgtactttgctctccacaattcattttctgtaagaccaggaggaacaattccttgcctgtaatcatgtactatttttctcgcactctcgagttgttcgttggttaacagaatgttcctggggtcagttacagtgaagaaatgattggctcgtccaatgaaagtgctttgatcccatcgaggttccttgatgttaatgtttggtggtagttctccagacatggtcccggacgcttcccccgggctgccgcacgcgctgctcgcag

SEQ ID NO: 162881 - DNA, 810 bp, Homo Sapiens
  misc_feature (388)..(400): n is a, c, g, or t
  misc_feature (605)..(613): n is a, c, g, or t
aacatccaaccccaacaacatccaaccactcgctttccctgtggccttggcaaccacacggaggaggcgagcaggcgttgtgcgtagaggatcctagaccagcatgccagtgtgccaaggccacagggaaagcgagtggttggtaaaaatccgtgaggtcggcaatatgttgtttttctggaacttacttatggtaaccttttatttattttctaatataatgggggagtttcgtactgaggtgtaaagggatttatatggggacgtaggccgatttccgggtgttgtaggtttctctttttcaggcttatactcatgaatcttgtctgaaggttttgagggcagactgccaagtcctggagaaatagtagatggcaagtttgtgggnnnnnnnnnnnnnacacgaatttgaggaaaaccaaatgaatttgatagccaaattgagacaatttcagcaaatctgtaagcagtttgtatgtttagttggggtaatgaagtatttcagttttgtgaatagatgacctgtttttacttcctcaccctgaattcgttttgtaaatgtagaggttggatgtgtaactgaggcgggggggagttttcagtannnnnnnnngtgggggtgggggcaaaatatgttttcagttctttttcccttaggtctgtctagaatcctaaaggcaaatgactcaaggtgtaacagaaaacaagaaaatccaatatcaggataatcagaccaccacaggtttacagtttatagaaactagagcagttctcacgttgaggtctgtggaagagatgtccattggagaa

SEQ ID NO: 162882 - DNA, 631 bp, Homo Sapiens
gttggaggattactatttgcctcggcgaggtgcccaccatcgagtccctgataggggaaagctctgccaatttaaatgacccaaataaggaggcactggctaagacggaagtgtctctcaacctgaccaacaagttcgacgtgcctggagatgagaatgcagaaatggatgctcgaaccatcttactgaatacaaaacgtttaattgtggatgtcatccggttccagccaggagagaccttgactgaaatcctagaaacaccagccaccagtgaacaggaagcagaacatcagagagccatgcagagacgtgctatccgtgatgccaaaacacctgacaagatgaaaaagtcaaaatctgtaaaggaagacagcaacctcactcttcaagagaagaaagagaagatccagacaggtttaaagaagctaacagagcttggaaccgtggacccaaagaacaaataccaggaactgatcaacgacattgccagggcactgcattcgggggacagaggggacccggccttgttcaaagctgagaggctcgagagacagtagctgttcacataacagcatagcttcagttcatgggcaaattagtgccctcctctatgagaaccgtcgaattcgag

SEQ ID NO: 162883 - DNA, 599 bp, Homo Sapiens
tcgctctagaggattaccgactagtccaaccataccccacttcttgtcgctgtcagtttcccatcagcatacgcaaggaccaatcactcccaattaatctttccattttcgtctgcgtttagtaaatgcgttaactaggctttaaatgacgcaattctccctgcgtcatggatttcaaggtcttttaatcaccttcggtttaatctctttttaaaagatcgccttcaaattattttaatcacctacaacttttaaactaaactttaagctgtttaagtcaccttcattttaatctaaaagcattgcccttctattggtattaattcggggctctgtagtcctttctctcaattttcttttaaatacattttttactccatgaagaagcttcatctcaacctccgtcatgttttagaaaccttttatcttttccttcctcatgctactcttctaagtcttcatattttctcttaaaatcttaagctattaaaattacgttaaaaacttaacgctaagcaatatcttagtaacctattgactatattttttaagtagttgtattaatctctatctttcaaagagaaaaaaacttatctgcg

SEQ ID NO: 162884 - DNA, 658 bp, Homo Sapiens
  misc_feature (300)..(314): n is a, c, g, or t
  misc_feature (578)..(597): n is a, c, g, or t
  misc_feature (632)..(632): n is a, c, g, or t
cgcccgaattaaccctcactaaagaaaaatgtcttcaccccaaaatacaagcaagtgttgatttttcacactaatgggaaacaagaatagactggaaaaagttccctaaaaacccatttagtctgtatctttttatcttttgtcagttactaatgtgtaaccagatgacccaagctgagtttcaccacctctcctttctttattcttaccaatccattccaagtgctaatgaatggtgaggtctgggaacccaaagatacaagaaagaaggcatatggatgatagaaaaaaggtaagtcnnnnnnnnnnnnnnnctgcaatttggtgatgaaggtagcaggcggcttggcttggcaaccacacggaggaggcgagcaggcgttgtgcgtagaggatcctagaccagcatgccagtgtgccaaggccacagggaaagcgagtggttggtaaaaatccgtgaggtcggcaatatgttgtttttctggaacttacttatggtaaccttttatttattttctaatataatgggggagtttcgtactttagtgagggttaattgggcggaattaaccctctcnnnnnnnnnnnnnnnnnnnngattagctttagtagggttaattgggggggatccnctagagtcgacagcgggcagcaaaag

SEQ ID NO: 162885 - DNA, 533 bp, Homo Sapiens
gcatttcgcaaagaaccatttttatagagaggacctccttcactatagtcttcgagttcctgcatgactgaattaagcatctcttttacagactccaggggcacaggcaatttcttgaccactgaaagatttgaatcactgtcatctataatctttattaggtagtccctggtctttctcagataatttttgcattcttcttgttcttcaggagaaagggcatcattttcaatgtcttctgccttcctgtgaaaaatcagtgcaagataccaataagaaacaacactttttatagattcaaaagcagtcacagcatcttctatatttccatttactgcatccaacatagcaaaagttatgtgtgcgtcttcttcatattcaacaatttctgatgggagcaagtcttctcccatcagggatgacaaatgatattttggaggaggactaatagatttgatatgtattttgagaagcatttagaaataaaaatttaataataatggtaaattgccatttcaaaatgacaatactgc

SEQ ID NO: 162886 - DNA, 1798 bp, Homo Sapiens
  misc_feature (493)..(531): n is a, c, g, or t
  misc_feature (603)..(603): n is a, c, g, or t
  misc_feature (668)..(688): n is a, c, g, or t
  misc_feature (773)..(793): n is a, c, g, or t
ccagagttgttgtttgccaagctaatctgcctggttttatttatatcttgttattaatgtttcttctcccattctgaaatacttttgagtatggctatctatacctaccttttaagtttgaaactaactcatagattgcaaatattggttagtatttaactacatctgcctcggctcacaaattccgattagacctttatccagctagtgccaaataattgatcagatgctgaattgagaataagaatttgaggtctacattcttggttgttaatttagagcgtttggttaaagtatgtccttcagctgactccagtataatctcctctgctcattaaactgattccaggagattggatttgctgtgactagatacagatggagcaaatgtcctaacagagaaatagaggtgatgctgctaaagggagaaatgccaggcggacaaagttcagtgtcgggaattttccccgtgacattcactggggcatgagannnnnnnnnnnnnnnnnnnnnnnnnnnnnnnnnnnnnnnccttcctttttattcagctagaatttctggtgggttgatggtagggtataatgtgtctgtgttgcttcaaantggtctgaaaggctatcctgctgaaagtcctgctttcctatctagcatttattcctctggcaaannnnnnnnnnnnnnnnnnnnnaaagtaaacttgtgtattgagtcttaactgtatttcagtattttccagccttatgtgttacattattccaatgatacccaacagnnnnnnnnnnnnnnnnnnnnnaacaaaatttcacagttctgtaatgtaggcacttttattttcattgtgatttatatataaggtaatgtagggttatatttgggagtgactgcaagcatttttccatctgtgtgcaactaacgtgactctgttattgatcccttctcctgccctttcccaggtaatttaaattggtcatggtagatttttttcatagatttgaaaaacttttaggttgttaccaagtatgaagtataaatctggggaagaggttttatttacattttagggtgggtaagaaagccaccttgttacaaattttttaatttccaaaataatctatattaaatgagggtttctgatctgtactttgtgtttagctacctttttatatttaaaaaattaaaaatgaaaattacgttcttacaagcttaaagcttgatttgatctttgtttaaatgccaaaatgtacttaaatgagttacttagaatgccataaaattgcagtttcatgtatgtatataatcatgctcatgtatatttagttacgtataatgctttctgagtgagttttactcttaaatcatttggttaaatcatttggcttgctgtttactcccttctgtagtttttaattaaaaactttaaagataagtctacattaaacaatgatcacatctaaagctttatctttgtgtaatctaagtatatgtgagaaatcagaattggcataatttgtcttagttgatattcaaggctttaaaagtcattattcctgggcttggtaagtgaatttatgagatttactgctctagaaagtatagatggccaaaggaccgttttgtattgcttcctgattaccagtctgattataccatgtgtgctaatatactttttttgttatagattgtcttaatggtaggtcaagtaataaaaagagatgaaataatttataacatataaagaaaaaaagaactaacatacaaacaccgcaaacaactatccaaagagatataaaaaccttgt

SEQ ID NO: 162887 - DNA, 1328 bp, Homo Sapiens
  misc_feature (662)..(712): n is a, c, g, or t
  misc_feature (838)..(858): n is a, c, g, or t
  misc_feature (943)..(963): n is a, c, g, or t
  misc_feature (1243)..(1251): n is a, c, g, or t
tcatcttgggcctgtgttatcaataataagcatctgaagtcgaagctcccggctaagttgccgaatgttctccagtaggccttcaatttccctctgatgttcttgttggagatcagccatctctgactttgcagccgtcagcatagtccaaactttctttaacttcttggtctttccctgtgcttcctcttgcaaactggtatatttttcttcaatatccaagcgttcttgctctttttcctcaagttctctgcgaagttgctctgctcttttcctcctttcttccagttccatgttagattcttcaagaaatttctcttgttcctcagctttggccaacaagtcaaccccaccaacaatcaccttcttttccagggcagataatttttccagcaaagactgatgggagcaagatgcgcagtagcatcacctctatttctctgttaggacatttgctccatcagtatgtccttcagctgactccagtataatctcctctgctcattaaactgattccaggagattggatttgctgtgactagatacagatggagcaaatgtcctaacagagaaatagaggtgatgctgctaaagggagaaatgccaggcggacaaagttcagtgtcgggaattttccccgtgacattcactggggcatgagnnnnnnnnnnnnnnnnnnnnnnnnnnnnnnnnnnnnnnnnnnnnnnnnnnnattcagctagaatttctggtgggttgatggtagggtataatgtgtctgtgttgcttcaaattggtctgaaaggctatcctgcggaaagtcctgctttcctatctagcatttatttctctggcaaannnnnnnnnnnnnnnnnnnnnaaagtaaacttgtgtattgagtcttaactgtatttcagtattttccagccttatgtgttacattattccaatgatacccaacagnnnnnnnnnnnnnnnnnnnnnaacaaaatttcacagttctgtaatgtaggcacttttattttcattgtgatttatatataaggtaatgtagggttatatttgggagtgacttgcaagcatttttccatctgtgtgcaactaactgactctgttattgatcccttctcctgccctttccccagaaatttaaattgggtcatggtaatatttttttcataggatttgaaaaactttttaggttggttacccaagtattaaagtataaaatctggcggaagaggtttttatttaacatttttannnnnnnnnttaagaaaacccacccttgtttacaaaatttttttaaattttcccaaaaataatcctatattaaattgcaggggttt

SEQ ID NO: 162888 - DNA, 785 bp, Homo Sapiens
tcatgcgagctcgatcactcactgtgtattgcactgtcgtactgaaaaaaccctatgggactctcccatccactagtcggggagttacacaaacagaatagcccaagtttgataatgaaatttaaaaacattatctccttttttctagaaatgcttcctttgaacatgactgtcacttccattagctcctgtccataaagaaaaacacaatggaagataaccaatgattccccatatccttcagttttcctgatgggacagaaatataaaggaactttatttttaaatgacaacctaataactgttaataacatgacattttagttgtgtgtcttgtatgtatttatgtcattggtgctaatagcttccacttctaaatgacacacatttgaatcctaccatccctattgctaattaaacaaacaccaaagcttacaatatagtactgcaacctctaagactgtaacaacacagagaaattttagtggagtttccactctttcctaagtaatggaagaaaatgaagaaaccagaaaggtcagactaagcctgaaacacaatttcactatgaaaaaagggtaacaaatgtcccatcagagcgagaggagttaaaaatgtggcatcgggagtgtatcagattgaggtgctgttgttggctaggtctttgcttccaatgaggaaagaaggacctagaaaggagctgtgaggtgcttctttccttcatccttctgggctggcagcaaacgatcactacttcccgtagaactttttgttgagagcaggac

SEQ ID NO: 162889 - DNA, 810 bp, Homo Sapiens
ggggctcaataccccaagcaatacctgcaactgaggattcttcccagggagaccgcagcccatcggcatggctcaagagtttgtgaactgcaaaatccagcctgggaaggtggttgtgttcatcaagcccacctgcccgtactgcaggagggcccaagagatcctcagtcaattgcccatcaaacaagggcttctggaatttgtcgatatcacagccaccaaccacactaacgagattcaagattatttgcaacagctcacgggagcaagaacggtgcctcgagtctttatcggtaaagattgtataggcggatgcagtgatctagtctctttgcaacagagtggggaactgctgacgcggctaaagcagattggagctctgcagtaaccacagatctcataggaaatgttcaacaattctgtgaaaggtcacaggacccaattggagaaatcatatgaaaagcatagttggtcttggtgtcatatggatcagaggcacaagtgcagaggctgtggtcatgtggaacactctgttatttaagatggctatccagataatcctgaacactgtgtatttattttatttagactaccagcaaagattaaagcatgaaatgtaaaacatctgataaaacttacagccccctacaccaagagtgtatctgtgaaagagctcctacactttgaaaacttaagaatcccttatcatgaagtttgcctgttctagaattgtaagattgttaatttccttcaatctctagtgacaacacttaatttcttttctaataaaaaaaacctatagatgaaaaa

SEQ ID NO: 162890 - DNA, 884 bp, Homo Sapiens
atgttcagaggatcccgtcgctgtatcggggggagattgtcttccaggctagcaatggacttagatgatgtttgacccagcggcaggaatagcaggcaacgtgatttcaaagctgggctcagcctctgtttcttctctcgtgtaatcgcaaaacccattttggagcaggaattccactcatgtctgtgatggtggtgagaaagaaggtgacacggaaatgggagaaactcccaggcaggaacacctttggctgtgatgaccgcgtcatgatggcccgcaaaagggcattttctacctgacccttttcctcatcctgggaacatgtacactcttcttcgcctgtgagtgccgctacctggctgttcagctgtctcctgccattcccttgaatttgcttgccaggctcttccttttctccatggctacactgttgaggacacagcttcagtaaccctgggagtgattcctcgggcgctaccagatgaagcagctttcatagaaatggagatagaagctaccaatggtgcggtgccccagggccagcgaccaccgcctcgtatcaagaatttccagataaacaaccagattgtgaaactgaaatactgttacacatgcaagatcttccggcctccccgggcctcccattgcagcatctgtgacaactgtgtggaatctttgaaaattggcttcttggagacattgaaagaaactcctggaactgttctagaagtcctcatttgcttctttacactctggtccgtcgtgggactgactggatttcatactttcctcgtggctctcaaccagacaaccaatgaagacatcaaaggatcatggacagggaagaatcgcgtccagatccctacacgcatggcaatattgtg

SEQ ID NO: 162891 - DNA, 1093 bp, Homo Sapiens
aggtacatgtttcaggcagatttgaaatggatttcttcctcccacagtctaacaaaaacaagtagggaaacaaccaaagaataaggcaacttaaggaaaaacgcaggaagaccctgggaggcagggtcatgcaaaagctgccaatggtgtcctgatgggacgcagtcttcgtccatcaggtgtgcagtgcagctccgcggtgctgggaaacaggcctctttcaagacagcgcagggaaatcttcccgggtcatctgggttgggggcaacatcttgcatcaccacttctgctctgggtccatagttctctgccctcctgatccttccccggcctccccgggtgcctccctctggctccacgcccaggacgaggaaggttaccaaaattaatctccagctgggatgtgaagtcattggcgggtttacggaaaacatgggaatcgtcctcatagtcatcttttaccatcgtgaaacacaattacagcatcaaacacgcacaagtccacagccatcccagctggagattaattttggtaacctccccgggcctcccattgcagcatctgtgacaactgtgtggagcgcttcgaccatcactgcccctgggtggggaattgtgttggaaagaggaactaccgctacttctacctcttcatcctttctctctccctcctcacaatctatgtcttcgccttcaacatcgtctatgtggccctcaaatctttgaaaattggcttcttggagacattgaaagaaactcctggaactgttctagaagtcctcatttgcgatctttacactctggtccgtcgtgggactgactggatttcatactttcctcgtggctctcaaccagacaaccaatgaagacatcaataggatcatggacagggaagaatcgcgtcccagaatccctacagccatggcaatattgtgaagaactgctgtgaagtgctgtgtggccccttgccccccagtgtgctggatcgaaggggtattttgccactggaggaaagtggaagtcgacctcccagtactcaagagaccagtagcagcctctgccacagagcccacccataccccgtaacggggtt

SEQ ID NO: 162892 - DNA, 291 bp, Homo Sapiens
taccgtatcttgtccatcggtgctttaatcactgtctgttgctagtaacaggtttcagcagatttgaaatggatttcttcctcccacagtctaacaaaaacaagtagggaaacaaccaaagaataaggcaacttaaggaaaaacgcaggaagaccctgggaggcagggtcatgcaaaagctgccaatggtgtcctgatgggagcagatgcgcgcagtcttctcccatcagattgtgtgacacgtcgttggactctttttataaccaacaaaggtcaatgtatagaaatccg

SEQ ID NO: 162893 - DNA, 779 bp, Homo Sapiens
acgaaaggcaaatgggttgaactgtgggcgtcttctctccaaagaagactccccacctggtgaacctgaacgaagaccctctgatgtctgagtgtctgctctaccacatcaaagatggcgtcaccagtggtcggccaacgtagactatggacatcaagctgaccggacagttcattccgggagcaacactgtctgttccggagcatcccccagccagatggagaagtggtggtcactctggagccttgtgaaggagctgagacatatgtgaatgggaagcttgtgacggagccgctggtgctgaagtcagggaataggattgtgattgggcgagaaccacgtttgccgcttcaaccacccggagcaaggcaagcatggaacgggaacgaggggtccccccacccccagttccctttcgttgttcgctgggcccatggggcaccgcaccaattggtagcttctatctccatttctatgaaagctgcttcatctggtagcgaccgaggaatcactccagggtcactgaagctggtcctcaacagtgtagccatggagaaaaggaagagcatggcagcaaatacagggatggcaggagacagctgaacagccaggtagcggcactcaaaggcgaagaagagtgtacatgtccccaggatgaggaaaagggtcaggtagaaaatgcccttttgccagggccatcatgacgcaggccatcacagcaaaaggtgtgcctgcctgggagtgtctcccattgtccgtgtcaccgtcgtcgtcatacc

SEQ ID NO: 162894 - DNA, 992 bp, Homo Sapiens
cggggcccagggacctcaccaccttcgttcattctcatcctcatgatccctgggccagggggatgaccctctccatgcggagcatgcggtcccggcagggcctgcagctcccggtccttgctgctgttctgcagcttcacctcctgcagaatccccgtcagcttgtcgatgtgggcccggaggtcctccacctccgcccctcgggctcccgtcctcactgccaccaccactgccagctccacctccgttcctcctcgcctacagtgtcccagacatcccgggccacagccctccaggcgtctccggggccgtctggcttgccataggtgcgacacagctcccgcatcttgagggcggccagggcctcaatctcagcccgcccgtggcggaagtcagccagggccacctcgtagcagatctccttcaccgcctgcatcttcaggtcagccatggtggcccagcgggggtctttgccctgcagcctgcgtcgctgggggatctgataaaccctgcgaggggccctgcgcttgccactgctgggcagaccacagcgtttgacaatggtctggaccgtggtgggcggcagctgctcccgcaaggaggagatgagcctccagctctcttcacaagagcgcttgtcagagtcatccccgctgtccgagtctgcatacagtcgctgctgctccagcagaagatcggcttcttccttttctttccggtactgattctccagatcctgcagcctcttctccatttccagctttatgtcgatgccttgctgctccagcagttccttctgggcaaagttccagtcgactggctcagagggcgctcctgggggtggggggacccctcgttcccgttccagccttgcctgctccgggtggttgaagcggaaaacgtggttcttgcccatcacaatcctattccctgacttcagcaccagcggctccgtcacaagcttcccattcacatatgtctcagctccttca

SEQ ID NO: 162895 - DNA, 1114 bp, Homo Sapiens
cgtatgcggatcaaacgacacatttctgacacagtagggagcttggctcatgctttcggttcctccacataaaacaacttcagcttctttaacacaaatttcctgacatccattcacaatggactgaaaaccagaaccacagagcctattaatcgtgagagctggggtctcctttgggattcccacacgcaaaccaacatgccttgccaaatatatagcatctgaagaactctgcaggacattgcccataatcacactgtcaactgtttcaggtgagactttgccagcagacaaggcagccttggcagcaaattcagacaagtcagtagctgtgaagtctttcagaaggcctccgtaagctccaaagggcgttcgcttagcagcaactacaaacacacattgggaatcaaactaatgctggaaacatgcatcttcagacttcattgaggaattccagattgagacacgctgggatgtggattgagtccatggttagagaagatggattaaatggaaacaaaacaggaaacatgtgcttggcatctaatagcagttgctgagggtcattccgctcttgtagttgtgcctggattgttcgtataaaggccactgttacccgttcttcaaattcattcaggggagtataaaggtttaaaattttgacaatctgctgggtgctgagggaggtacacagggagcagatagcctctgcgtcctcctgggttttcttctttaattgcaggagctgggctgcttggatcagaggttccatggtctgaactgctccactctggtgaaggtttcttccccgaagccactcctcaagctgacttatattgtacctgagttgcatgcctgtgctccaagagcagacgtccttccgcaagagcaggttgttaagagtcactgcgttgatcatgtagaagagctgtttgaatacctgcaggatgatctcagggtccaagccctggtcacacatgactgtatgaaaggcattcatctggcggatgatagcttccaggcagtatgggttatccccatctgacatgctggaggagcgcttccggtagccggtgggcttcacaccagattagacctgaatgctctcattttc

SEQ ID NO: 162896 - DNA, 1321 bp, Homo Sapiens
gggccagacgcgcgagcgcaagcagcgggttagtggtcgcgcgcccgacctccgcagtcccagccgagccgcgacccttccggccgtccccaccccacctcgccgccatgcgcctccgccgcctagcgctgttcccgggtgtggcgctgcttcttgccgcggcccgcctcgccgctgcctccgacgtgctagaactcacggacgacaacttcgagagtcgcatctccgacacgggctctgcgggcctcatgctcgtcgagttcttcgctccctggtgtggacactgcaagagacttgcacctgagtatgaagctgcagctaccagattaaaaggaatagtcccattagcaaaggttgattgcactgccaacactaacacctgtaataaatatggagtcagtggatatccaaccctgaagatatttagagatggtgaagaagcaggtgcttatgatggacctaggactgctgatggaattgtcagccacttgaagaagcaggcaggaccagcttcagtgcctctcaggactgaggaagaatttaagaaattcattagtgataaagatgcctctatagtaggttttttcgatgattcattcagtgaggctcactccgagttcctaaaagcagccagcaacttgagggataactaccgatttgcacatacgaatgttgagtctctggtgaacgagtatgatgataatggagagggtatcatcttatttcgtccttcacatctcactaacaagtttgaggacaagactgtggcatatacagagcaaaaaatgaccagtggcaaaattaaaaagtttatccaggaaaacattttgggtatctgccctcacatgacagaagacaataaagatttgatacagggcaaggacttacttattgcttactatgatgtggactatgaaaagaacgctaaaggttccaactactggagaaacagggtaatgatggtggcaaagaaattcctggatgctgggcacaaactcaactttgctgtagctagccgcaaaacctttagccatgaactttctgattttggcttggagagcactgctggagagattcctgttgttgctatcagaactgctaaaggagagaagtttgtcatgcaggaggagttctcgcgtgatgggaaggctctggagaggttcctgcaggattactttgatggcaatctgaagagatacctgaagtctgaacctatcccagagagcaatgatgggcctgtgaaggtagtggtagcagagaattttgatgaaatagtgaataatgaaaataaagatgtgctgattgaattttatgccccttg

SEQ ID NO: 162897 - DNA, 268 bp, Homo Sapiens
ctcccaacaagaagaaggcacaggaggatctctaaagcagtagccaaacaccactttgtaaaaggactcttccaccagagatgggaaaaccactggggaggactaggaccaatatgggaattattacgtctcaggccagagagaacagaatggatataatctgaatcctgttaaattttctctaagccatttcttagctgcactgttatggaaataccaggaccagtttatgtttgtggtttgggaaaaatattcttgttgggagctt

SEQ ID NO: 162898 - DNA, 540 bp, Homo Sapiens
tttaaaggggtctcatttattgtcactgttccaaatgtacaaaaaaaattagaaaatacccccatacacaaccccaagctcccaacaagatttcccccaacacaaataatttttcccaaaaccacaaacataaactggtcctggtatttccataaacagtgcagctaagaaacagtttagagaaaatttaacaggattcagattatatccattctgtcctctcggccctgagaggtaataattcccatatgggtcctagtcctccccaatggttttcccatctctgatggaagagtccttttacaaagtggtgtttggctactgctttagagatcctcctgtgccttcttcttcttcttgggtttttcttcttgaattacaggggggtttgtagcttctctttgtagatagctaataaaatcacttaattcacggccaccttcatatttctttggatttagcttcttgatggctggagagaagtatatggtaggaagacctctgacttcatatgagaaggcacatcattgcttgcgcatc

SEQ ID NO: 162899 - DNA, 944 bp, Homo Sapiens
tatctagagcgatcccttcttacttaacccagtgtggactatgaaaagaacgctaaaggttccaactactggagaaacagggtaatgatggtggcaaagaaattcctggatgctgggcacaaactcaactttgctgtagctagccgcaaaacctttagccatgaactttctgattttggcttggagagcactgctggagagattcctgttgttgctatcagaactgctaaaggagagaagtttgtcatgcaggaggagttctcgcgtgatgggaaggctctggagaggttcctgcaggattactttgatggcaatctgaagagatacctgaagtctgaacctatcccagagagcaatgatgggcctgtgaaggtagtggtagcagagaattttgatgaaatagtgaataatgaaaataaagatgtgctgattgaattttatgccccttggtgtggtcattgtaagaacctggagcccaagtataaagaacttggcgagaagctcagcaaagacccaaatatcgtcatagccaagatggatgccacagccaatgatgtgccttctccatatgaagtcagaggttttcctaccatatacttctctccagccaacaagaagctaaatccaaagaaatatgaaggtggccgtgaattaagtgattttattagctatctacaaagagaagctacaaacccccctgtaattcaagaagaaaaacccaagaagaagaagaaggcacaggaggatctctaaagcagtagccaaacaccactttgtaaaaggactcttccatcagcagatgggaaaaacccatgggtgaggactaggacccatatgggaattattaccttctcaggccgagaggacagaatggtcatactctggaatctgtcaatttcctctaaacggttcttaggctgcctgtttatggaacatacaggaac

SEQ ID NO: 162900 - DNA, 284 bp, Homo Sapiens
ggtcgactactactactactaaattcgcgggcgcgtcgacgagagccgcatctccgacacgggctctgcgggcctcatgctcgtcgagttcttcgctccctggtgtggacactgcaagagacttgcacctgagtatgaagctgcagctaccagattaaaaggaatagtcccattagcaagggttgattgcactgccaacactaacacctgtaataaatatggagtcagtggatatccaaccctgaagatatttagagatggtgaagaagcaggtggtcgacgcg

SEQ ID NO: 162901 - DNA, 664 bp, Homo Sapiens
  misc_feature (38)..(38): n is a, c, g, or t
  misc_feature (83)..(83): n is a, c, g, or t
tccaactactgagaaacaggtaatgatgtgcaagtaanttcctgatgctggcacaaactcaactatgctgtactagacgcaanacactttagccatgaactatctgaatcctggataggagagcactgctggagagattcctgttgttgctatcagaactgctaaaggagagaagtttgtcatgcaggaggagttctcgcgtgatgggaaggctctggagaggttcctgcaggattactttgatggcaatctgaagagatacctgaagtctgaacctatcccagagagcaatgatgggcctgtgaaggtagtggtagcagagaattttgatgaaatagtgaataatgaaaataaagatgtgctgattgaattttatgccccttggtgtggtcactgtaagaacctggagcccaagtataaagaacttggcgagaagctcagcaaagacccaaatatcgtcatagccaagatggatgccacagccaatgatgtgccttctccatatgaagtcagaggttttcctaccatatacttctctccagccaacaaggaaggttaaatcccaaaggaaatatggaagggtgggccgtggaatttaagtggtttttatttaggctattcttacaaggggaggcttaccaaacccccctgttatttccaagga

SEQ ID NO: 162902 - DNA, 1671 bp, Homo Sapiens
  misc_feature (731)..(740): n is a, c, g, or t
  misc_feature (816)..(897): n is a, c, g, or t
  misc_feature (961)..(985): n is a, c, g, or t
  misc_feature (996)..(1012): n is a, c, g, or t
  misc_feature (1099)..(1107): n is a, c, g, or t
  misc_feature (1141)..(1151): n is a, c, g, or t
  misc_feature (1281)..(1330): n is a, c, g, or t
  misc_feature (1478)..(1499): n is a, c, g, or t
  misc_feature (1548)..(1548): n is a, c, g, or t
gggttcccgagcttggaacttcgttatccgcgatgcgtttcctggcagctacattcctgctcctggcgctcagcaccgctgcccaggccgaaccggtgcagttcaaggactgcggttctgtggatggagttataaaggaagtgaatgtgagcccatgccccacccaaccctgccagctgagcaaaggacagtcttacagcgtcaatgtcaccttcaccagcaatattcagtctaaaagcagcaaggccgtggtgcatggcatcctgatgggcgtcccagttccctttcccattcctgagcctgatggttgtaagagtggaattaactgccctatccaaaaagacaagacctatagctacctgaataaactaccagtgaaaagcgaatatccctctataaaactggtggtggagtggcaacttcaggatgacaaaaaccaaagtctcttctgctgggaaatcccagtacagatcgtttctcatctctaagtgcctcattgagttcggtgcatctggccaatgagtctgctgagactcttgacagcacctccagctctgctgcttcaacaacagtgacttgctctccaatggtatccagtgattcgttgaagaggaggtgctctgtagcagaaactgagctccgggtggctggttctcagtggttgtctcatgtctctttttctgtcttaggtggtttcattaaatgcagcacttggttagcagatgtttaannnnnnnnnnaacaacattaacttgtggcctctttctacacctggaaatttactcttgaataaataaaaactcgtttgtcttgtcnnnnnnnnnnnnnnnnnnnnnnnnnnnnnnnnnnnnnnnnnnnnnnnnnnnnnnnnnnnnnnnnnnnnnnnnnnnnnnnnnncctaaccaaaaacaccgcaagagcacataccaaaacgaaatcctcaatcattacccgggggacnnnnnnnnnnnnnnnnnnnnnnnnntttttgggcgnnnnnnnnnnnnnnnnnaaaaaatctttttaaaaaactctttttcttggccggccgccccccccaggggaaaagaaagacacggggaaacgactcttttccccnnnnnnnnnccccggggagaaaagaaccggaggggtttgttannnnnnnnnnnaaataaataaaacacgcccggggggggaaacaccgcaggctcctttaaaaaaaatccaccaaaagggcccctttccgcggcggcccccacccgcgtgggccccttctcgcgagcaaagggattcctacannnnnnnnnnnnnnnnnnnnnnnnnnnnnnnnnnnnnnnnnnnnnnnnnnggctccgttgtacggaagagagaggggcgggagaacttctctacaaaaaaattcttgtccccgccgctatgtggaacacccactccccacaacacctagtgtactgctcaacaaacacttgattttcgcccatgcgggcaactcttannnnnnnnnnnnnnnnnnnnnnggcgagataaatatactttcccgccgcgggaggaaaaacacgcgccggngaaaaaaattaatttctttaattattcgccaccccatttataacacacaagagcgggggggaccacacccccccgccgggtgttgtgggcgcacacaaaagaatatattttgtttttaataag

SEQ ID NO: 162903 - DNA, 610 bp, Homo Sapiens
  misc_feature (517)..(517): n is a, c, g, or t
  misc_feature (535)..(535): n is a, c, g, or t
  misc_feature (570)..(570): n is a, c, g, or t
gtgagcccatgccccacccaaccctgccagctgagcaaaggacagtcttacagcgtcaatgtcaccttcaccagcaatattcagtctaaaagcagcaaggccgtggtgcatggcatcctgatgggcgtcccagttccctttctcattcctgagcctgatggttgtaagagtggaattaactgccctatccaaaaagacaagacctatagctacctgaataaactaccagtgaaaagcgaatatccctctataaaactggtggtggagtggcaacttcaggatgacaaaaaccaaagtctcttctggctggggaaatcccagttacagatcgtttcttcatctcttaagtgcctcattggagtttcggtgcatctgggccaattgagtcttgcttgaggactcttggacagcaccttccagctctgctgctttcaacaacagtggacttggttttccaatggtattccagtggattcgttgaagagggaggtgctctgtaggcaggaattgaggttcnggtgggtggttctcagtnggttgtctcatgtctctttttctgtctttagggtnggttcattaaattgcaggaatttgggtaggcggtgtttaa

SEQ ID NO: 162904 - DNA, 756 bp, Homo Sapiens
ttgatgaaggtgaacacatctggaataagagtggagggcacggataccgtgccaaagccctgaggcaatgagatgatctgaaacaatttgggcaaaggctggacatttcaaaaagctgacttccaactgcagtttatgggtatagaatttgatgcttccctcaagtcctgactgctctttctgaggcagccaggctaggccaagaaatgagctgctccagcttctccagagcacagcagcctcccagggcctgtcagcatctgcagcagctggaaggaggtcccagctcttctgagacataggccatttgtaggattctccagtgctccaattcactaatgtctcctaatggctcagaacaggctaaagcttctcccagataacccctcccccaaaactgagtcctcagggacagttgttaactgaatgacctccaggttatctactttgggaggtgcaggaatgctataaactgaattttttcccagcagcagcagaagccaggcacccttgagtcaattgtccttcattgtccagagctaccaagtggcatttcagagcacaggaatttactcctccacccagatgtccctctcatatggactgagtcacacaccccaggtcctagcagcagacatctccaaaccaacatcctgtgaacactgcagatctctacgccagctctccaatggaagaagaaccacatagagcacacctgccccccagggcacttggactatcacagtaaaaatacat

SEQ ID NO: 162905 - DNA, 1042 bp, Homo Sapiens
ttgctggcttttccttgctgctgtccttcctgcttagacgcctggtgactctcatttcgcagcaggccacgctgctggcctccaatgaagcctttaaaaagcaggcggagagtgctagtgaggcggcggggcctgcacgttgactgtgggaaactcggaaacaagctcacatcttcctgtgggaaaccttctagcaacaggatgagtctgcagtggactgcagttgccaccttcctctatgcggaggtctttgttgtgttgcttctctgcattcccttcatttctcctaaaagatggcagaagattttcaagtcccggctggtggagttgttagtgtcccatggcaacaccttctttgtggttctcattgtcatccttgtgctgttggtcatcgatgccgtgcgcgaaattcggaagtatgatgatgtgacggaaaaggtgaacctccagaacaatcccggggccatggagcacttccacatgaagcttttccgtgcccagaggaatctctacattgctggcttttccttgctgctgtccttcctgcttagacgcctggtgactctcatttcgcagcaggccacgctgctggcctccaatgaagcctttaaaaagcagggcggagagtgctagtgaggcggccaagaagtacatgggaggagaatgaccagctcaagaagggagctgctgttgacggaggcaaagttggatgtcgggaatgcctgaggtgaagtttggaggaagaagacaggagcctgaaggctgacctgcagaagctaaaggacgagctggccagcactaagcaaaaactagagaaagctgaaaaaccaggttctggccatgcggaaagcagtctgagggccctcacaaaggagtacgaacgccttgcctggaggagcacgaaaagctggaagcttccagtaaatgggtcccctgggccaaaaaaggaagaataaagggcctcccttcctccccctggcctggaggcttggttttcaccctgggcaaggggccctgcttgcttttccggaaaagccccggc

SEQ ID NO: 162906 - DNA, 994 bp, Homo Sapiens
gggttaagccaattacagggttcccccccgttaaatggtgccttggaagaaggtgtgggaacaagggccccgaggatgaccgagcttatgagcctgtggaaaggggaatggggggaagcagaaggggcacaaacagaagtactggagggagaggcccgggctctcaggaagcagcaggcacgtgccaggtggaagccagctgcaggcaggggaggaaggaggcccttactcttccttcttgtccatgggaccatctactgcagcctgcagctttgcgtgctcctccagcaagcggtcgtactccttggtgaggccctcagactgcttccgcatggccagaacctggttttcagctttctctagtttttgcttagtgctggccagctcgtcctttagcttctgcaggtcagccttcaggctcctgttctcttcctccaacttcacctcagcattcccgacatccaacttgcctccgtcaacagcagctcccttcttgagctggtcattctcctccatgtacttcttggccgcctcactagcactctccgcctgctttttaaaggcttcattggaggccagcagcgtggcctgctgcgaaatgagagtcaccaggcgtctaagcaggaaggacagcagcaaggaaaagccagcaatgtagagattcctctgggcacggaaaagcttcatgtggaagtgctccatggccccgggattgttctggaggttcaccttttccgtcacatcatcatacttccgaatttcgcgcacggcatcgatgaccaacagcacaaggatgacaatgagaaccacaaagaaggtgttgccataggacactaacaactccaccagccgggacttgaaaatcttctgccatcttttaggagaaatgaagggaatgcagagaagcacacacaagacctccgcatagaggaaggtggcactgcagtccctgccgactcatcctgttgctagaaggtttccggacgcgtggtcg

SEQ ID NO: 162907 - DNA, 945 bp, Homo Sapiens
  misc_feature (14)..(14): n is a, c, g, or t
aggagcgagcctgngtggcgaattccgcacgagggttcggttgctgcggcggggcctgcacgttgactgtgggaaactcggaaacaagctcacatcttcctgtgggaaaccttctagcaacaggatgagtctgcagtggactgcagttgccaccttcctctatgcggaggtctttgttgtgttgcttctctgcattcccttcatttctcctaaaagatggcagaagattttcaagtcccggctggtggagttgttagtgtcctatggcaacaccttctttgtggttctcattgtcatccttgtgctgttggtcatcgatgccgtgcgcgaaattcggaagtatgatgatgtgacggaaaaggtgaacctccagaacaatcccggggccatggagcacttccacatgaagcttttccgtgcccagaggaatctctacattgctggcttttccttgctgctgtccttcctgcttagacgcctggtgactctcatttcgcagcaggccacgctgctggcctccaatgaagcctttaaaagcaggcggagagtgctagtgagggcggcccaagaagtacatggaggagaatggaccagctcaaaaagggagctgctgtttgaccgaggcaaattgggatgtcgggaatgcttgagctgaaattggaaggaaaagaacaggagcctgaaggctgacctgcagaagctaaaggacgagctggccagcactaagcaaaaactagagaaagctgaaaaccaggttctgggcatgcggaaagcagtctgaggggctccccaaggagtacgaccgctttgttggaagaagcacgccaaagctgcaagcttgccaataaaatggtcccctgggacaaaaagggaaaaagttagggggccttcttttcctccccttggcctgcaaattggttttccaacctgggcacgtggcccggc

SEQ ID NO: 162908 - DNA, 975 bp, Homo Sapiens
gggggggccggggctgctgtgggagagttcggttgctgcggcggggcctgcacgttgactgtgggaaactcggaaacaagctcacatcttcctgtgggaaaccttctagcaacaggatgagtctgcagtggactgcagttgccaccttcctctatgcggaggtctttgttgtgttgcttctctgcattcccttcatttctcctaaaagatggcagaagattttcaagtcccggctggtggagttgttagtgtcctatggcaacaccttctttgtggttctcattgtcatccttgtgctgttggtcatcgatgccgtgcgcgaaattcggaagtatgatgatgtgacggaaaaggtgaacctccagaacaatcccggggccatggagcacttccacatgaagcttttccgtgcccagaggaatctctacattgctggcttttccttgctgctgtccttcctgcttagacgcctggtgactctcatttcgcagcaggccacgctgctggcctccaatgaagcctttaaaaagcaggcggagagtgctagtgaggcggccaagaagtacatggaggagaatgaccagctcaagaagggagctgctgttgacggaggcaagttggatgtcgggaatgctgaggtgaagttggaggaagagaacaggagcctgaaggctgacctgcagaaactaaaaggaccagctggccaccactaagcaaaaaactagaaaaaagctggaaaaccagggttctgggccatgccggaaagcagttctgaagggcccttcaccaagggaattacgaacacgctttgccttggaggggaaccaccccaaaagcttgccaagggctggcaagataaaatgggccccccatggggcccccataaaagggaaaacaagtgaagggggccctcccctttccttcccccttgggccttggaaaaactggggctttcccaacccgtgggacacccct

SEQ ID NO: 162909 - DNA, 867 bp, Homo Sapiens
  misc_feature (211)..(211): n is a, c, g, or t
cttgcagggccagggggagggaaaggagggccccttactcttccccttctgttccatggggaccattttattgcaagcttgcagctttggcgtgctcctcccagcaaggcggtcgtactccttggtgaggccctcagactgcttccgcatggccagaacctggttttcagctttctctagtttttgcttagtgctggccagctcgtccttnagcttctgcaggtcagccttcaggctcctgtctcttcctccaacttcacctcagcattcccgacatccaacttgcctccgtcaacagcagctcccttcttgagctggtcattctcctccatgtacttcttggccgcctcactagcactctccgcctgctttttaaaggcttcattggaggccagcagcgtggcctgctgcgaaatgagagtcaccaggcgtctaagcaggaaggacagcagcaaggaaaagccagcaatgtagagattcctctgggcacggaaaagcttcatgtggaagtgctccatggccccgggattgttctggaggttcaccttttccgtcacatcatcatacttccgaatttcgcgcacggcatcgatgaccaacagcacaaggatgacaatgagaaccacaaagaaggtgttgccataggacactaacaactccaccagccgggacttgaaaatcttctgccatcttttaggagaaatgaagggaatgcagagaagcaacacaacaaagacctccgcatagaggaaggtggcaactgcagtccactgcagactcatcctgttgctagaaggtttcccacaggaagatgtgagcttgtttccgagtttcccacagtcaacgtgcaggccccgccgcagcaac

SEQ ID NO: 162910 - DNA, 812 bp, Homo Sapiens
  misc_feature (777)..(777): n is a, c, g, or t
ggcaggcggagagtgctagtgaggcggccaagaagtacatgggaggagaatgaccagctcaagaagggagctgctgttgacggaggcaagttggatgtcgggaatgctgaggtgaagttggaggaagagaacaggagcctgaaggctgacctgcagaagctaaaggacgagctggccagcactaagcaaaaactagagaaagctgaaaaccaggttctggccatgcggaagcagtctgagggcctcaccaaggagtacgaccgcttgctggaggagcacgcaaagctgcaggctgcagtagatggtcccatggacaagaaggaagagtaagggcctccttcctcccctgcctgcagctggcttccacctggcacgtgcctgctgcttcctgagagcccggcctctccctccagtacttctgtttgtgcccttctgcttcccccattcccttccacagctcatagctcgtcatctcggcccttgtccacactctccaagcacattacaggggacctgattgctacacgttcagaatgcgtttgctgtcatcctgcttggcctggccaggcctggcacagccttggcttccacgcctgagcgtggagagcacgagttagttgtagtccggcttgcggtggggctgacttcctgttggtttgagcccctttttgttttgccctctgggtgttttctttggtcccgcaggagggtgggtggagcaggtggactggagtttctcttgagggcaataaaagttgtcatggtgtgctattcccncgccagcccgttcgccaaccaccaaaccctgtcgg

SEQ ID NO: 162911 - DNA, 955 bp, Homo Sapiens
tccagaacaatcccggggccatggagcacttccacatgaagcttttccgtgcccagaggaatctctacattgctggcttttccttgctgctgtccttcctgcttagacgcctggtgactctcatttcgcagcaggccacgctgctggcctccaatgaagcctttaaaaagcaggcggagagtgctagtgaggcggccaagaagtacatggaggagaatgaccagctcaagaagggagctgctgttgacggaggcaagttggatgtcgggaatgctgaggtgaagttggaggaagagaacaggagcctgaaggctgacctgcagaagctaaaggacgagctggccagcactaagcaaaaactagagaaagctgaaaaccaggttctggccatgcggaagcagtctgagggcctcaccaaggagtacgaccgcttgctggaggagcacgcaaagctgcaggctgcagtagatggtcccatggacaagaaggaagagtaagggcctccttcctcccctgcctgcagctggcttccacctggcacgtgcctgctgcttcctgagagcccggctctccctccagtacttctgtttgtgcccttctgcttcccccattcccttccacagctcatagctcgtcatctcggcccttgtccacactctccaagcacattacagggggacctgtattgctacacgttcagaatgcgttttgctgtcatcctgcttggcctggcccaggcctggcacagcttggcttccaccgcctgagcgtggagagcacgagttaagttgtagtcggctgcggtggggcttgacttcctgtggtttgagcccttttgtttgccctctgggtgtttctttggtccccgaggtggtgcagcgtgcgctgagttctctgaggccataagttgctgtgacaacaaaggggggcgccaaattcccgggcccatgcgtcc

SEQ ID NO: 162912 - DNA, 457 bp, Homo Sapiens
  misc_feature (16)..(16): n is a, c, g, or t
  misc_feature (26)..(26): n is a, c, g, or t
  misc_feature (34)..(34): n is a, c, g, or t
  misc_feature (47)..(47): n is a, c, g, or t
  misc_feature (179)..(179): n is a, c, g, or t
aaagaaaattcacccngcgttctaanccaggaanggaacaccaacanggaaaaagcccagcaatgtaagagattcctctgggcacggaaaagcttcatgtggaaagtgctcccatggcccccgggattgttctggaggttcaccttttcccgtcacatcatccatacttcccgaatttncgcgcacggcatcgatgacccaacagcacaaggatgacaatgagaaccacaaagaaggtgttgccataggacactaacaactccaccagccgggacttgaaaatcttctgccatcttttaggagaaatgaagggaatgcagagaagcaacacaacaaagacctccgcatagaggaaggtggcaactgcagtccactgcagactcatcctgttgctagaaggtttcccacaggaagatgtgagcttgtttccgagtttcccacagtcaacgtgcaggcc

SEQ ID NO: 162913 - DNA, 712 bp, Homo Sapiens
ccccccagaaacggtatacagatacgattcggcttcgtaccccttcacgctccacccaacagagccaatcaaaatttcgatgagatggagggaattagggagacttctcaagtcattttgaggcctagttccagtcccaacccaaccactattcagaatgagaatctaaaaagcatgacacataagcgaagccaacgttcaagttacacaaggctctccaaagatcctccggagctccatgcagcagcctcttctgagagcacaggctttggagaagaaagagaaagcattctttgagaaaaacaagcaaaggagaagagtgttactgtacccttatgacagaattgtcctggattttgactccatccacgcccatcacctttctacattttgctgacagataactaaccgatgatgaggccgaggtaaaagagacatctgcagtgtgacagaagggagcatgagaagcatggctcaccagccagcctctgtggtctttgtaattagaagcttcagaactcactaatactactgtacctttcattggcgcattaccccataaaactttttgagacgaggtgagatctgagtataaagataggtcagaagtattttaaagggcttaatgtgccaaaaagaaaaaaagctagagaccctttttgcaaacatttggtgaccacacatttgagggaagacgtggctggagcgtgaa

SEQ ID NO: 162914 - DNA, 1273 bp, Homo Sapiens
ggggcgctgagcttgcagggccgctcccctcacccgcccccttcgagtccccgggcttcgccccacccggcccgtgggggagtatctgtcctgccgccttcgcccacgccctgcactccgggaccgtccctgcgcgctctgggcgcaccatggcccgcggggctgcgctggcgctgctgctcttcggcctgctgggtgttctggtcgccgccccggatggtggtttcgatttatccgatgcccttcctgacaatgaaaacaagaaacccactgcaatccccaagaaacccagtgctggggatgactttgacttaggagatgctgttgttgatggagaaaatgacgacccacgaccaccgaacccacccaaaccgatgccaaatccaaaccccaaccaccctagttcctccggtagcttttcagatgctgaccttgcggatggcgtttcaggtggagaaggaaaaggaggcagtgatggtggaggcagccacaggaaagaaggggaagaggccgacgccccaggcgtgatccccgggattgtgggggctgtcgtggtcgccgtggctggagccatctctagcttcattgcttaccagaaaaagaagctatgcttcaaagaaaatgcagaacaaggggaggtggacatggagagccaccggaatgccaacgcagagccagctgttcagcgtactcttttagagaaatagaagattgtcggcagaaacagcccaggcgttggcagcagggttagaacagctgcctgaggctcctccctgaaggacacctgcctgagagcagagatggaggccttctgttcacggcggattctttgttttaatcttgcgatgtgctttgcttgttgctgggcggatgatgtttactaacgatgaattttacatccaaagggggataggcacttggacccccattctccaaggcccgggggggcggtttcccatgggatgtgaaaggctggccattattaagtccctgtaactcaaatgtcaaccccaccgaggcacccccccgtcccccagaatcttggctgtttacaaatcacgtgtccatcgagcacgtctgaaacccctggtagccccgacttctttttaattaaaataaggtaagcccttcaatttgtttcttcaatatttctttcatttgtagggatatttgtttttcatatcagactaataaacaaggaacattagaaaccaaaaacagagacaagacacaaacaacaaacaggccccacggagagatagagccacacacg

SEQ ID NO: 162915 - DNA, 883 bp, Homo Sapiens
  misc_feature (131)..(168): n is a, c, g, or t
tgtcacgcccagccaactcccaggagccttaccagctcagctggagggcagaatttcacatttgttggccctgcataggcaaggaagaaagtagaggccagggctggcagaagctggtccagaccaaacannnnnnnnnnnnnnnnnnnnnnnnnnnnnnnnnnnnnntataaatacaaaagtaggggtgggggcaagtaccagcacctcagcctagtcggtgcaggtgatagttatgaagctaagtcctaggccaggaacaaggcagccaggtccagccagcatagttgacccctctatggacaggggccagtgcagccacagcattccagtgctcagcccctcagctgggagatcagcgactgctgccacgtgcccagaaatggctcgtccttacactacagcggaatgcaatgagggtgggtgagaagatgatgggtcggttatctcattccttttctttatacgacttcactttcagagacttcagcgttccatgtctgctgtgctgtggaacccagagtgctcttgcctggatggctgagaatcccttggaccctggaagcacctactccatgatggcccggtatagggcaggctcaatataatcttcccggtatcttgagttgataactcgttgccgtttcttttcttgcttaacctctttctctgtgaaaatcacattgaagcgcatgtatgaggctactgacagtctagatttgactctcttgggaagctcttcatccagtgtgtatacatcatctctcttaaccacaagttgtgagccatcctcaaactccacctggtacatttggatagggtgggaggccacaaacttggctccatagacttggccgtctgtccatctcacttggaccacttc

SEQ ID NO: 162916 - DNA, 650 bp, Homo Sapiens
gttgagaagcccctgcacacactgatgcacgggcaaggcgtgtgcatggagctggcggagatcgaggccatccaggaaagcctgcagccctctgacaaggacgagggtgaccaccccaacaacagcttcagcccctgtagcgcccatgaccgcagtgcctgcagaagcacttcgccaaaattcgagaccggagcaccagtgggggcaagatgaaggtcaatggggcgccccgggaggatgcccggcctgtgccccagggctcctgccagagcgagctgcaccgggcgctggagcggctggccgcttcacagagccgcacccacgaggacctctacatcatccccatccccaactgcgaccgcaacggcaacttccaccccaagcagtgtcacccagctctggatgggcagcgtggcaagtgctggtgtgtggaccggaagacgggggtgaaggtttccggggggcttggagccaaagggggagttggattgccaccagttggctgacagttttcgagagttaggcctgccagcaggccagggactcagcgtcccctgctactcctgtgctctggaggctgcagagctgacccagagtggagtctgagtctgagtcctgtctctgcctgcggcccagaagttaccctcaaa

SEQ ID NO: 162917 - DNA, 792 bp, Homo Sapiens
  misc_feature (175)..(220): n is a, c, g, or t
ggggggagctggactgccaccagctggctgacagctttcgagagtgaggcctgccagcagcccggggactcagcgtcccctgctactcctgtgctctggaggctgcagagtgacccagagtggagtctgagtctgagtcctgtctctgcctgcggcccagaagtttccctcaaannnnnnnnnnnnnnnnnnnnnnnnnnnnnnnnnnnnnnnnnnnnnnagcatgggtgtgcccttggggtaagccagagcctggggtgttctctttggtgttacacagcccaagaggactgagactggcacttagcccaagaggtctgagccctggtgtgtttccagatcgatcctggattcactcactcactcattccttcactcatccagccacctaaaaacatttactgaccatgtactacgtgccagctctagttttcagccttgggaggttttattctgacttcctctgattttggcatgtggagacactcctataaggagagttcaagcctgtgggagtagaaaaatctcattcccagagtcagaggagaagagacatgtaccttgaccatcgtccttcctctcaagctagccagagggtgggagcctaaggaagcgtggggtagcagatggagtaatggtcacgaggtccagacccactcccaaagctcagacttgccaggctccctttctcttcttcccaggtccttcctttaggtctggttgttgcaccatctgcttggttggctggcagctgagaagcccctgctgtggaagagcgaaaggggtcaaagg

SEQ ID NO: 162918 - DNA, 813 bp, Homo Sapiens
aaaagacatcatggccaactggtaggttcctaagtctccttccatccagtcaagccagaagatgcccaggggagtagggaggtttggggagggaggtttaggggaaggagatatggagagggaggcagagctacagggagcgagccactggaaggataggttcatcccggtgacttcatggctgtgaccacaaatggggtagggaacaggacccaggaagcccctcatcccctagcacgtgggtcttctccattaggcacattcagtccactcttgcattctttcttcccaccctgactgctcagagaaatgtaccccacctccctagccctctgtgcttcaagtcttcctttgacccccttcgctctcccacagcagggctctcagctgccagccaaccaagcagatggtgcaacaaccagacctaaaggaaggacctggggaagaagagaaagggagcctggcaagtctgagctttgggagtgggtctggacctcgtgaccattactccatctgctaccccacgcttccttaggctcccaccctctggctagcttgagaggaaggacgatggtcaaggtacatgtctcttctcctctgactctgggaatgagatttttctactcccacaggcttgaactctccttataggagtgtctccacatgccaaaatcagaggaagtcagaataaaacctcccaaggctgaaaactagagctggcacgtagtacatggtcagtaaatgtttttaggtggctggatgagtgaaggaatgagtgagtgagtgaatccaggatcgatctggaaacacacc

SEQ ID NO: 162919 - DNA, 902 bp, Homo Sapiens
  misc_feature (166)..(211): n is a, c, g, or t
  misc_feature (849)..(857): n is a, c, g, or t
ggactgccaccagctggctgacagctttcgagagtgaggcctgccagcaggccagggactcagcgtcccctgctactcctgtgctctggaggctgcagagctgacccagagtggagtctgagtctgagtcctgtctctgcctgcggcccagaagtttccctcaaannnnnnnnnnnnnnnnnnnnnnnnnnnnnnnnnnnnnnnnnnnnnnagcatgggtgtgcccttggggtaagccagagcctggggtgttctctttggtgttacacagcccaagaggactgagactggcacttagcccaagaggtctgagccctggtgtgtttccagatcgatcctggattcactcactcactcattccttcactcatccagccacctaaaaacatttactgaccatgtactacgtgccagctctagttttcagccttgggaggttttattctgacttcctctgattttggcatgtggagacactcctataaggagagttcaagcctgtgggagtagaaaaatctcattcccagagtcagaggagaagagacatgtaccttgaccatcgtccttcctctcaagctagccagagggtgggagcctaaggaagcgtggggtaacagatggaggaatgggcacgagggtcagacccactcccaaagctcagacttgccaggctcccctttctcttcttccccaggtccttccttttaggtcctggttgttgcaccatctgccttggttggctggcacctgaaaaccctgcctgtgggaaaaccaaaggggttcaaaggaaaacttggaagcaccgaggggctaagggaggggggggtaccttttctccggaacaagccnnnnnnnnnaaaaaaagaaatgccaagaaggggactggaagtgggccctaatgg

SEQ ID NO: 162920 - DNA, 1004 bp, Homo Sapiens
  misc_feature (263)..(263): n is a, c, g, or t
  misc_feature (652)..(697): n is a, c, g, or t
gttgagaagcccctgcacacactgatgcacgggcaaggcgtgtgcatggagctggcggagatcgaggccatccaggaaagcctgcagccctctgacaaggacgagggtgaccaccccaacaacagcttcagcccctgtagcgcccatgaccgcaggtgcctgcagaagcacttcgccaaaattcgagaccggagcaccagtgggggcaagatgaaggtcaatggggcgccccgggaggatgcccggcctgtgccccagggctncctgccagagcgagctgcaccgggcgctggagcggctggccgcttcacagagccgcacccacgaggacctctacatcatccccatccccaactgcgaccgcaacggcaacttccaccccaagcagtgtcacccagctctggatgggcagcgtggcaagtgctggtgtgtggaccggaagacgggggtgaagcttccggggggcctggagccaaagggggagctggactgccaccagctggctgacagctttcgagagtgaggcctgccagcaggccagggactcagcgtcccctgctactcctgtgctctggaggctgcagagctgacccagagtggagtctgagtctgagtcctgtctctgcctgcggcccagaagtttccctcaaannnnnnnnnnnnnnnnnnnnnnnnnnnnnnnnnnnnnnnnnnnnnnagcatgggtgtgcccttggggtaagccagagcctggggtgttctctttggtgtacacagcccaagaagactgagactggcacttagccccagaggtctgagccctggtgtgtttccagatcgatcctggattcactcactcactcattccttcactcatccaggcacctaaaaacatttactgaccatgtactacgtgccagctctagtttttcagccttggggaaggtttatcctgaccttcctctgatttttggcatgtgggaggacactccctataagggagagttccagccttgggggaagat

SEQ ID NO: 162921 - DNA, 425 bp, Homo Sapiens
gctgacctagaggatcccgactagcccaaccatacctcatgtatggtggagatctgcctagtgttactgatattcgaagacctcggtctacctccttcagtggctaaaatctgataaggccctatatgatgctctttaatgatggcacctttcaggtgaatttctaccatgatcatacaaaaatcatcatctgtagccaaaatgaagaataccttctcacctacatcaatgaggataggatatctacaactttcaggctgacaactctgctgatgtctggctgttcatcagaattaaaaaatcgaatggaatatgccctgaacatgctcttacaaagatgtaactgaaagacttttcgaatggaccctatgggactcctcttttccactgtgagatctacagggaacccaaaagaatgatctaga
